United States Patent Application Publication US 2014/0141044 A1 - sequence listing, part 5

SEQ ID NO: 237 - DNA, 201592 bp, Bradyrhizobium colbertium
  misc_feature (24978)..(24987): n is a, c, g, or t
  misc_feature (46009)..(46018): n is a, c, g, or t
  misc_feature (198706)..(198715): n is a, c, g, or t
cagttcatgctcggtgtctcgttgacgctggcggagtgatcagggcatgacatcgcgcgcggacaagctcggccggatggtctctctcgtgaagctccagcttcggctgtccgaatggcagctcgcgcaattgcgagagcaggagcgcagcctgcaggacgagcaggaatggctggtcggagccctgaacgatggcaccccgcccacgggatcgtcgagcgattcgatcgcgcggcgtttgaacaggaccagcgtcggcgcacgcagcgtgcgggcgcaggcctcgcagcagctcgaccaggttcgcgcggaaagccgccgcgtgaaacaactcgaggaggtcgcgaaggcggcgcttgcggacaagctgcgtgaagcggagaagcgctcgctcgaggatatggcaggcgcaaacctggtcttgagccattggacgccggcgatcgccaagggaaacaagacatgatcgtgacagcgacaaccgacctcgttctcgatgtgctcgaagccgccgaccccgtggcgcagcgcgcggccaccgcaaagctcgatgcactgagatcctccgatgccgatttcacggtcgcgatggaggcggaggtcggcagggccagggcggcagctgccgatcaatccgcaacgaaggctgcggaagtaaggtctgacgcggtaaacggcgcgccggtgcaggtcatcaaggcgccggcctccggcgaggtttaccggaagttcgaggccttcatcctccagaccttcgtcgagacaatgttgccgaaacagtcggaggagatctttggcaagggcacggctggtggcgtctggaagtcgatgcttgcagagcagcttggcaaccagctggcgaagggcaagggctttggcatcgccaagcagctcgccgccgcacgtccggatgggccgcgcgctgcggagaaggccggatcatgatccgcagaagggtgacagaacttgaggggtgaacttccgatgcagctacaagaaggcgcggcggccatgacgatggagcagacgctcgcggataccgaaatgacgacgacggaaggagcagcaaatgatgcgctgctccccgtgctgttgccggccgcgggcggcgagatgatggttgacgctgcggatgcggtgagatcggacgaggtgcgcggcctgctggccgcaatccgtcggctcgcgagcatcgtcgaggaggagacggtcgcgctcgcgacggggcagaaaatcaatttcgacgatttcagcgcgcgcaagagccggagcatgctcgagttcgtccgcctgatgcgggcgcggatgcatcttggtggcgaagtcgagatcaccgaggagatccagcggttgcgcgagagactcgagcggaatcgttcgattctggaaatgcactacgacgcggtgcgcgaggtcgccgccatcatcgtgaaggcgatcaaggaagccgagtcggacggcacctataccggccgcgcggcgcaggacggacaatgatcagacttgtgctggcggggctctgggtgtgcatcctcaccgtgggcacgagctatgcggtggcctactggaaggagaatggcagcctgctgccggcgaaggacgaatatctcgacgggctgcaatatcagaagacgcgagtcctgagcgtgccaatggtcgagaacggcaacgtgcagggctacatcgtcgcacgtttcgtctataccgtggaggggcggacgatgcaccagctgacggtgccgccggagccctttgttgtcgacgaggccttccgcaggatctatgccgacgatcgcctcgatttcaggaagctcgcccgttacgatctctccatcctgacgacagccatcaagcagcgtgtcaatgagcgtatgcaggctgaaatcgtccaggacgttctggtcgaggacttcaactacgtgtccaaggaagaattccagcagaagccgtagcgcgtgacggctggcgtggaggcgcgtatcggccgatagggcgacacctctccgttgctcccaccgtgtcgagggcaaccgcaattgaccattcagcagagctcgccatgcccggcttgtcccgggcatctacgtctttttgtgccacaaagaaggcgtggacggccggacaagcccggccaagacgctggagatgccgtgtcagttgcccgccggatatgccgccggcacggcatgcgccctgttcaagaggatgccgacatcgtcgagctcctgcacctgctcgtcgagggtctcgccggccgggatgttgaggcggtaaccgacataacgccgggccacgatcgcgtcgaagccgaggcggtcgcggagcttcttgcgcagcttgctgacatggctctcgatcacgctctcgtcgaaggtggactcgaagatgccgtagacggcgttgaatatctgcgtcttggtgatccacttcccgtggttggcgaccatatattcgagaatgcgcagttcgcggcggggcagggtgagcgcgtggcccgcgatctccgggtctcggccgttgaagaagacttggatcctgctctcgcagggcctcggcagctcgccgacccggcggcgcgcgatcgcggccgtccgggcgaggatctcgcgcaggtggatcgggacgtgcacgacgtcgtcgacgcccgattcgaacagctccagcgtgttcttgagcatcttctggccgctcacggcgatgatgggagcagaggagcgcttgcgcatcgcccgcggcaggcttccacgggcatcgcaatccccgagcaggaaggcgtccaccgccgccagatctgcttcactcgcggactgcagccagtcccagaattctcctgaggagaagccgatggacgatacgccttcgcgaacgagccctccgacgtagctgcttgcgacgctctcgcgatcatcaacgataataaacatcagtctttcgcccctgtttcgcacttgctgcggccggctggttgtcgtgatgctccggctcggcaacgatgctgtttgacgacattccttcccgcgaaccgttgttatggtgtcgatattcacgggcagccctacgcattcagtgcccgctgctcgcaggcctgctactccgactcgatactgaaacgcttactgtgaggctcggcgggtgtcgtacggatcacctcgcggagcggatcgagaaacgactagaacagttgcgccaagtagctcattgcgtccgaacgccactgaactgtgtcggtctcgtcgccaaccggcgagaatcacttgagtaggaccgtaacaattgccgatttccgatcaagcgtgcgtagcaaaccgtttgctatgtctgcttgatgctgttgattcgcttcaggttgtttcttgatgcatccaaacgtagcagttgattttgatgtttaactagttctgcatcatggaggttgtaaagttccgcaaccgctggaattacagctgtttccgagcgctgccgtgattcatgccctgtgagggatttgaaccccggattgacacgggctgtctctcttcttcgtgcgacaattcgactcacgctcggaggcgcgcctccagcttggcgaagtcttggcgcgtgtgtgtctttcgagtcgcactatcgccgcgtgtatggcgcgattgcatcaagtggcctcacgcgatgaaagtgcgatgcgtacgtttcgggcaagcttcggcaaataacgtcaccgttcgacagttcgaacagagcggagcattttcacatgtcgtccgatggacaagctcgtcccaatgcgaccgcggaggcatccgcggcgacgaagccggttgcggaggcaggcgataattcgacgcgagcgaccaagccggctgcggacgcaaggcgtgtttctgccgtggcgagcgacgaagttctcgcgaaagaggcgctcgagggattgaaacggattcgtgccaaggcacgcctcgacaagatggcgattccgaaacctgcggcggccgtgatcaagccggccgtcatcgtggcgaagccgccgccagccagtccgccgtgggtcgcgccgctcgcaaccctggcggtcgctgccatgttggtggtctgcgcctgcaccggcgtgatcgcatatctcaccacccaacccgctcagaacaatgtcacggcaaatgcggagatcagacatctgcgtgagaccgtcgcgcagctgcgcaggcaggtatcgggaatgtccgagaatctcgacggcttgcgcaccgccgtcgatcaatcgagcaaggcgacgaatgatcgcttcggcaggtttgccgagaacctggaccgtatcgagcgggtgagctcgtcttcgacggcgaagctcgataagatcgctcaggtgcaggcccagactccggcgccggcaattgtgcaagcgcagccggcgccgcagcaagggccgatgatggcctcggttgcagcgcccgaattcacgggctcggtgcctgcggccgagcgtgcgtcggcgccacgcaagacgatcaagggctggtcggttcgtcaggcctatgagggcatcgcgatcctgcaaggcccgaacggcgtcgtcgaggccgtgctggggcaacaggtgccggggcttggccgcatcgaagagatcaggagcgagaatgggcgcctggtggtggagtccagcggcggcgtcgtctattcgtcacgcaaggcgacgccctgatcgagcgccgccttctattggcggtgatgctcgaagctggtgcatagcagatcaacctctgcctccgcgatcggggcgcggaacaggcggcagctgaactcgacggtcgtcttgttgtccgtcgtgatgcgatcttcccgcaggaagatgcatcgcttgcaaacatcggtgtggtgccgctgctcggcggcgtccgactggtccagaacgtggcggaacgtgtcacggaagcggatcttgacgtcgtcgtcgagtacggcgatcgcctcgacgagaacgttgacgggatcgcgcaccaggaatttcttgccttgctgcgtcacgctcagcgtcaccgaccgcttgtccgtggcggagcgctttcgctcgagatagccgagccgctcgagctcgccgatgatgaacgaagcggtgccgcgcgtggtgccgacgtagctcgcgagcgcagagggcgtccgcgagaagcgattggcgcgagagaggaatcgcagcgccatccattcgcggtcgcgcaacccgtgcttggtgccttcgaaccacaggatacgcgcggcctgctccaacagttcgatcgattcgcgagccaaattcatttcagttccaagtcggataaacgtttattcaattgagctctgggcggcgcaatctgagtggaccagcatcaacccgcaggcgctccttcatccgtcgccggacttcggaccacgtggggaaagttgcccctctgtgtcggagagatggaacttcgggcgtggaactagggcgtcacaaagaaagttcgagtaaaccgcgcggcccaagtccttcgaaaatttcactcaaatgacgacggcttgcatgggagtcggcggaaatgggcggcgcgccggcaacattatgtgtcattggcgcctttaccgggcctgtttgttgcgcctatgagcgccgagagcgcgaacgtgtgcaacatcgccaacgtctgacgacccggctggccggaagacaaccgctattttcggttaatggatgttgcgatgcaatgaagctggacggttaagtccggcactgcgcgaaagccgcgccaatgtcagagtgtcgttggaattgagcgagcatgtcgttcaacgtgaacccctcaactcattcagtcgctgcttgcgcacgcgccgtcctttcgcgatgggccaatacctggacggagccgaaggatgacgcgtggagccgcgccctgctcgcaggctggtgatttgcgtatcgcccgcaagtattggcgaatgcgacgccccgggcgcaatcagcaggaaggaatagaccaatgagcttcgagaccaccatgacatccgacgttgtcgggctgaccaagagcgccccggtctcgcggcgcggattcatgagtgccagcgcggccgtggccgccggctacacgcttgcggcaggtccggtacgtgcccaggtgatcacgaccgacgccaacggcctccagaccggcgacgccaagatcaaggtcggctccgaagagatgcctgcatacttcgcccggccggccggcaacaccaaggcgccggtgatcatcgtggcgatggagattttcggccttcacgaatacatccgggacgtaacgcggcgcctcgccaagctcggcgcgtttgctgttgcgccggactattatttccgcaagggcgtcgacctcaccaaggtttcggagatcaaggatctgctgccggtggtgaacgccaagcccgacgcggagctgctgtcggatctcgatgcgaccgtggcgtgggcgcaatcgcaaggcggtgatgccgccaggctcggcatcatcggtttctgccggggcggccgcacagtctgggagtacgcggcccacagcggcaccctcaaggcaggcgttgccttctatggtacgctgatcgatcccgccaatccgctgtggccgaagagcccgatgcagctcgcgcccgaaatgaaggcgccggtgctcggcctctacggcggcgccgattccggcattccggtcgcccaggtcgagcagatgaaggccgcgctcgagcagaacaagaaggcggccgaattcaggatctatcccgaagcgccgcacggtttccacgccgactaccgcggcagttaccgcaaggacgccgcggaagatgcctggaagcaggcgcaggcctggttcaggaagtatggagtcttgagctgatgttggatggaagagggtggcccgagcggccgccctcgcactttccgggcgtgccgatcgccgtcggcgctgacttcagcagcggtgcacgtgcgctgcattgcgcgtgacgggcggcagccgccgcgatcatgacgatcgatgtggaagcgacgggactatcgtccttcacccgcgcgccagagcgcatcgaggccctgccggtaggtcgggtgggccagcgcgacgccaagctcgtgcttcaacttcgcgttggagacgcgggcgctgctggcatagaaactgcgggccatcgctgacatttcggcagtggcgaacgcctcttcgggcggcggtgtaacgcccatcagtttcgctgcataagtgatcacgtcctgcggcggcgcgggctcgtcatcgcagatgttccagatgccgccgccctggtgatgaacagcggccatgattgcgctcgcgatgtcgtcgacgtggatgcggttgaagacctgtccgggcttgatgatgcgcctcgccgttcccgcgcgcagcgtcgccagcgcgttgcggccggggccgtagatgcccgcaagccgcaggatcgcggcatcgccgtgcgtcgtgtccgtccaggcctgctccgctgcgatccgcatttgcgttcgctccagtgtggcctgcggcggtgtgctctcgtcgacccagccgccgccgtgatcgccgtacacgccgatggtggagagatagacgaccctgcggcgccccgcctggagcacgtcgccgaacgccgcgatcgcgggatcgccggagcttccgggcgggatcgacaccaatagcacatcggcctcgcgaacctgttgaacggtcgcgggggtggaagcgccgtcggaaaaggcatgcacctccaggccgccgaggtcgtcccgctgcgcgggatcgcgcacggtgccggcgacgtgcgagaagctgccgccgtgttggcggacgaagtgccgggcactgtagccgaggccaaggatgaagagccgcatgcgtttcccgtgcaggtccgagttcccgcgcgagctgcgcgtccttcgctcataagagatttttgggtccggcaaaagatattgcgatttgtcccgtccgccgcttcgagggatgctcgcccatcacaggcagatcggaagggaggcgtcgttggcgaccggggcgatgatgcaggcaccgcctgcggccgcgcgatgccatgccgacgaactgatccggcgcgcggcggcgctgatcttcgacgtcgacggcaccttggccgaaaccgaggaactgcatcggcaggccttcaaccttgcctttgcccgccagggtctcgactggcattgggatcgcgccgtctacaaggacctgctgcgggtgaccggcggcaaggagcgcatgcgcgcctaccatgcatcgctgcggaccgcggcgccactggtcgacgaggacgtcgccgagcttcaccgcatcaagaccgcgcactttgccgaactcgtcaacaccggctgctgcccgttgcggccgggcgtggcgggactgctcgcagcagcaagggcgcgcggccagcggcttgcgatcgcgaccaccacctcgcacggcaacatcgatgcgctgctctcgcaggctttgggaacgcgctgggcggcggagttcgacgcggtggtcgccggcgacgatgtcaggcacaagaaaccggcgccggacgtctacctcgaagtgctggcgcggctgaagctggatgcgcccgactgcgtcgcggtcgaagattccagcaacggcctgatcgcggcctcccgcgctggcgtcccggttctgattacgcgcagcatgttcttcggagaggacgacttcaccgcggcgcgagtcgtgctggacgatctgtcggagctcggcgccgcgacacaaaaaccgaaaaacaaccccatgcacagtagatcacgcaggcgtgatcgctgcgctcagtggatgcggtgactcgctccatcgtcctcggcctgctcgacaatctgcgcgatagggctcgactggtgatgcacaaggcgccagtcgtcgccgacgcggcggaaatggttcgcagccgccaaagcggtgccgtcgacgatctcgatgcacagcacgcgcgcgctgtcgccgtcgacgatggcctgcggctcggcgcagacgatttgcggccgctccgggttctggaggatgtcacgccagcttccgatcaccgtggcgcgcccgatgatggccggccaaccgggatggatgcaggaaatggcgtcgtcatccgcccacatccgcttcatttcgtcgaagtcgccggtcgaaaaggcggcgtagaaggccgcgttggcggcgatgaccttgctgtcctttgccattgctctcgggtgcggcaatggcaggcaaaaatcaagcgcgacttccgtcgactttggccgcagtgcagcattcaagatgcaatccagccgagacgagcgtctccgccgccggcggagagccgcaggcgcggcttggcaccgagcggcagcgacagcccgaactgctcggcgacgggcgcgacaggtgcgagaagctcatcgagatgatgctgccgcaagatcgccgccgtgatgtcgcgataggtctccagccggtcgcggaattgcgggatcgtcacctctccccgcatgcggggagggagaagaacatcaataacacgccgccatcgcgccgagtttcggataaagacggtcgatcgcgacgatctcgcttttcatctgcgcgatgatccagtcgcggatctcggcggcgatcgggcgcatcggccggttgcgcggcggcaggaattcgcagatgcggcgcgtggtggtaagcgtgccggaggcgggcaccagcgcgccggtcaggagccaatgcgaagccaccgtcagccagccgagcgcaatcccctggccgagcagcgcggcctgcaccacgaccgcatagtcggtgaagctcagcgctttcgccgccccgcggcgtccggtgaggagcgatgcgtaatccgcggaccagtctcccggcgtctctgcgaggcggatgatggtgttgccttcggtgggatcgctctcgccgagatagccggggctgcacatcggcagcatgacctccttcatcaccagcgtggcgccggaggacggctcgtcacggtcgcgaaagcgcatgcccagatcgacattctccaccggtccgcgtagtgcaccggagatgagctggaagcgcagatcgacctccggaaaccgcttctgcagcttgtcgatgcgcggcatcaaccaatgcgtggtgaaggctgatgagaccgatagcgtcactgtctcggtgcccttgcggcgccgctcgatctcgacgaggccggtctcgatactgcgaaagccttcgagcacgcggcgatagagcaattcgccttcctcggtaagtaccgcgcgtcccgctgtgcggtcgaacaggcgaacgccgagatgctcctcaaactgaccgagcatccggcttactgccggctgcgtgacgttcagctctgcggctgcggctgtaaaactgccattgcgcgccgctgcgtcgaagacgaacagggcgttactggaaggcagcatccggcgcagctcgggcataacgtcatgttatgagcgcggtgagaatttggcaattgccgagttttgccaagtctgttgtcattggcatgacggcctacagacaggggatcggagagaagatcggttgcagcgcacgctgaagccgcgagtgctccagatgcctgtctataaagcaggcttatggcgcgcagtgaggcacgccattgcagggatgggtgaggtcgatcgttggacaaacgagcggagagcgtcgagatcaggtcggccagcaagacgtatggcgccgtccgcgccctcgacgacgtttctctcaacgtcggtgccggcgagttcgtctcgctgctcggtccctccggctcgggcaagaccactctgctcggcattttgggcggcttcatcctgccatcgagcggatcgattttcttcggtggccgcgacgtcacctacatgccgccgcacaagcgcgacatcggcgtcgtgttccagaattacgcgctgtttccgcacatgagcgttggcgagaacgtcgcttttccgttgcgcgcgcgtcgcctgccgaaggcgagctggcccgacaaggtgcgcgcggccctcggcatggtcgggctcgccggctacgaggagcgcggcatcgcccagctctcgggcggccagcgtcagcgcgtggcgctggcgcgcgccgtgatcttcgagccgcgcctgatcctgatggacgagccactctccgcgctcgacaagcagttgcgcgaatccatgcagatcgagctgcgcgcgctgcaccggcgcatcggcgccaccatcatctacgtcacccatgaccagcgcgaggcgctgaccatgagcgaccgggtcgccgtgatgaaggacggccggctgatccagatcgacgaacccgagcgcctgcacgaccatccggcagattccttcgtcgcgagcttcatcggggaggcgacgatgctgcccgttcgccgtgtcgatgcggcctgcgtcgcgctgggcaatgcgctgctgcgcagcgcccgtgccattcccgatggcgatgcactgatgctcgcagtgcacggcgaaaagctcctgatcgacgatggggcgcaggatgccgcctgcaaccggctgaccggcacggtcaccgacatcgtctaccagggcgagagcctgcgcatcttcctggcgctcgctgacggcatcgcgctcagcctgcgccagccgagctatcaccaggcctacagccgtattccgccgctcggcggcagcctcacggtcacccttcaccccgaggacaccatcgtcgtgccccgggcggactgaagccagccttgttcaacctgagagaagaaactgacatgtcgacccaagccgcgttcagcaatttcaaggttctcaccttcgacgtcgtcggtaccttgatcgatttcgagactggcgtcctcgacgcagtgcgcaagatttccggcaagacgtcggccgagctcagcgacgaccagattttcgagccgtacaagcgcggccgcgacaagcattatggccgctcgagcgaggcgatgttccacgtctatcgccatctcgccaaagagctcgggctgccggctgacgatgcatcctgcgatgtgttccagctctcggtgttgcactgggggccgttcgcggattcggtcgaggcgctgaagcgcctgcgcacgaagttccgcctggtggcgatgaccaatgccgaccgcgtcgcgctgtcctgctatgcccacgcgctcggcgatcccttcgacgatacggtgtgcgccgacgataccggtgtcgccaagccgaatccggaattcttcgcctacaacagggggcgccagtccgctttcggctacaagcagtccgacatcttgcacgtcgcgcagagccagtatcacgacatcgggatcgcgcggaagctcggctaccgggtgtgctggatcgagcgccgccagggcattgcaggcttcggcggcacgccggcagtggagacgctgaccaaaccggactttcattacccgacgttgaaggcgctggcggacgcggccgtcgggccagcggcctaacgttgtgagcgcgggcatgacacgggactggagcgagctgccatcggtcaactcgctgtgggaagccacggccgagccggcgcgtgcgtttcccgtgctgtcaggcgagcagcaggccgacgtggtgatcatcggggcgggctatacgggactctccgccgcgcaccacattgccaaagacggcctgtcgcccatcgtgctggaggccaatcgacccggctggggtgcgagcgggcgcaatggcggcgtgatcaccgcaaagtttcgcctctcgttccgtgaggtcgacgccgcacatggccgcgccatggccaagcgcatgtacgagatcgcgcatgaatcgaccgacatggtcgaggaacttgtctccgagttcggcatcacgagtgcgaacctcacgcgcaccggccaggtcaaggcggcgcacaacgagacgacgctgaagaccgcgatcagcgaggccgattggatgacgcgcgaaatgggctcggccgaggtccgcatcctcgacaagcacggtgtgcgggacgagaccggctccgacatgttcgtcggcggggtgctcaatcccggctcgggcggcatccatccgttgaattatctgcgtggtctggcaaatggcgttgcgagccgcggcgtcccgatcttccaggaatcacccgtggtgcggctgcggaaggagagcggcggtatcgttgccgagacgccgcaaggtgcagtgcgagccaagcaggcaatcatcgccaccaacagctattccgacctgaccggcgcgactgcgcagatgcagcgcacgctgatcccgttccgcagtgccatcatcgccaccgagcagttgccgcgcaatctggctggacggctgatgcccacggggcgcacctataccgagaccaagcgcatgatgcgctggttccgcatggtggacaatcgggtgatctttggtggccgcggcgccttcggcaagcaggactcgcaagccgccttcgacgccctgcgtaaggcaatggtcggcatcttcggcgatctcgccgatgtcccgctcgaatacaaatggtcgggcctcgtggcgatgacgatggactcggtgccgcatatcggccggctcgacgatcgcacgctggtctcgatgggctacaacggcgccggcgttgcgatgtcgagcctgatgggccgctatcttgccgccttcgtgcgcggcgagacgccggaggtcggcctgctcgatgtcaggcgcatgaagcccattccactctatccgctgcgcgagcccgccgtccgcatggtcgcaggctggtaccagtttctcgatgcgatcggtcagtgagatttctttggcgatggaggatacgaggatgacgacgaaacggaattccggatttggttacgccttgttgggcgcttcgatcagtgcagtcgcgctcggcactgcagccgacgccgccgagcagatcaccttcgtctcgcaaggcggcgcctatcagcaggcgcagacggtggcgatcctcgatccttccgccaagaagctcggcatcaccatcaaccaggattccatccccgacgcctggcccgcgatcaagacgcaggtcggcagcggcaagccaatctgggacgtcgtggataccccgaccggctattgcctgcgcggcggcgagcagggcctgatcgagaagctcgacttctcgaagattccgaacgccgcagcgatgccggaggcgtatcgcagcccatattcggtgtcctacgaattctattccagcgtgctcgcctacagccagaagacattcccgaaggacgcgccgaacagttgggtcgatttttgggacgtgaagaaattccccggtcgccgcgcgctgcgcaatcatccgatcgcaaccctcgaagccgcgttgatggccgacggtgtcgcacccgacaagctctacccattggacgtcgaccgcgcgttcaagaagctggaggagatcaagccgcacatcacggtgtggtggacctcgggcgcgcagtcggcacagctgctcaatgacggcgaggtcgatatggagatggcctggaacggccgcgtcagcgccgtcgccaaggagggcgcgaaggtctccttcacctacaatcagggcatcttgcagagcacctcgctctgcatcctcaagggcgcacccaatctcggcacggcggtcaagttcatcaacgaggcggttgatcccgtgcaccaggccaacctgccgctccacatcgactacggcccgggcaatccgaaggcgttcgagacgggcgtgattaagcccgagcgcgccacgcaattgccgagcgagccggcgaatgcggccaagcaggcgctgatgtcctatgcctggtggtcctcgcccgccggcgaagccgccgagaagcgctgggcatcgttcatgcagaagtgagcaagcgaggcagcgttggcgacatccgtgtccgatccctcccaaaagcaccagcgccgtgagcacggcctgatgctggcgttggtgtcgccggcgctgctggtagtcctggctctgatcgtactgccggtcggctggctggcttggcagtcgatctaccatgacggcttcacgctggagaactatcgccgcgtcttcaccgaagacatctactggcgcagcttcgcgctgaccttccagatcagcctcgcggtcacactgatcgccctactgctcggctaccccttggcctatctcgccaattcgttgccgaaaggatggggcattttcatcctgtccctggtcatgctgccgttctggaccagcgtgctggtccgcgcctatgcctggctggtgctgcttcagcgcagtggcgtgatcaaccagttcctgcgccatctcgaattggtctccgagccgctcgcgctggtccacaacaccttcggcacggtggtcgccaccgtgcacatcctgttgcccttcatggttctgccgctctatgccaccatgcagaagatcccgaacgatctgatgcaggccggcgccagcctgggcgcgagcccgtcgctgacgttcctccgggtcttcttgccgctgtcgctgccgggcgtgctcgccggctgcaccatggtattcgtgctctgcctcggtttctacatcacgccggagttgctcggcggcggccgcaccgtgatggtgtcgatgctggtgagccgcaatgtcgagctctacaatcagttcggggccgcgagcgcggtcgcagtggtgctgctcctgagcgtgctcgtgatcttcttcgcggtcagccgcttcatctcgctcgatcgcgtgctgggacacaaatgatgcgcgcctcgtccgcccgaattgtcttgtacgtgatcagcgtgctggtgttagtctatctgattgttcccgtgctgatcatcgtgccgatctcgttctccagcgcgcgtttcctgacgttcccgccgccgtccttctcgctgcgctggtatgagcaatatttctcaagtcccgcctggatgcaggcgacgcgggtgacgctgacggtcgcattcctgaccgtcctgatcgcgacgccctgcggcgttgccgccgcctatgccgtcagccaatccaggctgcgtatcatgcgcgttatccatatggcgctgcttctgccactggtggtgccgatcatcatcaccgcggtcggcatcttcttcgtctatacccgggtcggcctggtcgcgaccctgcccggcctcgtgctggcgaatgtgatgctgggactgccttacgttgtcatctccgtgctcgcgggcctgcagagcttcgatccggcgcaggagatggtggcgcgcagcctcggcatgaaccgcctgcgcagcttcttcgcggtgacgctgccgcagatcaagtccagtgtcgtcgccggcggcatcttcgccttcatctcggcgatggacgagacgatcgtcgcgctgttcatctccggcggccagtaccagccgctgaccaagcgcatgttcaccgcgctgcgcgacgagatcgacccgaccatcgccgcgatctccaccttgatgacggccgcctcattcatgctggtgctgctggcgagcgcacgacagaagcggagtgggtgaggacagtccacgtctccaggcacctcgatctcggcacgggggctgaagttgaggagatcaaatcatccgatcgcgaaatcggcggccgtctcggcgtgaatggcggtggtgtcgaacgtctcgaccgaggtgtcgtccgggccgaccagcatggtgatctcggtgcagccgaggatgatgcactccgcgcccgcgccgacgagcgccgccatcacctcctgatagcggcggcgcgcgggcgccgtcacgttcccgaggcacagctcgtcgtagatgacgcggttcacttcggcgcgctcgtccgcgggaggaatcaggacgtcgagatcgtgcgcgcgcagccggtcgatgtagaagtcttcctccatcgtgaacttcgtgccgagcagcccgacccgccgatatcccctggcccggatccgctgcgccgtggcatcgccgatgtgaatgaacggaacggtcacgctggatatgatctccggcgccagtttatgcatcgtgttcgtgcacaacacgatcgcacgcgcgccggcgtcttcgaggcgtcgtgcgacctccgcaaggctggccgccgcctcctgccagcggccgccgtactgcatctgtttgatctcctcgaaatcgtaggaatacatcaagagtggagcggaatgcagctttcccatgcggtcgcgaacccgctcattgatgagcttgtagtagagcgcggtgctctcccagctcatgcccccgatcaggccgatggtttgcattcaggcgctcccaacgagtcaattccgacccgatcgtaatggaagaactgcaagctcgccatcgcgacgatcccaagtccttcatccactcgtgggtccccttcacaagcggcggtcgggcgggccggagtgcaaacggcagggaccggcatgacgcctgcgcaggctatgagaggtctttcgatcttgcgcactcttccggcctgtcctacccagttcccgaaagtgccttttgagggagccgacatgaccatccgcaacgcccgcaccgggggccagatcctgatcgatcagctcgtcgcccaaggcgtcgagcgagtcacctgtgtgccgggcgagagctatctggcggccctcgatgcgctgcacgacagcccgatcgacgtggtgatctgccgcgccgagggcggagcggcgatgatggcggaggcttatggcaagctcaccgggcggcccggcgtctgcttcgtcacccgcggccccggtgccaccaatgccagccatggcgtccacatcgcgatgcaggactcgacgccgatgatcctgttcgtcggtcaggtcgataccggcatgcgcgagcgcgaggcgttccaggagctcaactacaaggccgtgttcggcaccatggcgaaatgggcggtcgagatcgatcgccccgaccgcattccggagctggtggcgcgcgctttccgcgtcgccatgcagggccgccccggtcccgtcgtgattgcgctgccggagaacatgctgaccgagacggcggcggtggcggacgccatgagggtcgagcccgcaatgagctggccggcgcctgccgatatcgagaagctcagcaccatgctcgcgggcgccaaggccccgctggtcgttctcggcggctcgcgctggaccgacgaggcgaccaagggcatcgcgcggtttgccgagcgcttcgacctgccggtcgcgacctcgttccgccgggcctcgctgatcgacgccgaccattcgcactatgccggcgatctcggcatcggaccgagcccgggcctcaaggcgcgcatcgagggcgccgacgtcatccttctcatcggcggccgcatgtcggagatgccgtcctcgtcttacacgctgctcgacattccgacgccgcgccaaaagctgatccatgtgcatccgggctccgaggagctcggccgcgtctatcagcccgcgcttgcgatccaggcgacgccggccgccttcgcggccgccgtcgagacgctgaagccttcgggcgcggtggcgtggaagggcgaggccgccaaggcgcacgccgattatctcgcctggaccgagaaggcgcgcgagctgccgggcacgttccagtacggccaggtgatgacctggttgcgcgaccgcctgccgaaggatgcgatcgtctgcaacggcgccggcaattatgcaggctggattcatcgccaccatcgcttccacagctttgccgcgcagctggcgccaacctcgggctcgatgggctatggcgtgccggcgggtgtgctggcaaaacggcaatatccggaccgcgtcgtcgtcgcctttgcgggcgatggctgcttcctgatgaacggccaggaattcgcgacggccgtgcaatatgacgcgccgctgatcgtcgtcatcatcgacaattcgcaatacggcaccatccgcatgcatcaggagcgcgactatcccggccgcgtggtcgggacccagctcaagaacccggactttgcgatgtatgcgaaagcgttcggcggtcatggcgagcgcgtcgagcgcacggaagaattcgcgccggccttcgagcgtgcgcttgcctcgggcaagccgtcgatcctccattgcatcatcgacccgcgcgcgatctcggtcggcaaggatttcacgcctgcggtgaaggcttaaagccatgccggccggccgccacgtcgccatcatcggagccggtgcgatcggcgtgatcagcgcgatcgaggccctgagggaggggcatcgcgtcacgctgatcgatccgggcgagcccggcggcgagcaggcggcgagctacggcaatgccggctggctgtcgtcgcattcggtcataccgccggccgagccgggcatctggaagaaggtgccgggatatctgatggatccgctcgggccgctcgcgatccgctggtcctacttgccgaaggcgttgccctggctggtcaagtatctgctgtccggctggaccgagtcacgtgtggagaagacggccttcgcgttgcgtgacctcctgaaggacgcgccgctgctgcaccggaagctcgcggaagaggccggcgtgcctgaattgatcgagcgcaacggcgtgatgcatgtgttcacctcgcgcgggaacttcgataacgatctcggctggcggctgcgcaagaaggtcggcgtcgaatggctcgagctcagcgccgacgagatgcggcagcgtgagccggatctgcatccgcgctacacgtttggcgtggtggtggaggaggccgggcgctgccgcgatcccggagcctatgttgccgcgctcgccaatcacgcgctcgccagcggcgcggtgcacgtgcgggacaaggcgaccgggctaagactctccgggaacaagctcgtcgccgtcgtcaccgagaacggcgaaatcccttgcgatgctgcggtggtcgccgccggcgcacggtcgaagcagctcaccgcctcgatcggcgatccgctgccgctggaaaccgaacgcggctatcacgtcatgatcgagaatccggaatccggcccgcgcagttcgatgatggcatccgacgccaagatggtggtgaactggaccaacaagggcctgcgtgccgccggcaccgtcgagatcgccggcctcgaagccgcgccgaactggaagcgtgccgagatcctgcgcaaccacctgctcggcatgttcccgaaactgccgaaagacattccggcctcgcgcatcaagacctggttcggccatcgcccgagcatgccggacggacgtccctgcatcggttatgcgcgggcctcccgcgacgtcgtctatgctttcggccacggccatgtcggcctggtcggctcggcccgcaccgggcgtctggtcgcccagctcgtgagcggcaaggcgccggagattccgctcggccccttcgcccccgagcgattcctctgagaggccagccatgagcaccgcagccaatccgtcttcccgcatcgcccgtggcggcaagtccatctacggcgcgccgctcggcattctgatgctggaggcgcgctttccccgcattcccggcgacatgggcaacggcacgacctggccgtttcctgtgctgtatcgcgtggtgagcggggcctcgccggagaaggtcgtgctgaagggcgcagccggcctgctgcccgacttcatcgacgcggccaaggatctggtgcggctcggggccgaagccatcaccaccaattgcggcttcctctcgctgtttcagaaggagatcgcggcggccgtcggcgttcccgtcgcgacctcgtcgctgatgcaggtgccgtgggtgcaggcgaccttgccgccgggcaaacgcgtcggtctcgtcacggtgtctggctcgacgctctcgcccgcacatctcgaaggcgccggcgtgccgctcgacacaccgctggttggcacggagaagggcaaggagtttttccgcgtcctgatcaaggccgagaaggacgacatggacgtggcgcaagccgagcgcgacgtggtcgaggccggcaaggagctcgtcgcaaggaatccggatgtcggcgccatcgtgctcgagtgcaccaacatgccgccttatgccgccgcgcttcaggccgaggtcggattgcccgtctacgacatctattccatgatcatctggtttcacgccggactgcgcccacgaatctttgcgtgaatccgtcccctgagatcgtcacaagtcctggagcgagcccatgaaactatccggcaaggtcgcggctatcaccggcgcggcgcgcggcatcggcaaggcctgcgcgatgaggtttttggaggacggcgtcaaggtcgtgatctcggatatcgatgccgagggcctcgctgcgacggccaccgaactcggacgaccggatgccttgcgcaccgtcgtcggcaatgtcgccaagcgcgctgatgtggaccagctggtcgcgactgcggtgaaggagttcggtcggctcgacatcatggtcaacaatgccggcgtcgcccgcaaccagggcattctcgacatcaccgagcaggatttcgacgagatcatcggcatcaatctgaaaggtgcgttcttcggcgtgcaggcggccgccaggcagatgattgcgcagggtggcggtggggtcatcatcaacatgtcctctgtgaacgcgctgctggcgatcccggcgctggcgacctatgcgatgtcgaagggaggcatgaagcagctgacctcggtcgccgccgttgcgctggccccgcacaacattcgtgtggtggcggtcggccccggtacgatcctgaccgacatggtggcctcgtcaatctacacctcggaggaggcgcgcaagaccgtgatgtcacgcacgccggccggccgcggcggcgagccgagcgaggtggcttcggtcgtggcgttcctggccagtgacgatgcgtcgtatatcaccggacagacgatctatccggatggcggcagattgatcctgaactacacggtgccggtgaaggacaagtagggcgttgtcgccccactctcggtgtcatcgcccggcttgaccgggcgatccggtactccgaggcggtcgtggttgaaacgatgggccgcggcgtactggattccccgctttcgcggggaatgacagtcgtcgtgaggcgggcagtttgcccctcactccgccgcaaccgtcatcccatggccgagccgcttcgagatgccgccggcacagtcgcgcaaggcgagcgcgatcgggctgtcccagcgggcatcgaaggtgccttccggtcccatcgcggtgatgaccaatgcgacatggccggaatgatcgaacaccggcgccgagaatgcgttgacgccgggcaggggatcgccgagcgcgcgggcgaggccgtgcttgcggacctccgcgagcatctcggtgagcttggcgcccttcacggcgcgcttcggattgtagccgacgccatggcggtcgagcccgctttcgagcgcggcgctgatcgtcttctccggcaggaacgccgcaaaggcgcggcccgtcgcggtctccagcagtgccatcaccgagccgacgcgcatcacgatgtgcaccggttgggccggctcttcgagctgcaccacggtcggaccgtgcgtgccccagaccgcgagcgagaccgcgtgaccgatctggctggccaggcccgcgatcttgggacgcgcgatgcgcacgccggagaggcggcgcaggctgatgaggccgagctccagcgccagcgcgccgatctcgtagcggccggtggtctcgtcctgctcgatcaggccgatccgggagaagctggcgagatagggatgcgccttggccggcgtcatgccggcctcgcgggcgagatcgcgcagcatcatcggctcgccgctccttgcgagggcgcgaagcaattctccgccgacctcgatcgactggatgccgcggctttccctcttcatgcgcctcctggcgtggcttacgccgcgttgcgcttggcagcgctgtcggcaagatgtctgccggcaatgtagccgaacgtcagcgccggcccaagcgtgatgccggcgcccggataattgccgcccatgatgctcgccatgtcgttgcctgcggcatagaggccgggaatcacgcggccctcggcatcgagcgcccgcgcgttctcgtcggtgacgatgccggcataggtgccgagatcgccgatcaccatcttgatggcgtaaaacggtccgttctcgatcggcgcgacgcagggattcggcccgtgcagcgcatcgccctggtagcggttataggccttcgagcccttgccgaaggcggcatcgtgtccgagcggggcggcggcattgaattgcctgacggtctcggtgaaggccttggcatcgatgccggccttcgccgccagcgcctcgagcgtatcgccgcgcatgagatagcccgtcttcaggtgatggcccagcggcatcgggaaaggcggcacgcagccgaggccgtatttgcgcagcgtcttgtgatcgcagaccaggtaggccgcgatctcctcgccgggctttgccgccttgatcatggcctggacgaagtcgtgataggaattgccctcattggcaaagcgccggccgtcgcgcatcaccgcgatcacgccgggcttggcgcgatcgatgaaatgcggcatcacgcctttcgatccgtccttgcgcgtggtcagcgacaccgggacccacgctgcagcgttgggcaggcgatcctcgatgcgaccgccggcgcgctcggccagacgcagtccgtcgccggtattgccggtcggtcccggggaatagtgctcattgccggtgggcgcatgcggaaacatcttcttgcgccgctcgacatcatgcggaaagccgccgcaggcgagcacgacgccctggcgcgcgcggacgcgcacgtcgcgtccctcacgtgaaacgatcgcgccggtcaccgcgccgttctcgaccgtcagctcgtgcaccggcgcggacagccacatcgggatcttgaggtcgagcgcggatttcgccagccgtccggcgagcgcgttgccgttggtcagcgtcatgccgcggccgtagcgcagcacgtccatgagatgccgcgacaggcgcttggcgacataagcggccgaggtcagcgacttcgtcacccgcatgaagtggatgatctccttgccggagcccagcatcatgccgaacacggtgagctcgggcagcggcatgccgagcgtcttgacgaggtcgccgagctcgcgaccgtcaaacgggcgcgtcaccatggagcggccgccctgcgcgccgccgggtgcctcggcgtgataatccggaaacaccagcggcatgtcgaagcgcagcgcggtcttggtggtgaagaaatccaccgcctcggggccggcgctcaggaaggcatcgacgcgtgcggcgtcataattgttgccggcctcgtgccgcagataagtgcgggcctgctccggcgtttcctcgatgccgtacgccttcgccagcgaggtaccgggaatccagagccaaccaccggagcgggcggtggtgccgccgaagcgcggctccttctccacgatcaagacgccgagcccacgatggcgcgcggtgatcgcggccgacatgccggagcaacccgatccggcaacgagcacatcgcactcgtaagtttcagcgccgctatgctcgttgccggtcatgtctcacctcatttcttcaggagcgggcatttggattcggagaccgggcggaaggcgtcctcgcccttcacggtcttgacgatctccagatagtcccacggctccttggactgctcgggcttcttcaccttggcgagatacatgtcgcggatgacgcggccgtcctcgcgcagtttgccgccatggacgaagannnnnnnnnnaaaacccttccccatgaatgcctggtacgccgccgcctgggacgccgaagtgaaggcggcgctgctgccgcggacgatctgcggcaagcacgtcgtgatgtaccggaaggccggcggctcggtggccgctctggaggacgcctgctggcatcgcctggtgccgctgtccaagggccggctcgaaggcgacaccgtcgtctgcggctatcacggcctgaagttcaacgcgcaggggcgctgcaccttcatgccctcgcaggagaccatcaatccgtcagcctgcgtgcgcgcctatccggtggtcgaacgccaccgctacatctggctctggatgggggatcccgcgctggccgatcccgcgctggtgccggacatgcactggaatcacgatcccgcctgggcgggcgacggcaagaccatccacgtcaaatgcgattaccgcctcgtgctcgacaatctcatggacctcacccacgagaccttcgtgcacggctcttccatcggcaatgatgcggtggccgaggccccgttcgacgtcacccatggcgagaagacggtgacggtgacgcgctggatgcggaacatcgagccgccgccgttctgggccaagcagctcggcaagccggggctcgtcgaccgttggcagatcatccgcttcgaggctccgtgcacgatcgccatcgacgtcggtgtggccccggccggcagcggcgcgccggaaggcgaccgctcgcacggcgtcaacggcttcgtgctcaataccatcacgcccgagaccgagaagacctgccactatttctgggccttcgtccgcaactaccgtatcggcgagcagcgcatcaccaccgagatccgcgagggcgtctccggcatcttccgtgaggacgagctgattctggaagcacagcagcgcgcgatggacgagaatccggatcgcatcttctacaatctcaacgtcgatgccggcgcgatgtgggcgcgcaagctgatcgatcggatggtggcgaaggaaagcgccccaaagcaccttcaggccgcggagtagagcatggccgaacgtgaggtcgaccgctccgtctcgcagaccgtgaaggcgcagcttgcgttgcgcgaccagatcctgtccggcgctttgcgtccgggcgagcgcatctccgagctgcaggcggtggagacgacaggcgcttcgcgcacgcccgtgcgcatggcgttggtgcggctggaggaagagggcctcctggaggcgatcccctccggcggcttcatggtcaaggcgttctccgagcgcgacatttccgattccatcgagctccgcggcacgctcgaaggcctggctgcgcgcttcgccgccgagcgcggcgtctccgcgcgcgagctcgagccgctgaaggaatgcctggccgcgattgacgaattgctgcggcaggtgccgatctcggtcgatgcgttctcggcctacgtcacgctgaacgcacgcttccacgccttgctcacggagctgtcgcgcagcccgccgctgatccggcagatcgaccgcgcctcggcgctgccgtttgcatccccgagcggcttcgtcatggcgcagtcggcgctgccggaggcgcagcagatcctgatcatcggtcaggagcaccatcgcgtcgtgatcgacgccatcgagaaccgcgaaggcgcgcgggccgaggcgatcatgcgcgaacatgcgcggcttgccgtgcgaaacctgcggctggcgctgcgcaaccggacccatctcgacctcttgccggcgctcgcgctgatcaagaccgcaaccgattgaggggagtcccatgcgcttcatcgaaagctggatcccggcaacgctggtctcgacccgcgatctcgcccccggcatccgcgaattcctgatccggccggatcggttcgatggtgccgcctatccggtcggcagccacatcaatgtcagcgtcaccatcgacggcctgcccgagacgcggtcctattcgctggtcggcgaagcctcgcccgccggcttcaaggtcgcggtgcgccgtgccgaggattcccgcggcggctcgcgctacatgtggtcattgcagccgggcgcgcggctcgacatcacccagcccgcttcgctgctcgcggtcgattgggctcgccccaattattgcctgatcgccggtggcatcggcatcacgcccatcctcggtgccgcgcaggcgctggcccgccgcggtgcggagctcacgctgcactacgccgtgcgctcgcgcggcgaggcggcttatctcggcgacctcgccgggatgctcggagatcgcctcgtggtccatgccggtgacgaaggaaagcggctcgatctcgatgcattgttcgcctcagtgccgcagggaacgctggccctgttctgcggcccgatgcggatgctcgacgccgcgcgccacgcctggatcggcgccggccatccgctgccagatctccgctacgagactttcggctccagcggcaccctgccgaccgaggctttccgcgtccggcttaaggattccgatgtcgagctccagattccgcgcgagcgctcgatgctcgacgtgctcaatgccagcggtcatgacgtgatgttcgactgcaggcgcggcgaatgcggcctctgtgccatcgacgtggtcgcggtcgacggcgagatcgaccatcgcgacgtcttcttcagcgatcaccagaagcagagcaaccagaagatctgcgcctgcgtctcccgcgcgcggggcaccatcgtcgtggacacgctgctgcgggcggacgcgatctaagcgagctccaaaaccctttgggagcaacggacggtgccgcaggctccgccttcccggcttgcgggagagggagttcaccgccaacgcggcggcgatttcggccccgatcacttacgccgcgtaagtcatccggaccctcttcgtctccagcagcgccatgacgccatcagccgccacgggccggctgatcagatagccctgcacctcgtcgcaaccgatctggcgcagatattcgagctggtcggcagtttcgacgccctcggcgaccacgccgatgtcgaggtcgcgcgccagcgaaaccaccgacttcacgattgcggcgcagtccggctgggccagcatgtcgcggatgaaggactggtcgattttgatgcggctgaacggcagcttgcgcaggtaggtcagcgacgagaagccggtgccgaaatcgtccagcgccacggttatgccgagctccagcagcgcattcaggaccgatgcggccgagccgtatttggacagcagcatcgattccgtgatctcgatctcgagccggtgcggggcgatcctggcgtcggcaatcgcccgcacgatggtctgcaggatggctgtgttgtgaaactgcgccgcggagaagttcacggcgactctgatctcttccggccatagcgccaccgtggcgcaggcgcggcggatgacccattcgccgatctcgtggatcagtccggtctcctctgcgatcgggatgaattcgttgggcggtaccaacccgcgcgagggatgctgccagcgcagcaacgcctcgaagccggtgatgcgatggtcgtcgagatccaggaacggctggaacaccaggaatagctcgtttcgcgcgatcgcccctgcgagatccgattgcagcgccttgcggtcgcgtgatgccctgtcgtcgacctcctcgaagaaacagatcgtgccgggtcccgccttcttggcgcggtagagcgcggcatcggcattcttcatgaggtcgagcggcgtgtcgccgtctcgcggcgccagcacgatgccgacgctggtcgctcccacgatctggcgcccgtcgatccgcaaaggttcgtcgaaagccgcgaccaggcgttcggcgatttcgagcgcatcctccggccgcgtcaggttggccatgacgagcgcgaactcgtcgccgccgatgcgcgcgacgtgctcggccgcacgtgtgcagcgttgcaggcggcctgcgacctgaaccaggaattcgtccccggcgggatggccgaactggtcgttgacctccttgaagcgatcgaggtcgagcagcagcaccgcgaactcctcacctgataacgccagtcgcttcagcgccgcatcgagcgtctcgttgaaggccacgcggttgggcaaatgggtgagaggatcctgccgcaccgtgcgctcagcctctacctgccgcgtcacgcgccgcgcgaacgagaaagagttgacgaacacgccgcgcagcagcacgctaccgtaggccacgacgaggaaggcgatcagcaggaaggcgaggtcgccgttcctgcccaggcagatagcgatgccgaggaagatcggagccgtgaaggcaatggccgcgatcgggatcgtggcgaacgcgagcgcgccgccggccagcatgcccgagcacaggcaggtgatgacgagttggccgccggtcgaggcatcggcgaagaaggcgaccgggacgatgccccaggcagcgccgagaatgaaggcattgcggaccaggcggtgcatggcgcgccgcgagacgaattgcggtttggtgatgcggcgcaccgcacgcgagtgcaggccgaacgcgatcgcggcgccggcgacggcgcctgcccagatcagcgcagcgatcctgtccggagacggccacagcgcgatggcgagcacgatggcgttgcaggcattggcgagcatgatgccgactgaatagcccagcaccagcgacatctgctcggcacggagatgcccggccatggcctcgtcggttgcgggaccgccaaaggccgacagatcgccggcgaacagccgcgcgacatagttggtcgtttgagtccgcattcccaagcctggcagcacgagccgcttgtccggctctctatcgtgagaattcgctgcaaacctttgacgaactatgaattatccccgtttgccacgttcgccgcgaccacttctgcgtgttcgtcacgcggtatcgataacaaatcgatacgatgcggcgctatgcgtcacacctctgacacatggcgtgctcggcggcggcaaggaagctgtccgcctcttcgcatcgagcctgagcggcttcgtgtgcgggaagagttgctcctcgatttgctttttgccgcccttggccggaccgagacgtcccctcgaacgcgtgatacgtttcgtggaccgaccgggctggcgtgcgccgcgtcggcactggatgcgttcgaatcccgagggcctgtccatgagcgagccttcagccgatgtttcggcgacggtcgaatacacgatggacaaatggcggatggaccgggtcccctgggccatgtgggcttgcgtcgccggccttgcgatcgcgcttcacgccgagagtcgcggccagaatggagcggctctggccgccatctatctggcgctcctgggacttgcgttcgcaggctatgcactgacgaccctgatcggaaggtccggactgccattgcttcttgaattgttgatcggcgcccttgtcctggttgtcatctccggcgtcatcggtgtgatcagcctgatggccggcgggtcgagcggcagctccagctacgttggcgccatgcgcagtctctattggagccatctggtgaacccatcgctgaatgttttcggctggatgttgctctacgtgggatggggctggatcgcattctcctcttatcggcacttctatgcggatcgggcagtcgtctccttgtcttccgcgggcatccggtttcatagaccctggctcaaggggcttttcattccctggcacgacgtgcggggggtgggctaccttgagattccgtccgtctcagggccgcccttcgccaatccgcattctgcggccgtcacggtcggtctggacttctatcagcggcacgtcgcaccgaagcgcagctttttcgcgccgcccggggccgaggcgatgttctggccaaagggcgagatgatgcaggtggtgctgaacagcgccgacatgacggtcaagcccgagaattttctcgtgcctgccgaggcgcgctggaaggcgttccgagatcaacccgggccgtcaccccaacatggtggcaccatcgtctacggacgctggtcgatcgacggctctcggtggcaggccattcagtttctggcgccggtcgtcgccgtggccgtggtcatgctataccgataagggcaatctgctcagcgtccgagttgcttcggatcgtagaagaagcgctcctcgatgatctgatcgccgcgccaggtctgccacgcgatctcctccagcgtccgcgtcacgccctcggtgttggtgaagctgaagcaccagcgggtcgcgacatgatcgccttcgatgaggctgggcccgatgcgaaccgccctgacttccttcgaggccgccagcacaccgcgctccttggcgacgagcttgtcgcggccaaccgttggagcagcgttgttctcgaaagtcacggcgtcgagcgtgcagaactgttcgatcgcgccaatgaaatcaccggcctccaggcgtttcgcgaaagcttcaacgatatcccgacttggcacggcacaccccgcaagataaccgacttatggtcggtaaataccgaccggcggtcgaaaagtcaactggccgcctgccgcgaattcggttagacgggattcatggcgaaacaggcggagcggcgcgccgcaacaatcgaagcgatcctggcggcggcgcgccgcctgttcgggacgcaaggcttcgccgccacgacgatggatgagatcgcgggcgccgcgggcatcgccaagggcgcggtctatcatcacttcaagaccaaggaagcggtgttcgaagccgttttcgaccaggtctcacgcgatctcgtgattgagatcgacggcgccgcgcgggccgagaaggacgtgctcgccgcaatggttgccggcacccagcattactttgccgcgaccgcaaaggggccgaccggccggatcattttgcgcgacggcccggccgtgctcggttgggagcgctggcgcgagatcgacgccaagcatttcggcggcaagctgccgcgcgcactttccatcgccatggaatccggcctggtcgccaagcagccggtcgagccgctggcgcgactgctgctcggcgcggtcacggaagccgcggtcgcctgcgctggacgcgctgacatcgcaagggcaggcacggaatacgcccgtgcgttcaagtcgctggtcgaggcgctgcgcgtcaccgcatgattgtgctaatcacgttgccggaaacgcccacacaacgagaagaacagtagcgcatgaacgcaaattcctcgctcgcaccgtcagatcccgaattcgactacatcatcgtcggtgccggctccgccggctgcgtgctcgccaaccgactgtcggcgaacggcaagcacagcgtgttgctgctcgaggcgggcccgaaggattcgaacatctggattcacgtcccgctcggctacggcaagctcttcaaggagaagaccgtcaactggatgtaccagaccgagcccgagcccgagctgaagggccggcaggtcttccagccgcgcggcaagacgctgggcggatcgagctcgatcaacgggctgctctatgtccgcggccagcacgaggactacgaccgctggcgccagctcggcaataccggctggggctatgacgacgtgctgccctatttcaagaaagccgagaaccagtcgcgcggtgcggatcaatatcatggcacgggcggtcccctgccggtgtccaacatgatcgtgaccgatccgttgtcgaaagccttcatcgatgcagcggtcgagaccggtctgccctacaaccctgacttcaacggtgcgacgcaggaaggcgtcggtctgttccagaccacgacgcgcaatggacggcgtgcgtcgacggcggtcgcctatctcggacccgcgaagtcacgcagcaatctcaagatcgaaacctcggcacacgcccagcgtctgttgttcgaagggcgccgcgccgtcggcgtcgaatttcggcaaggcgcagcattgcgccgcgcccgcgcacgcaaggaagtcgtgctttccagcggggcctacaactcgccgcaattgcttcagctttccggcgtcggccccggcgacctcctgcgcaagcacggcatcgatgtggtgctggacgcgccgggcgttggtaacgacctgcaggatcacatgcaggttcgcatcgtgatgcgctgctcgcagaagatcaccctcaacgacacggtcaatcatccgcttcgccgcaccatggccggggcgcgctatgcactgtttcggaagggctggctgacgatcgcggccggcaccgccggcgcattcttcaagaccagctcacggctggcttcgcccgacatccaggtgcacttccttccgttctcgaccgacaagatgggcgagaagctgcacgatttctccggcttcacggcttcggtctgccagctccggcccgaaagtcgcggttccctccgcatcaagagtgccgaccccgccgtgcccccggagatccgcatcaactacatgtcgaccgagaccgatcgcaccacaaacgtcgagggcatcaagatcttgcgcaagatcctgaacgcgccggcgctgaaaccgttcgtggtcagcgagtacgaccccggcgagaaggtatccacagatgccgagatattggattattgtcgcgagcgcggcagcaccatctaccatccgacctcgacctgtcgtatgggcaatgacgcgctcgcggtggtcgatcagcggctgaaggtgagggggctcgacggtcttcgtgtcgtcgatggctcgatcatgccggacctcgtgtcggggaacaccaatgcgccgatcatcatgatcgccgagaaggcctccgacatgatattggaggatgcgggctgaattcgccctgaaaggacattcgacttgcctactcgatttcggatcggcacccgcaagagcgcgatggcgctggcacagacggaagaaatcgcacgccgcctgaccgccgcggtgcccggtctcgacgtcgagatcgtcaagttcgacaccacgggcgatctcgaccagaccagcaagctgttgtcgcatggcggcaagggcggggccttcgtggcgcagatccgcgcggccgtggtttcaggcgagctgcaggcagccatgcattcgctcaaggacatgccgggtaacgaggatacgccgggcctcgtcatcggcgccaccttgtcgcgcgatccgccgagcgacgcgctggtgctgcgcgagggcgtgacgctggaggcgctgcgccagtcccgcggcaagggcctcaagatcggcaccaacgcggtgcgccgggcggcctatgcgcggcggttgtttcccgaggtcgagatcatccacttccgcggcgccgccgatacgcgcgtgcgcaagctcgacaatggcgagaagcagcggctgccggacggcggcgcggtgggaccggcggatgcgctgatcatggcgcgttcgggcctcgatcgcgtcggtctggcgaaccgcatagcctacgaattcaccgcgacggagatgctgccggcggcagggcagggcatcgtcgcggtcgaatgcgcggcgcaggactggcagacgcgaaagatcctgtcagcgatcgacgatcccgccgcgcacgcctcggccgacgctgagcgcgaggtgctgtgggtgctgaacggccactgcaattcgccggtggccggcttctcgaccatctcaggtgatcacatgtcgctcaccgcgtccgtgctcgacctctccggcaacacgatcatcgaagtctcgcgtgccggccctgccaatcgtccgcgcgagctcggccgtgcggtgggattggacctgctggcgaagggggcggcggagattatcgagcgcagcaggcctcgctgaggctcgcgaaaccacgatcggcgatcatgccgttctgcgcctgttttgcccgacgtgtcaaacgcgcggggtgagccatgccagcccaaggctttcaatggcttgtctactgtgcatggggttgttttcggttttctgttgccgtgcccgaacgggccaaatcaatcagccccgcacgcgcttgatcatctgctcgacatgggcgatcggcgtctccggctggatgccgtggccaagattgaagatcagccgcccttgcgcgaaatttgccagcacatcgtcgacggcgcgatcgagcgcggtaccgcctgcaatcagcaccagcggatcgagattgccctgcacggcgaccttgctttgcacatgatcgcggatgaagcccggctccgcggtccagtcgatgctgacggcgctgacgcgggttgcctcgacataggctggtagctgcgcggcggcaccgcgcgggaagccgatgatcttcgcatccggtaccttcgcgcgtacgccctcgacgatgcgccgcgtcggctcgaccgaccagcgcgcgaattcggctggaggcaatacgccggcccaggtgtcgaagatctgcaaggcgtcggctccggccgcgagctgcgccagcagatattcgatcgagttgtcgaccagcacgtcgatgatcgccgagaaagcttcaggatggcgataggccatcatccgggccggcgcctggtccggggtgccgtggcccgcgaccatgtaggtcgccaccgtccagggcgcgccgcagaaaccgatcagcgcgacgtcgggatcgagcgcgccgcgcacgatcttgagcgcctcgaagaccggcgcgagcttgctgaaatccgcgcgcgaggccagcgtggcgaccttggcaggatcgtcgagcggctcgagccgcgggccctcgcccacctcgaaccgcaccgagcggccgagcgcatgggggatcaccaggatgtcggagaagatgatcgccgcattgaagccgaacctgcggatcggttgcagcgtcacctcggctgccagctccgggttgaagcagagatcgaggaagccgcctgccttggcgcgcacctcgcgatattccggaaggtagcgcccggcctggcgcatcatccacacgggcgggacggcttgtcggtggccggagagcacgtcgatgaagggcttgatcgcagattggggcacgaatggtcctgcagaggttatggctcctgatacaccggcccggccgccagcggaacaggggaaccagcgcaacttcgctgcgttgaacagccaatggaggagatcatggctgagacattcaatcccgcgccgcacgacaagctcgccgacgacccgcacgaggcgctcgccgctgatcggcaatccaagctcgacgccgggctgaaggatacgttcccggcttcggatcccgtcagcgccgcgcagccgacgccctcgaaggcagatgcagatgccgaccagccctcgctctgggacaaagttaaggcgatcttcagctagggagaggtaggcgcgccggattccgataggcctgctagcatcttgttagcgatgagtgaatccggtcccccgtaggactactggaaaggcggagcagcgccgccgcgagccgcggtgctttcagatttcaataacagaacaggcagaggttccgatgatcggagatctctgccgcatgaccgccgtcaccacacgacccggatggagccgcttggcgctgcgcgcggccgcgttcgtcgtgctcacctgcgccgccatcttgggcgtgagcggctggcgtgaatggagcgcccgcgacactgtgctcaggagcgccgagacggagttggcgaacgtcgcgcgttcactgacccagcatgccgaggatagcctcgatctcctggattccggcgtcgtcggcgcggtcagccggctggagatcgatggcactgggcccatcacgatcgcgaagctcggcactgtcctggaagcgcgcagaaaggcgattccgcgtgtccacagcctcgccgtcatcgatgatcagggcaactggctgacctcgcccggcacgatcggcgcgacgctcagcgacgatgcattcttccgtcagcatcagctttccccgaaacgagagccctatgtcggccgccccgtgaagagcctgctcgatggcgaatgggtggtcactctgtcgcgtcgcttcaacaagcaggacggcagcttcggcggcgtggtgctcgcgaccatcagctccagatatctctcgcagttctacgagcagttcgagatcggccgcaacagctcgattgcgctgacacatggcgacggcgtgatcatcgcgcgcgatcccagcaacgaaaaatttgtgggacgcagcgttgcagacaccgcgctgttccgcgacgccagcctgcagcggccaagcggcgcctatcatttcgaatcgccgctggatggcgctcagcgtgtcagctttttctggcgcagcagccgttatccagtcgtcctgctggccacgctggacaaggaggagctgctcgcgccttggcgagccgacgcaatctcccgcatgctctatgcgctcgctctggtgatgctgatcgcagtcatcggcggcgtgctggtgtggcagttgcatcggggccagcgcatggccgccgccctgggcgagaaggaagcgcacttccgcctgctcgccgaaggctccagcgacatggtgacacgcatcggcctcgatgagcggctgcgctatgtctcgccctcgtcggtgcgcgtcgtcgggtggcgccccgatcagctgatcggcaccccggctcttgcgggtatcaacccagacgatctgccggaggtccaggcgatcgtcggcgcgttgaagcgtgacgagagggaggaggcgcgtctcacctatcgcaacgcgcaccggcagaacggcgaagtgtggctcgaatcgaccatgcgcgtgacgcgaaagagcaacggcaacgtcgatggcgtggtcgcgatctcgcgcgacatcaccgaacagaaaaagctggagaccaagctggagacgctcgcgatcgaggatagcctcaccggcctggccaaccgccgccgcttcgacgagcggctgcaggaggagtgggcgcgcgcctatcgcgaccgctccagcctcgccttgctgatgatcgacgtcgaccacttcaaagcctacaacgacgaatacggccatcccgccggcgacgcctgcctgcgcctggtcgcaaggatcatcgcggccgagacgcagcgcgccggtgatctggctgcccgctatggcggcgaggaattcgccatgctgctgccgaacaccgatgccgccggctgcgccagggtcggcgagcggatccgaagcgccattcacggcgccggccttgttcacagcaccaatccggcggccggatgcgtcaccgcctccgtcggcggtgcggcgtgccggccggtgctggagcgcacggcgggcgtgggctcgctgcttgaagctgcagaccgggcgctctacgccgccaaggacgcgggccgcaaccgcctggtgatgtccgacgaggtcacgaccctgctgccgaaggtatcgggccaataaggccgatcagtaatgcggaggaggctcgttggcaggcccgggcgcatttgcctccgcctcctggagccgctcgttgaactgcgcgacctgccgcgtcagcgtatcgatctgcttccattgcgccgtgatggtctggttcaacgtctcgatcgtgtcgtcctggtaggcgaggcgcgtctccagcgcgtcgatgcgctcgctcagcgtcttgatctcattcgtcacggccgggccccatgtcttgctcgcacaagtcccgtcctcgtgagccaagttctcgcaaaccgtggccgagcgccacgcgctcgtcgaacacgaaacattcgccgcgccagcggctctgcgcctccggcacctcttccagatacttcaggatgccgcccttgaggtggtagacctcggcaaagccgcgcgcgagcaggtgtgcgcttgccttctcgcagcgaatgccgccggtgcagaacatagcgatcctgcgatgcttggccggatcgagcctggctgcggcgaagtccttgaactcgccaaagctcttgatgccggggtcgaccgcgccctcgaacgtccccatcgccacctcaaaggcgttgcgggtgtcgagcagcagtgtgtcgggcgccgcgatcagagtgttccactcggcagcatcgacataggtgccgacctggcgggtcggatcggccgtctcgtcgcccagcgtgacgatctccttcttcagccgcaccttgagccggccgaacggcatccccgcggcggtcgagaacttcaattcgagattgtcgagccggcctccgaataggctgccgtgtgcgagctcatgtgcgagcgtgtcgatcgcctccgaaagcccagcgaccgtgccgttgatgccttcctgcgccagcagcacgctgcctttcagcccgaggccggcgcagaaggcgcgcagcggctcccgcagctcgcggtagtccgggagggcggcgaactggtagaaggccgcgaccttgatggtcgaactggggtcagacatggcggcccgtttagcaggcgacagccgtccggaaaacccgcatgaccgccgtcttgaaaggtccatacgttcagcggatggcagccattttcgtggcatgccagcattgccccgccgggccggaatgtgtcatgtagatgcggtttttcgagaggcgcgccaccggcgccgacggccaagagagcaagacattcgatgagaaacttccattttcccggcaggtccacggtccatgccaccaatgcgatggtggcgacctcgcacccgcaagcctcgcttgccgccatcgaggtgctgcgcgagggcggcaccgcggtggacgcggcggttgccggctcggccctgcttggcgtgatcgagccgcaatcgaccggcatcggcggcgattgttttgcgctggtccagccgcgcggcgagggcaagatcatcgcctataacggatccggccgcgcgccgaaggcggcgaatgccgactggtatctcgagcgcaagatcaattccgtgccgctcacctcggcgcatgccgtctcgatccccggcgtggtcgatgccttcgccaccgtcttgcgcgatcacggcaagttcggcttcgatcgcctgctccagcccgcgatcaaagcggcggaggagggctatgtcgtcgccccgcgcatcgccttcgactggaagaaccagttcgagaaactgaaggccggcaccaataccgtgcgttacctgctgccgggcggcaagccgccggtcgccggcgatgtcatccgccaggctgagctcggcaagaccctgcgggccatcgccaaggacggccgcgacgccttctacaagggcgccatcgcggaggacatggtcgagaccctgcgcggcatcggcggcctgcacacgctcgacgatttcgccgcgcatacgaccgagacgacgacgccgatcggcaccatgtacaagggctatgatgtctggcagtgcccgccgaacggaccgggcctcaccatgctgctgatgctcaacatcctgtcgcggttcgacctgaccaaatacgccccgctcagcgtcgagcgcttccatctcgaggccgaggctgcgcgcatcgcctacatgcatcgcgagttgcacgtcgccgatcccgagcacatgcagatcgaggtcgccaagattttggccaaggaattctgcgacgagcacatcgccaagatccggatggacggcatgctcgacctgccgaatgtcgcgccgccgatgaatccttcgaccatctacatcacggtcgtggacaaggatcgcaacgtctgctcgttcatcaactcgatcgcgcactccttcggctcggccatcgtctccaacaagaccggtgtcttgttccagaaccgcgccggcggcttccgcattcagcccggccatcccaactgcatcgccggcggcaagcgcccgctgcatacgatcatgccgagcctgctcacccagggcggccgctccgtgatgccgttcgcggtgatgggcgggcagtaccagccggtcggccagacccgcgtgatcaccaatatcctagattatggctgcgacgtgcaggaggcgatcgacatgccgcgcggcctgcactacgagggccagtatcaactcgaggacagcgtgccggcggcaatcgtcgatggtctgaagaagctcggccacaagaccaccagtgtggtcagcccgctcggcggcgcccaggcgatctggatcgattgggacaagggcacgctcaccggtggctccgatccgcgcaaggacggctgcgcgctcggctattgatcgcccgcgcagttccccgcgcgatcaggaaaagttgacgaagggcggccggcattcgctgcgccgcccttatctcctccggaaccgcactcattgctccaagttaaggggcgatgagcggtgcaggcatgcgctgctttgcagatcagcggcggaggcctgccatgcccgacaaaccaggttccagaacatcagcattcgatcggcgcgccttcctggccggtgctgccggaagtgcgttggtcccgatgaccgcgcgtgcggccgcgcaggaggcgaatgcgcccgccgcgcaggatccatcgctgcccgtcgaagtcacgctgcgggtgaacggcaaggacaatcgcctgagcatcgacgcgcgcaccacggtgctcgatgcattgcgtgaacatctcaagctcaccggcagcaagaagggctgcgaccacggccagtgtggcgcctgtaccgtgctgatcgacgatcggcgcgtcgtgtcgtgcctgacgctggcgcttgcggccgaagggcaggagatcacgacgatcgaggggcttgccaccgacgaccgcctgcatccgatgcagcaggccttcatcgacaacgacgccttccagtgcggctattgcacgccgggccagattatgtccgccgtcgcctgcgtcaaggaaggccatgccaacagcgaggccgagattcgcgaatacatgagcggcaacatctgccgctgcgccgcttatccgaacatcgtggccgccgtgaagcaggccgcgcccgagatcgtgaaaggctaggccgatgcgaccgttttcgtatcagagggcaacagaccctgacatggccgtgcaggcgctcggcgccgccgcggcggcgaacaatccggtgaccaaggcacttgtgcagccgctcgccggcggcacgacgctgatcgacctgatgaagctggacgtgatgcggccggccgcgatcgtcgacatcaatccgctcgcgcgcggctggtcagcgatcgagccgaagagcgacggcctgcgcctcggcgcgctggcgaagatgtcggatgttgccgcccacgccgagatcgagcgaaactatccggtgatcgcggattcgctgaagctcgccgccagcgcccagctgcgcaacatggcaacgctcggcggcaacgtgatgcagcgaacgcgctgcagctatttccgcgacgtctcctatgaaaattgcaacaagcgcagtcccggctccggctgtgccgcaatggacggcgtcaatcgcatgcatgccgtgctcggcgtctccgaccagtgcatcgcgacctatcctggcgattttgcccaggcgctgatcgctctcgatgccatggccgagatcaccggcaaggccgggacgcgcagcatgccgttcgcccagctgcacaaggcaccgggcagcacgcctgatatcgagaccacgcttcagcccggcgagctgatttcggccttctcgatccagggccggtggccgcggtcggtatatctaaaggcgcgcgaccggcaatcctacgagttcgcgctgtcctcggcggcggtcgcgctcgacgttcaggatggcgcgatcagggacgcgcgcgtcgcgctcggcggcgtggccacggtgccttggcgggcgcgcgaggcggaagcactgttgaaggggcaggagttcgatgaagcgctggcccggcgcgccgccgatgccgctttcgccgaggccaaggggcggcggcacaacagcttcaagatcgcgctcggcaagcgcgtggtggcacgtgcgcttcagcaggccgtaacgatggagatctgacgatgaccgctgcagctcccgggcccaaggcgaatatgggaagacccgtgccgcgctatgatgcggccgcaaaagtcacggggcgggcgacctatgcctccgacatgccgctggacaatccggcctacgccttcctggtcaccagcgccatcgccaagggccgcatcgaccgcttcgacctcgacgatgccaggcgagtccgcggagtgatcgagatcgttacgcatgagaatgcgccgaagctgaaggactcgaagttgttcagcaatggtggctatgccggtactacgatccagccgctgaaatcggccgaaattgcgcatgacggccagatcatcgctgtgatcgtcgccgaaaggtacgaggcggcgcgcgaggccgccaaccgcgtcaaggtcagctatacggtcagctcgccgagcgcgactttcgattcgcccggtgcaacgaccgcggccgcgaagggacagaacgcgcagttcaaggaggacccgaaggtcggcgatttcgccaaggcgttcgaggaggccgaggtcaagctgactgccgcctacgacacgccggcgcagcaccacaatccgatggagctttttacgaccagctgcgcctggatgggcgacaacctcgtgatctacgaaggaagtcagtatgtctatggcctgaagaacggcgtcgccgagcaactcggcatcgacgtcgacaaggtgcgggtggtcaatccctatgtcggcggcgggttcggctcgcggggctcgatgacgccgcgtacccccatcatcgccgccattgccaaacgtctgaaccgcccgatcaagcttgtcccgacccgcgaccagggttttacaatcacgacgtaccgcgccgagacgcgacacgagatcaggctcggcgcgagccgtgacggcaggctggtggccttgaggcatgcggggtccgaggtctcctcgcgcccggacgcctattgcgtcggtgggaccaaaacgacgacgcgactctatgcgtgcccgaatgtcgacagcctggtgtcgatcgtgcgtgccgatcgcaacacgcccggattcatgcgctcgcccccggaggtgccgtacctgttcgcgctcgagagcgccttggacgagctcgccgtgaagcttgacatggatcccatcgagcttcgccgcatcaacgatgccaccaacgagccgatcgatggcaagccttacacctcgcgatcgctcatggcgtgtttcgatgaagccgccaaggcgttcggctggtcgcagcgctcgccgcagccgaaatcgatgtccgacggcgactggctgattggctacggctgcgccgccacctgctatccgacgcagatggcgccatgtgccgcacgcgtgcgcttgcagcgcgacggccgtacccgcgtcgagatcgccggccacgagatcggcaccggggcctatacaattatagcccagacggcggccgagcggctcggcgtgccgctcgaaaaggtcgcggtcttcataggggacagcgacctgccgcctgcgccggtcgccggcggctccaactcgacggccagcacctgctcggcagtgatgatggtgtgcgatcagatccggcagcgtctgctcaaggcggtgatgccgagcgacagcctcgccgacaaggccaaggagaccgtcggcatcagtcctgcaccctcgactcaggctgcgaagagcgaccgccctctcgatatcgagaaggccttcgatgcgctcggcgtcggcatcgtcgaggagtatggcgagtggaagccggacggcgcgccgatggactcgttcacggccatgcaccgcggacagccgcggttcgtcggcggtcatcaaatgaaggacaagatcgcctacgccttcggcgctgagttcgtcgaggtccgcatcaaccgtttcacgcacgagatccgctgccctcgccttgtcggcgctttcgctgcgggccgcatcatgaatccgcgcacggcgcgcagccagctcatgggcggcctgatctggggcatgtcttcggcgctgctggaggccaccgagatcgacgaacgctatgcgcgctacgtcaacgacaatctcgccgattacctcgtgcctgtgaacgccgacgtccccggcgtcgaggtcatcatgctttccgagcaggacgaccacatcaacccggcgggcgcaaagggcctcggcgagctcggcaatgtcggcaccaatgcggcgatctgcaacgcgatctatcacgccaccggccagcgtatccgcaggctgccggtacggctggaaaatatcgaagtctagagggtggaaacggcggcggcgttgggttagacacctcccgcctcaaatggaaggtgtcttatgcagcgttttcagcgcgtgctcctcgctatcatgtcggcactcgcgatcaccgtgatcgcaggcgtaaccgatttcgtttccaccccggcctcggcccagaccgcaggaaagatcatgaccacagcttcaggcttgcagatcatcgactcgaccgtcggcaccggtgcctcgccgcagcccggccagatctgcgtgatgcactataccggctggctctatgagaacgggcagaagggcaagaaattcgactcctccgtcgatcgcaaggagccgttcgaattcccgatcggcaagggccgcgtcattgccggttgggacgaaggcgttgcctcgatgaaggtcggcggcaagcgcacgctgatcattccgccgcagctcggctacggcgctcgcggcgccggcggcgtgatcccgccgaacgcgacgctgatgttcgacgtggaattgctcgcggtgaagtgatggcgccgccgtcattccgggccggctcggagagccgaacccggaatctcgannnnnnnnnngtccctggttgcgcaatcgcgcacctggggtctggcacctgcgcaccatcccggacatgaaaatacaaaaaaagaccggcctttcggccggtctttcgctttcagatcactgcgtgctactcggtcgcacgcttggcggccgcagcggcgcggtccatcgcttccttcccggcgtccttggcgtcgcccatggcctgctggcccttgcccttggcctcctggaccacgccttcgcctttcatgcgatcggagcccgtggcttcgccgatgccctgcttggcgttgccaatggcttcgttggcggtgcccttgatcttgtcggtcgtgctacccatgaaactctccttccattttgctcgcattgacaacgcccggtggctacgagggttccgattttggtctggctagtgggcgctgctttggttagtttgccgcgcacggaaccaacagaaagcaagtcccatgaccggccatgaccattcgcattcccaccatgaccacgatcatgatcgctggaaacatgacggcgtgcgcgtcattcccggtaaccagctcgacaccaacgtgccgtcgacggcaggcatggaccgcgccgccgccatcaacttcgcacgcgtcggcgcgcagaaactgtgggctggcacggtcagcatcaagccggatgcgaagaccggcgcacatcatcacggccatctcgaaagcgtcatctatgtggtgaagggaaaggcgcggatgcgctggggcgagagcctgcagttcaccgccgaagccggccccggcgacttcatcttcgtcccgccctatgtgccgcaccaggagatcaacgccagcccggacgaggtgctggagtgcgttctggtgcgcagcgacggcgaggcggtggcgatcaacctcgacatcgagccggtcgagaaacccgagaccgtgctgtggatcgacccggtgcaccgggatcccaacgagaagaagtgagccgccccagggttgatgggaatcggtacaatagagccacgcaagcgggatcaaaaaatactcggaagtgatgtcggatggcggtcttgccggccgtccttgggcagaacccgccaaggagcttccgatgcccaagatgatcttcgtcaacctgccggtgaccgacctcaagcgcgcgaccgccttctacgaggcggtcggcgcggtcaagaatccgcaattttgcgacgagaccgcaagctgcatggtcttttccgagaccatctacgccatgctgctgacgcacgacaaatttcgccaattcacgccgaagccgatcgcggacgccaggacctcgaatcaggtgctgctctgcctgtctgctgacagccgcagcgatgtcgacgacatcattgtcaaggccgcggccgcgggcggagtagcagatccaagcccgaaggacgaatacagcttcatgtacggccgtagtttcgaggacccggacggccatatgtggggagtgaactggatgaatctcgcggccgcccccctgcagcccgacttggcgaacgtctgagccgagcccggcagatctgaagaggagcattcacgatgtccaagctcgtgccctgcatgtggttcgacggcgatgccgaagaggccgcaaaattctacgtctcgctggtcccgaattcggagatcacgcacgttcagcacaacgtttcggacggcccctccggcaaggaaggctcggttctcgtcgtcgaattcacgatagccgggcagcccctggtggcgctcaatggcggcatgaaaatggagtacacccacgcgatctcgctgatgatccattgcgacgaccaggcccaggtcgacagcgtctggaacgcgttcctcgcccatggcgccaaggaagaacaatgcggctggctcagggatcgctggggcgtggcctggcaggtggtcccgacagtaatgttcgaattcctgtcgagcccggacaaggcagcggccgcgcgcgcaatgcaggccatgatgaagatggtgaagctcgacgtggacgtgctgcgtcgggccttcgagggcaagtcggcggcgtgagccgcaggcccgtgccatgcacgcgctgtgatcgcccggcttgaccgggcgatccagtactccaagacggcagtgattgagcggatggttgcggcgttccggatgccccggtcaagccgtggcatgacggcgggtgtgaggcgaagcctcgctgctagtaattgatccgcaaccccacgccgccatgaatggtgttaccgaccggctgtggaccgagcgtgccgttggcgaagagatccacgatccagcccttctgcacgcggaagccaaggcggccgccatattcgaaccagccctggttgcccatggtcggcaccaccgtgccgttcccgatcacggtcgcgacgattccgctgtggctggcgaatgactgcacccacccgccattgatgttggtctcgatgttgctgccgaacagatgcgtccactgcccgccgatcttgacgaggctggtgcggtcggtgccatcagcgatgctggcatcgaacggattgaatgccacggcgctgtcgctgtagccggagacgcgttgccagagctgccagacttcgatcgaggctgcgacctcgtcgcgcggcgacaggcggctgatccagccggcgcggccgtagacggcataattggaggcattggtcgaactggttacgctcaccgggccgagactggtgtcatagctgcgcgtgtaacgtgccttctcccacggcgtcaggattgcgccgacgtcgaagaacgggcgcgacgagccccaatcggtgaagtcgtagcgcagtgcgaaagcgccgatcggtgcgctggtgatcttgtagccgcccccatcgtagtgcgtgtaggcgatgccggcgagcagtgacagattgttggtgagcgccttgcggccgtggacgccggccgagaacgagccggccgagccgaacgcgctgacgcagtcgccgcaattgatctgctcgttgacgccgagcagcaccgtgccaagcacccggttggtgatcatctggttgaaacgctgattggcaagcccgccgatcgaattgccgctcgaatcggcgccggtcggtcctgacggcggaggatacgggctcggtgaaggcgccggataggggctcggtgacggggagggagtcggagtaggtgacggagacggtgacggagaataggttggggacggagtgggatttggttcgcactcggacccgcactccgattcctgcgcagccgccgggcgggcatcgagcgtggcaagcgcaaaggccgcagttgcggtcagtgcaacggcaaggatgaggcgccggacgttcaactttgccatcgtcagcgtccgcacagcatgccgtcgtcctggacggcgggcgtgatggtcggcgaggcgtcggcgtactggttgaccgcgcacagccccgcactcgcggcgcagttggcggcaaaggtccagggcggcgtgttggatttggtgatgctgaccttgccgccggtcgaggtgatgaccgcggtctcgccgggctgggtgagctgcacgcattggccgcttctcgtacagacgctggctgcgccgtcctgaagcacgaccacggagcgtccgcgctgcgagagaatgtcgagcgtggtgccgcgcacgccgatggtcgcgagcggcgtggtgatcttgtaggcggccttgtcggagttgccagtgacaaagcggaatgcgccggtggtcatgcggattgcgacgtcgcgatagctgtgctcgtcgttgaagacggtacgatcgagcttcagcgtggcactcggcccgagcgacaggttggtgctgtcggccatcacgaaacgtgccgcgctgtcggcaccggtgcgtacggtctcatcgcgcagcatgctgtcgccgacgttgatcggcgtcgtggttgcggcgacgcgcaccacttcgttctgaatcacgacggcctggccgacgcgtgtctgcgccggtgcagcagacgctgtgcacaatgcggccgacgacaggatggagaaaagccaaaaacgcaaattcatttcgcaaccgatcgatgtgtccctgatcgtaccggatcgcgcgcgcttgcgatgtggcggaattatcacaagcggcgcgggacgtgcgctatgcttagtgacagttgcggcagaatgcgttcaatgaaaacacaacacttacttttgtcccgcggtgacgcaaatttgccacgcaaaacatccccacagcagcctcttgaatcgatcgcagttccaagattgtcgcggagcgcagtaatcgctgtcgcgattttcctgatcgcgcatctggcgctgctgatcggcctcaccacgccggagaagttcgtcttcgacgaggtgcattatgtgccggcggcgcggcagatgctggcgcctgtgatgtcgcagccgatgctcaacccgatgcatccgccgctagccaaggagctgatggcggcatccatcgcggccttcggcgacaacgcgctcggctggcgttatcccgcgacgttgttcggtgcactggcgatcgtcgcgatctatctgtgcggcctcgcgctgttctcggcacgagggcccgcgatcgcggccgcgctgatcgccggtctcaaccagatgctgtacgtgcaggcacgcatcgccatgctcgacatttttgcgctcggcttcggcctgctggcgaccgccgccttcatgcatggctttcgacgagagcggccgcagacgatgtttgccgcggcaggcgctctgttcggacttgctgcggcgtgcaaatggagcggcttgtttccgcttggcgtctgcatcgtcattgtcgcggtgatccgcctgatgcagggctggcgcacgctgttcgcggacgcgaggccggacgattggtatcggcccgagctgtggcgcggcttgaagctgcatcatctcgcgctctgcttcgcgatcctgccggcgctgacgtatcttgcagcgttcgttccgctcaatggattgtcgctgccggatttgttcgaggcgcagcggcgcatctttgtcgacaacacgacgaccgcgatcgccggccacacctatatgagttcatggccatcctggccgctgctcgcgcgcccggtctggttcctgttcgacaagaccgcagaggacaacgtcgctgccatcgtcttcctcggcaatccgctggtgctttggccggcgctgctcgcgctcatcatcgtgctgcgggatttcatcgtcgcgcgccgctgggacgcgttcctgatcgcagcattctatttcggcccctggcttgcctgggccttgctgccgcgcacgctgggcttcatctattactatctgccggccgcgacggcggcctccctcgccctcgtctacgtgctgcgccggcacggaatgccgcgctggctgctgtgggcctatgtcggcgtcgctgcggctggctttgcagtcatgctgccgatttccgcagccttcatcggcgcgtcgatgaagagcttcaaccggctgatgctgttccagagctggatatgacatcgccgcctgccgggctgcggcaggcggcgtgtcttgcacgatggccgcgcctcacttggacgcggtcttggtctccatgttcacgacctggacgcggcggttgaccgcgtctgcgccgttggcggcatccttcagcttggtctcgccgtaaccgacggtgaccagatcgttgccgttgaggccgtagttctgcaccaggtacttcttgatggtgtcggcgcgcctctcggagaggccctgattgtactcttcgccgccggtggcgtcggtgtggccggcgaccacgaaggtcgagcccttgagtgccggatcggacagggccttgccgagcgcctgcaccgaggccatcgaggtcttggcgatgtcagccgagttgtagtcgaactggatctccagatcgatcttcggcttggtcgccgcgagctcggcgatctgctcccgctcgcccatcgacaacgatcgggtcggtcggttgcgcacggtgttcaggaatgttgcctccttggcctgcacggtcgtatcggtctgcgggcccacggacaggccgcgggtcgccggtttgggcttcagggcatccaggatcttgtcggtggagacgttgttgtcgccagccatggccaggctcgccgtcatcgacagcgcggctgtcagagtcatcgccttcagtccaaagaacttatcaaaacgggtcattgtcatatcctcgctgctacgcctgatggcgatttgatgctgtgagcctagggcaggttcaaaggcatagatgtgatccttgtcacattcatatcgtcggactgagacatcgatctgtttcgacactctgcgcgtcaggtcggatcgaggagcctttgagacccgcgttcgtcgcaaaggcgtcgcctcgcagcccgctccagaacaagaattcgtccagaaacccggctatcgtacttagatcctttgacaattcgtccgcgacaggagctgagttccgtccagtgccgaggccaagtgactacccgttccatcgcagcgccccgccggatcggacagtgttcgtgagctcgatgccgatctacgtcggggcggcgatgatcgcagtggcgatcctgctgtccacgctgatcacgggcctgacctcccgctatgtcgggctgggggcgcccaacgaggaaaatatgtggctggtcgatcgtctcaccggcgaggtctatcgctgccagtccgagggacgcggcaaggcctcctgtgagcctgatgttgcgaccggcagcgtcgaggagcgcccaaaagccgcacgctgaaagcgggctagtacggcgacgcagcaacgaaaatgtcttctccttgataaacttgtcgctgaagaatgtccggtgcggtggccggcatcaggccggcttcatttcttgaggagaaaatttgatgaagaccctattgctcgcgacggcattcgtggcactcgctctgactcccgcatcggctgccaagatggcgtgcaccagtgcaaacatggcaaagctcgttgccgggatgggtggcgaagacacgccgggcaaggtcgcagcgaggaagtcgatggcctcggccaattccgacatgagcaaacgcaacatgcgcggcgcctgcaagcactacatgaacgccgagaaggcgatggcgatgaagtagcttccgccgatttcacgcgtgatggccgcgctggcagcagatggcagcgcggctttttcgtgtccatgcttctttgcctcggcgcgaatcccgctacattgtccctgcaatgtcccgcacgcccaaaccgcttccgctcacaaccacacaggctcggcagatctggctgcatgcccagcgactggacgagcgaatcccttttggtgaaggcgcgcaggccgtcgcggacgcggtcgcgcatctcggctatgtgcagatcgacacgatcaacgtcatcgagcgctgccatcaccatatcctgttcagccggatcccggcctaccgacgcgccgatcttcgccaagcccagagcgtcgacaaaagcgtgttcgaatactggacccatgcgctgtcctacgtgccggcgagcgacttccgcttcttcctgccggcgatgcgcgagcaccggcgcgaggggcacaaatggttcgcttcggtgaagccggcggacacgcgcaaggtgatgcggctggtgcgcggcggtccgctgacgatccgcgacatcgacgacgatgtgctcgtcgagaaggagcatttgtggcagagccgcaagccctcgaagcgcgccttgcagcttgccttctataccggcgccgtcaccatcagcgagcgacagggcatgctcaagacctatgagctgatgacgcggcatttcggctgggacaagctgccgaagccggcatcggcaagggagacgaccgcctatctgctcgaccgcgcgctgcgctcgcagggcgtggtcagcctcgattcgatctgttatctcgacgcaccgagcaagaaaccggtcgcgcgcctgatcgcgtcgcgcgtccgccgcggcgagctcgtgcctgttacggtcgagggagccggcaagcaggagcattggggcccgcccgctgcgctggagccgcatgaggtgccgtccgatctcgtccacatcctctcgccgttcgatccgctgatcattcagcgcaagcgcaccaatttgatcttcggctacaatcatctgttcgaagcctatgtgccgaaggccaagcgcaagctcggctacttcgcgctgcccgtgctggtcggcgacgagatcgtagctgcgctcgacctcaagaccgaccggcagaacaagaagctgttgatgcagaaatggacgtgggtcggcgagggcaggaagacgggacggcgcaaggagctgaagcgtgtgatcgaggacgagctcgatcgtttcgagcgatttcaattggcagagtgagctagattgcaggtggattggcaaagcgtattccgcgagcgcttgtatccgcacagaccgaggaagcgagttgcctttgcttttggagctgcggcgaacgctagctcgcccgacgcttcgcaacgagccgatcgatgaagattccgaagagaatcccgatcgcgtaggccaccagattccatagcgagaagatgcgcccgagcagcagcgcgccggccgtgctgagcctgaatgcatcgagccatggcgtgtgaaccagccgggagaactcgacggcgatggcgatggcggctgcgatcgccgcaagaccgcttcccgtcagccgcggcagcaacaccccgaccagcaagaacaccatcgtcgcccacaacagcgagccgccgtacttcacgatgaaggcgggcaggccgagcgggaaaccgtaccagcgcaagctgagcccgcagacgatcactgcgagcgcaaggatggcgcggaccagcgatctccggagcagcgcgacaggtctatccggctgcgctacgcgcattgcttgctccattgactctttgctcgcgatgctcaaaaccgccgctcagccctagaaaagcaacaacgggggaagccatgagccaaaccacttacgccggttccgccggcggtgccaagaacgccaacaagagcgacatcgagacctcgaccatccgtgcgatctcctggcgcctgattccattcctggttctggcctacttcttctcctatcttgaccgcgtcaatcttggcttcgccgcgctgaccatgaatgcggatctgaagttcacgccactgatcttctcctggggcgccggcatcttcttcatcggctatttcatcttcgaggtgccgagcaacctggctcttgagaagttcggcgcgagccgctggatcgcccgcatcatggtgagctggggcatcatctccgctctgatggccatggtcagcggtgtcaccagcttctatgtcctgcgcttcctgctcggcgtcgccgaggccggcttcttccccggcatcattctctatctcacctattggtatccggccgaatatcgcgcccgcttcctcgcagctttcgccattgcggtgccggtctcgaccgtgatcggggcgccgatctcgggcctcttgctcgggcttgacggcatgatggggctgaagggctggcagtggctgttcatcatcgagggcatcccgtccgtgctgctcggcatcgtcacctggttctatctcaccgacaagccggagaaggcggactggctttcggccgagcagaaggcgtggctcaaggccaagctcgactcggaaatcgcggccaagcaggcggtgaagcatttctcgctcggtgaagcgctgtcttcgccgaaggtgatcgcgctcagcctgatctatttcggcttcgtcggcgcgctctatggcatgcagttctggctgccgcagatcgtcaaggcgttcggcctcaccaacgcgcagaccggcttcgtcacggcgattccctatctgttcggcaccatcgccatgatcttgtgggcgcggcattcggatgcgacgcgcgagcgcgtgatgcatgtcggcgcgcccttgctgctcaccgcggttgcgctcggcatctcttcatatctcgcgaatccgacgctcacgatggtggcgctgacggtggccgcgatcggcgtgttctgctgcttcggcgtgttctggaccctgccgaccgcctggctgtccggcacggccgcggccggcgggatcgccctgatcaactcgatcggcaatctcgccggcttcggcggaccgtacctgatcggctgggtcaaggaagccactggccagacctcgacgggcctgctggtgctcgcggtgctgcccctgatcgccggcctcctggtcttcgtcggcggccacgacagcaagcacgagttcgctggccacgggcggtaggaatgtccggaggtggaaaacgcgctctttgtgcgccatgccacctcatctccttcgcaagctgacgccacaccttgcccgtccctgcaatgggaccttttcgacgtggcttctcaatcccaccaccccttaacgatcacgcattcctgatgactgacgattattgactttcgtcactagttagttgacagttcctgcagttgagaagcaggagtgttcgccgatgttcgtcaggtcggttttatcgagctattccaggctgttggcgggagtgtcgctcgccctgatggccgctgtgctgaccgggtgcaatgataccgtcgccgagaaggctgagccgccgcgtccggttctggtggcgaccgcgaattataatgccgaaacgccggagcgcagctttgtcggcaccatcaggccgcgcatcgagagcgatctcggcttccgcgtcgccggcaaggtcgccaaacgcctggtcgaggtcggccagaccgttgaagtcggccagccgctcgcgaccctcgatgaggtcgacctgaagctgcaggctgagcaggccgtcgccgagcagaccgccgccaccggcgttctggcccaggctgctgcagccgagcagcgtgccaaggatctgaaggccaagggttggaccaccgatgcgcagctggattcaagccgcgctgccgccgatgaagcccgtgcgcgcctcaatcgggccgagcgctcggtcgagttgaccaagaattccctttcctacgcgacgctcgctgccgacgcccgcggcgtcgtcaccgcaacgctgatcgagcccggccaggtggttgccgcgggccaggcttcgatccgtgtcgcccgctttgccgaaaaggaagcggtcgtcgcgatccctgagacgctggtcggacgcgccaagtcgggcgtcgccagcgtcactctttggtccgagccgaacaagaagtatgcggcgaagctgcgcgagatcgcgcctgccgccgatccggccacccgcacctatctggcgaagttctcgctgcccgaggcggacgacaaggtctcgctcggcatgacggcgaccttgacgctgtcggatgccgcgaccgagcgggtcgcgagactgccgctgtcggcgctgttcaacgaaggcggcaagccctccttctacgtcgtcgacgacaatgggaacgtctcgctgaagccggtcatggtgaagtcctatgaaagcaaggacgtcgtcatcaccggcggcgtggaagagggcgccaagatcgtcgcactcggcgttcagaagctcgatcccggtcagcgggtgcggatcgtgtcgtcgttgtctttctaactacccgtcattccgggcccgccctgcggggcgcccggaatgacgtgaagagtaagttccgtccttgcaaggcgagtttcggcccgagcgcaaatgctggggctgaagcggcgaagcgatccagaacctgcccagccccctgggttgcttcgctgcctcgcgatgacggtttgaacagagcggctgtcgtttttgcaactggatcgtctttcggagagagcgatgaagcgcttcaacctttcggcctgggccgtgagccatcagacgctggttctctttctgatgatcgtgctcggtgccgccggcttcttctcctatcagaagctcggccgcgccgaggatccgttcttcacggtgaaggtggtcaacgtctccgtgatttggccgggcgcgaccgcgcaggagatgcagacccaggtcgccgatcccatcgagaagaagatccaggagctgccctatttcgagaaggtgcagacttattccaagcccgccttcaccgcgctccaggtcaccttccgcgacaacacgccgccgaaggacgtgccttatctcttttatctcctgcgcaagaagctggtcgacgtgcagggccagttgcctgcggggattctgggtcccgtcgtcaacgacgagttctccgacgtcgattccatcctgtacatgatgaccggggacggcgccgactatgcccagctcaaaaaggtgtcggaaggattccgtcagcgactgctgaaggtgccgggcgtgaccaaggtcgacgtctacggcaatcaggacgagcgcatcttcgtcgagttcagccatgccaagcttgccacgctcggcatcacgccgcaggcgctgttcgattcgctcgccaagcagaacaacgtgaccccggccggtacggtcgagacctcctcgcagcgcgtgccgctgcgcgtcaccggcgcgctcgacggcgccaaggccgtggccgagacgccggtcgagagcaacggccgcgtgttccgcctcggcgacatcgccaccgtcactcacggctacgtcgatccgcccagcttcgtcgtgcggcaggaaggcaagccggcgatcggcatcggcgtcgtcactgccaagggcgccaacatcctcgatctcggcaaggaggtcgagaaggcgacggccgacttcatgaaggccgtgccgcagggcatcgatgtcaagctgatcgccgaccagcccaaggtggtcgagcacgccgtcggcgagttcgtgcgctccttcatggaggcgctcgtcatcgtgctgttcgtctcgttcctggcgcttggttggcgcaccggcatcgtggttgcgctgtcggtgccgctcgtgctcggtatcgtcttcatcgtcatgaacgcgatgtcgctcgacctgcatcgcatcacgctcggcgcgctgatcatagcgctcggcctgctcgtcgacgacgccatcatcgcggtcgagatgatggtggtgaagatggagcagggctgggaccgcatgcgcgcggcgtcctttgcctgggaatcgactgcgtttccgatgctcacgggaacgctggtgacggccgctggcttcctccccatcggcttcgccaattcagcggtcggcgaatatgccggcagcatcttctggatcgtggcgatcgcgctggtcgcgtcctggttcgtggcggtgatcttcaccccctatatcggcgtcaagctgttgcccgacatgaaggcgcatcacaaccacgatccgcatgcggtctacgagacccgcatgtatcggggcctgcgcgccatcgtgcgatggtgcgtcaaccatcgcatcaccgtggtggtggcgaccgtcggcgtcttcgtggcctcgatcgtcggcttcggccaggtccagcagcagttcttcccgctgtcggagcgacccgagctgttcttccagctccgcctgcccgagggcaccgctttcaacgtcaccgagaaggcggtgaagaaggccgagacgctgctgaaggacgacaaggacatcgagacctacacgtcctatgtcggccagggctcgccgcgcttctggctcggcctcaatccgcaactgccgaacgaggccttcgccgagatcgtgatcgtcgccaagggcgtcgaggcacgcgagcgcatcaaggccaagatcgagaatgcggtcgccgatggcatgctgacagaggcgcgcgttcgcgtcgaccgcttcaatttcggcccgccggtgggcttccccgtgcagttccgtgtgatcggcccggatgccaacaaggtgcgcgaaatcgcctaccaggtccgcgacgtcatgcgccagaacaagagcgtcaaggacgtccagctcgactggaacgaacagtcgccctacctcaagctcgtcgtcgaccaggaccgcgcccgcgccatgggcctgactcctcaggacgtctcgcaggcgctggcgatgctgatctcgggttcgcaggtcacgaccgtgcgggacggcatcgagaaggtcggcgtggtggcccgtgcgatcccgtccgagcgcctcgacctcggcggcgtcggcgatctcaccatcacatcgcgcaacggggtggccgtgccgctgcagcagatcgccaggatcgagtatgcccacgaagagccgatcatgtggcggcgcaaccgcgacatggcgatcaccgtgcgctccgacgtcgtcgacggcgtgcaggcgcccgatgtcaccaaccagatcacgccgaagctgaagccgatcatggatcacctcgagccggcctaccggatcgagccgggcggcgcgttcgaggaatccgccaagggcaatgcctcgatcttcatcctcttcccggtgatggtcatggtgatgctgacgctgctgatgatccagctgcagagcttctcgcgcctgatcctggtgttcctgaccgcgccgctcggcatcgtcggcgcctcgcttggcctcaacgtcgccaacgcgccgttcggtttcgttgcgctgctcgggctgatcgcgctcgccggcatgatcatgcgcaacacggtcatcctggtcgaccagatcgagaccgacgtctcgcacggcctgacccggcgcgaggcgatcgtggaggccacggtccgccgcgcccgtccggtggtgttgacggcgctggccgccattctcgccatgatcccgctgactcgctcggccttctggggcccgatggcgatcaccatcatgggcggcctgttcgtcgcgaccttcctcacgctgttgtccctgccgggcctctatgcgctgtggttcaggaagagcctggacgaggctggttcagtcgaacagcctgccgcgtcgcagcatggcagcgatgaacatccggcaattccgcttgctgaagcggctgaataagtgagatgaagtgcagattgacgagtcctgacagatgacactggttgcggaacatatcgaaggcgacacccgggaccgtattctcgaggtggccgagcggctgttccgccagatcggctaccagaagaccacggtcggcgatatcgccaaggagctccggatgagccccgccaacgtctatcgcttcttcgaatcgaagaaggcgatccatcaggcggtggcacgctcgctgatgggcgaggtcgagcttgaggcccagcggatcgtcgcaaagcccgggccggtcagggagcgctttcgcgagttgctcaccaccatccaccgcatgaacaccgagcgctatgtcggtgacaacaagctgcacgagatggtcgagatcgcgatgcaggaggattggcaggtctgcgtcaatcatatggagtgtatcgccggcgtcgtcggccaaatgatcgcgcaaggcgtcgcctccggcgagtttgaggcgcccgacctgcaactggctgcgctctgctcgtgcaccgcgatgatgcgcttcttccacccccagatgatcgcccagtgcgccaccaagcccggcccgaccatcgaccagatgatcgatttcgtcatcaccggtctgtcgccgcgccactgacggggcggggcaatttctcctataagcgaattgctgcccgtggcgggcaaggacggatcaacaaaccccgtcattgcgagcgcagcgaagccaatccaggctgttcctaaggagggattctggattgcttcgctgcgctcgcaatgcgagtacggagaagcaagcgcgtgaccgataaagacctgtatttctacgagccctccaagggccacggcctgaagcacgatcccttcaacgccatcatcgcgccgcggccgatcggctggatctcctcccgcgacgccaagggccacgtcaatctggcgccctacagcttcttcaatgcgttctgctacgtgccgcccatcatcggcttctcctccaccaactggaaggacacggtctcgaatatggagcagaccagggagttcgtctggaatctcacgaccatggatctggccaagcacatgaacgcgaccgccgcgcatgtcgctcctgaggtcgacgagttcaagctcgcggggctcaccgcggtgcccggcaagctcgtcaacgtgccgcgcgtcggcgagagccccgtcgctttcgagtgcaaggtgtccgacatcgtccgcctcaagggcgccgacggtaagcaggccgacgcctggctgacgctcggcgaggtcgtcgccgtctacatcgacaaggcgctgatcaaggacggcgtctaccagaccgccgcggcccgccccatcgtccgcgccggccgccgcggcgactatttcgagatcaagccggaaaacatgttcgagatgatccggccggattaggccactccgtcattccggggcgcgccgccaggcgcgagcccggaatccattcacccgccaacctccgccgtatgatggattctcgggtgcgcaattgcgcaccatagctcgcccttcgcgagccccggaattacggtgggggaccggtgcggccaaccttccccctcccggaactgcccccacgccctggccgttatggtcccggagcggcggcccggccgcgtcaatgtcgcaggcgaagtgttcgcctccaccggccactttccgctaaaatacccgccaaccgcgccgatgcatgaggtcagccatgagcttccgccgcgacaccgtcacaaagccgattttttcctgggcgcgcggcgtgctgccgtcgatgtccgacaccgagcgcgaggcgctggaggcgggtgacgtctggtgggacgccgatctcttcaccggcaacccggattggtcgaagctgctgaaggtgccgcaggccgtgctgacggacgaggagcgggccttcctcaatggtcccgtcgacgagctctgcgccatgctcgacgagtggaagatcttctgggaatggcgcgacctgccgccggacgtctggcatttcgtcaagcgcgagaagttcttcggcatgatcattccgaaggagttcggcggcctcggcttctcgccttacgcgcattcggaagtggtgcgcaagatttcgacccgctcgatcgccgcggccgtcaccgtgatggtgccgaactcgctcggtcccggcgagctcctgatgcgcttcggcacgaaagagcagcagcagcgctggctgccgcgcctcgccgacggccgcgatatcccctgcttcggcctcaccagccccgaagccggctccgacgccgcctcgatggtcgacaccggcatcatctgcaagggtgagttcgagggccgcgaagtcgtgggcctcaggctcaactggcacaagcgctacatcacgctcggcccggtcgcgacgctgcttggtcttgccttcaaggcatatgatccggatcacctcgtggggagccaggacgaactcggcatcaccgtggcgctgatcccgaccaatctgccgggcgtcgagatcggccaacgccatctgccgtcgatgcaggtgttccagaacggcccgaattggggccgcgatgtcttcattccgctcgactacgtcatcggcggcaaggagcgcctcgggcagggctggaagatgctgatgacggcgctcgccgccggccgcggcgtctcgctgccgtcgctctctgccgcgggcgcagcctatgccgcgcggaccaccggcgcctacgcccgcatccgcgagcagttcgggatctccatctccaagttcgaaggcgtcgaggagccgctggcgcgcatcgttgcgaccgcgtaccagctcgatgcggcacggcggctgacctgcgcagcgctgaatgccggcattcatcccgccgtcatctcaggcatcatgaagctgcatgcgacggagcggatgcgcattgcgatcgatgacgccatggacatccatggcggcaaggccgtgatcgacggtccgcaaaactatctcggcaatctccatcgcgccgtgccggtcggcatcacggtcgaaggcgccaacatcctgacccgcaacctcatcgtgttcgggcagggagccattcgcgcgcatccttatctgctcgacgagatgaacgcgcttgccgataccgatcgcgagcgcggcctcggcgccttcgacaaggcgttctggaagcatgtcggccacagcttccagacgctgttccgggccttcggccgcagctggacctttggcgccttcgcaccggcgccggatgcgggcgacgccacgccattctaccgccagctctcgcgctactccgcagcctttgcgctctgcgccgacatggcgctgctgacgctcggcggcgcgctcaagcgcaaggagatgctgtcggcgcgcttcggcgacatcctctcagagctgtatctgctctcggcggcgctgaagcgctggcaggacgagggcaggcaaaaggaagattttgccgctctggaatggtgcatggcgacgggcttcaaaaccatcgagaaccggtttgccgaaatcctcgccaacctgcccaaccgcttcgtcgcagctgtcctcaagttcgtggtccagccgttcggtgcacgcgtgctcggcccctccgaccgggtcgtgcaccaatgcgcgagcctcgtgctcgagccgtccgcagcgcgcgagcgcctcacgccggatctggcttatgtcgacgacgacggcggctttgcccgtctcgagcgcgcgttcgagctggtcgcaagcaccgacgccgtcgccaggcgcatgcgcgccgcgcatgtccgcgactggaagcaagcggttgccaagggcgtgatcacgcaggccgaaggcgagcagctcgccgcggcccgcgaagccgtgaggggcgtgatcgaggtcgacgatttcgcgcctgaggcgctgtcgccgatttacaagaaaaccggcgacgtgcatcagttcttccaggaactcggagagcagagggcggcgagctgatggcacgaccggtattcatcgtcgacggcagcaggacgccgttcctgaaggcgcgctcggggcccgggccgttcacgccggtcgatctcgccgtgcagtgcggccggccgcttctggcgcgccagccgtttgcgcccgatagcttcgaccaggtcatcctcggctgcgtcaacgtggtcgcggacgagatgaaccccgcccgagtcgccgcgcttcgactcggcatgggcgaggacatggtcgccttcaccgtgcagatcaattgcggctccgggatgcagtcgatcgacaccgcctatcgctacatccgtgagggccatgccgatatgatcctcgccggcggcaccgaggcactgagccatgcgccgctggtctggcccaattcgggcgtgcgctggtttgcgggtctcgccaccgccagaggcatggccgccaagctcgcggctgcgttcaagttgcggccccgcgatctcaagccggtcatcggcctcgagcgcgggctgaccgatcccgtcaccgagctgaacatggggcagacggccgaggtcgttggtcatctcttcggcatcacgcggacgcagtccgatgcctatgccgccgagagccatcgccggctcgcgcatgcgcaaagcgccgggtttctcaagggcgaagtcgaaaccgcgttctcccgcgacggcaagttcttcgaccatgacgacggcgtgcggccggattcgacggtcgagtcactcgcaaagctccggccggtgttcgagcgtccctggggacaggtcaccgccggcaattcctcgcagatcaccgacggcgcctcgtgggtgatcctcgcctcggacgcggcggtcgcaaagcacaagctgacgccgaaggctgcgatcgtcgacagccactgggctgcgctcgatcccagcatcatggggctcggtccggtgatgtcggcgacgccgctgcttcagcgcaacgacctcaccatcaaggacgtcgagacctgggagctgaacgaggcttttgccacgcaggtgctcggctgtctcgccgcctggaacgacgacaaattctgccgcgagatcctcggtctcgacggcgcggccggccagatcgagcgtgagaggctgaatgtcgacggcggcgccatctcgctcggtcatcccgtcggcacctcgggcaaccgtatcgtgctgcatctcgtcaacgcaatgaaccggctcggcacgcgacgtggcgtcgccactgaatgcatcggcggcggtctcggcggcgcgatgctgatcgaggcggtgtgacatggattccaagatcatgaccgcgctcggggatcgcgtgctggagctgggaccccagcctgctgcggaaagtccgtacaagcacttcaagctgacgcgcgatgccgacggcgtcgcctggctgctatttgatcgcgccgatgcaagcgccaacacgctctcctcagaggtgatggaggaattcgacgccgtgctcgccgcgatcgagaacgagcgtcccgcgggcctggtgatccgatcggcaaagccgtccgggttcatcgcgggcgcggacgtcaacgaattccgcggtgtgtccgaccccggtgtggtggagacgcgcatccgcgccgcgcacgccgtggtcgagcatctggaggccttgaggctaccgacggtcgcggtcatccacggcttctgcctcggcggcgggctcgaggttgcgctggcctgtcaggcgcgcatcgccatcgacggcgcgcggttcggcttcccggaagtgatgctcggcctgcatcccggtctcggcggcaccgcgcgctttacaacgctcgtcaattccacgcagtcgatgtctctgatgttgaccggccgcaccatcgatgcgcgacgggccaaatcgctcggcctcgtggatgccgtgacccaggagcgccacgtccgcggcgcggtgaaggatgcgctgttcggacgcctggagcgggcaaagccaggtctgttcacgcgcgccgccaatctcgggctggtccgcggcctgctcgccaagcgcatgcgggcggaggccgcgaaggctgcctcccgcgagcattaccccgccccttatgcgctgatcgatctctgggaggctcatggcggcagcaaggccgccatgctgaaggcggagcaggcgtccttcgccaagctgatggtgacgccgaccgcgcagaatttgatccgcgtcttcttcctccgtgagcaaatgaagagggccgccggcggcggcaatgccatcaagcatgtccatgtcatcggtgccggcgccatgggcggcgacatcgcagcctggtgtgcggggcaggggctgcgggtctccctcgccgacatgaaggcggagccgatcgcgggcgccgtgaagcgggccgccgagctctatggcaagatcatccgcaagcgcacggacgtgcgcgacgcgctcgatcgtctcatccccgacatggacggggagggcgtgcggaatgccgatctcatcatcgaggcggtgccggaaaggctggagctgaagcaaaaggtctatgccacgctcgagccccggatgaagcctgacgcgatcctcgccaccaacacgtccagcataccgttgcaggatctgcgtatgacgctggcgcggccggagcggctggtcggattgcacttcttcaatccggtgtcgcggctgcaactggtcgaagtcgtcagccatgacggcaacgatccgcaaattctgaagcaggcgctcgccttcgtcggtgcgatcgaccgactgccgctcgccgtgaagagctcgccgggcttcctcgtcaaccgcgcgctgacgccttacatgctggaagcgatggtgatgctggacgagaaggtcgaccagcggttgatcgacgccgcggccgagcagttcggcatgccgatggggccgatcgagctcgccgatcaggtcggtctcgacatctgcctcgacgtcggcgacatgctgcgcaccaagttcggcgatctcctcccgccgaccccggcctggctgcgcgagaaggtcgccaagggcgagcttggccgcaagaccggcaagggcttctacacctggaaggatggcaaggcggagaaggcgccgctcgcagagaccggtccgcgagtcacggaccagatgatcgatcgcctggtgctgccgatgtccaacgtctgcgtcgcagcgcttcgtgaaggcatcgtggacgatgccgacgcggtcgacggcgccatgatcttcggcactggctatgcgccgttccgcggcggcccgctgaactatgcgcgcacgcgcggcgcggaaaatgtcctgtctaccctgcgcgcgctggccgaacgattcggcgagcgcttcgcgcccgatcctggctgggacagcttcaagtgagagagacatgagcgagcacgctacgaccgggccgagcggcgacctctgcatccgcacgctggcgatgccggccgacaccaacgccaacggcgatatcttcggcggctggctgttgagccagatggacgtcggaggcggcgtgttcgcctcgaaggccgcgcggtcgcgcaccgtgaccgtcgcgatcgaggcgatgaatttccgcaaggcggtctatgtcggcgatctcgtctcggtctatgccaatctcgtgcgtgtcgggcgcacttcgctgaccgtgcatctcgaggcatgggcgttgcgtcgcaaggagcttcatccgttcctcgtcaccgacggtaatttcacttacgtctccatcgacgatcacggccgcccgcaggcgatccagcgcaacgatccgccgatcgcgacgtaatcgcgcgcgacgctctgcctcatcccgcgacatggcaggcgcaacagaacgcggcgccggtgagatcggcccgtcgcggcttcgccaagaaccagtcataaaacggatgaggtcccggcgtactcaattgcctgtcgattcggggtggaaacggcctccaatgcctgggaaccttcgggcaggattgccgttatttgcccgcaccgaggaatcacggaccatgccggacagctacatcatcgaagtcaattcgcagaccgcaggtatcgtcgttcgctctcaagggggctactgcttcttcgcctcgtcccaccgcttcaaccgcctcgagggccagctcttccgcaacgcccgcgaggccgagcgggccgcgcgcaagttggtgaacggtgacgtgaaggaggcggcgtaaccgtcgccgtcattccggcgcgaagcgcgatccggaatccatcttgccttgcaaaatgttgatcaaaagattccgggctcgcacctgtcatccgcgtcccggaagtgctgatcacagctttgtcgcggcgcgcgacagcagcttccactcgtcgccctgcttctgccagttcatcaggatgtgaaggttggtcgacacttttttcccatcggccgccatctcctgctcacccagccagtggaagcgcacgatcgcggctggtccgaccaccttgatggtcgggtccttgtattcgatcgacaggaacttggacttgccgtcggtcgcgttagtgatgaaggtcgccttgtcctcgaccttgccgctggaatggctgtagctcagctcgtccgcgcagagcgcgccgagcgccttcgggtccgccgcgatctgggcaaggcggaaggcctcgaccttccttgccacggcttcctcgtccgccgacgcagcgcgtgctggcgtggcgaacgcaagcgcagagacggcgaaagtggagagcgccagatcacgtctgttgatcgtcatcgtttcctcctttttggtcttggccggagtgttgcagtcgcccgcggacttgtcgagtgtcgcgtgagcagggatgcgcatgcgtcgttgcgcgatcgaagccatattgatacgtgttccgcgtcgacgcgtcgcacatcgagaaagtacggaaatgatcgaggccagccacgatgcgagggggagggcgctgctgttcgacatcgacggcacgctcgccgataccgatccattgcacttgaaggctttcaaccaggtgctcggtcctcatggccatgtcttcgatcacgcgcgcttctccagagagctgcagggcttcgccaatgtcgccatcggcgagcgtttcttgccgcatgaagcgccggaacggcgcgccctgatcctcgatgagaaggaagaggtcttccgaacgctggtggccgggcagattgcaccgctgccaggtctgatggcgctgctcgatcgtgccgacagcgccggcattcccatggtggccgtgaccaacgcgccgcgtctcaatgccgagctgctgctcgccggcctcggcatcacgcatcgcttcaaggccatcgtgatcggcgccgagctgccgcacggcaagccgcatccgctgccctatcaggaagggttgcgtttcgtcggcgcgaggccggaaacctcgatcgcattcgaggattcccgcaccggcgtgcagtccgctgcggcagccggcatcccgaccatcggcatccgcaccagcctcagccatgctgacctgattgcagcaggcgccgtcacgtccgccggcgccttcgacgatccggcgctgctcacgcgtcttgccgacgccatggcctggtgagcacccatcatccgttaaccgtgatcgacgcgcgcattgaccgaaggcgcgaaccgccgcaccatgcatcattctgatttgaggccgttgccgtgaccggactgacccatcgccaagccgaaatcctcaacattgcgcgcgcctccggccgcgtcatggtcgaggagctcgcgcgtcgcttcgaagtctcggcgcagaccatccgcaaggatctcaatgacctctgcgaacggaggtcgctgacccgcatccacggcggcgccatcatcgcctcgggcgtggaaaacctcgcctatgaggcgcgccgcttcgtcgccgccgacgagaagaaggcgatcggcgcggcggccgcttcgctgatcccgaacggctgctcgctgttcatcaacatcggcaccacgaccgaggaggtcgcgagcgcgctgacctcgcacgaggatctgctcgtcatcaccaacaatctcaacgtcgcgatgttgctttatcgccatccccgcatcgaggtggtggtcgcgggcggcacggtacggcgtgccgatggcgcggtggtcggctcgactgcgacgcagctgatcggccagttcaaggtcgactatgccatcatcggcgcgtccgccatcgacgaggagggcgcgctgctcgacttcgactatcgcgaggtgcaggtggcgcaggccatcatcgccaacgcccgcagcgtcatgctggtggccgattcgacgaaactccgccgcagcgcgccggtgcgcatcgcccacatcacccagatccagaccttcgtcaccgaccaggaactgcccgagcgtctcgccaccatctgccacagcaagggcatcgaagtggtggaggcgttgccgaaagggttgggcgagaatgatgagccccaggccgatgcgcaggacgccgcgcctgaggcagcgccggtggtgcggctgcgatagaggcttagtctgcttcagggcgcagcgccgtcgtccccgcagccagcgttgggggcaagagcttccggcatgacctgatcccacgcctggttcgacaggacagagaacgcggggcccggacgcccccggcgtggcgagttcggctggcccgctggcttccaagcgcccgcgcgctgccttcgctttcgccccttcgccccaggaaatattccactttcattttctttcgcttctctttcgtcttgctttcgtttctgggtgtgatgtaatttaaaacgaaagttgccgcccaatgaacgggcggtcgccgggggatgcgtcttttggagcgtattttcgatctcgccatcatcggaggcggtgttaacggctgcggcatcgcgcgcgacgcggtgggccggggcaacacggttttcctgtgcgaaatgaatgatctggcgagcgggacgtcgtcctggtcgaccaagctggtgcatggcggcctgcgctacctcgaatattacgagtttcggctggttcgcgaggcgctgatcgagcgcgaggttctctggggcatcgcgccccatatcatccgccccctgcgtttcgttttgccgcaccatgccggcctgcgtccggcctggctgctgcgcctcggcctcttcctctatgaccacatcggcggccgtcatttgctgccggccacgcgctcggtcgatcttcggcgcgacgaggtcggcaagccgctgatacccaatcgctacgcccgcgcgttcgaatattccgactgcttcgtcgatgacgcccggctcgtcgtgctcaacgcgcgcgatgccgccgacaagggcgccgagatccgcacgcgcacccgcgccaccgagatacgccagtccgacgggttgtggactgtcggcatggtcaacacgctgaccggtgagcgctcgcagatccaggcgcgcgcgctggtcaatgccggcggtccctgggttgaggacgtgctcggccgcggcgccggcgtcaacgccaaggcaaaagtccgcctggtgcagggctcacatatcgtcgtgagaaaactctacgaccacgaccgcgcctacatgttccagaacgccgacggccgcatcattttcgtcatcccgtatcaggacgacttcacgctgatcggcacgaccgaccgcgactatgacggcgatccggccaaggtgaaggcaacggccgaggagatccagtatctctgcgccgcggcgagcgaatatctcgccaagccggtgaggccggaggacgtggtctggacctattccggcgtgcgtccgctctatgacgacggtgccagcgaagccaaggccgccacgcgtgactacgtgttcgagctcgacacgcccggcggcgtaccgctgctgtcgatctatggcggcaagatcacgacctatcgcaggctcgccgaggaggcgctggagcggctcgcgccctatctccgcagcgcgaaagcgcgggagggctggaccggaaaatggccgttgcccggcggcgacatgaacgtgtccgatatcgacgggctgatcgccgagctccagcgcggctatccgttcctcggccacgagcatgcgcgacgtcttgcccgcgcctatggcacacgggcgatcaagctgctcggcgatgcgaaatcggccgccgatctcggcctggccttcggtgcgacactgaccgagcgcgaggtccgctacctcatggccaatgaatgggccgtcaccgccgaggacgtggtctggcgccggtccaagctcggcctgcgactatctgccgacgagattgcggcgcttgacgactgggtcaggacccacgccgtgcagcaaagtcccctgctggaagcaggaggacgctcatgacggtgacactcgatcacgtgacccggaccgtcgagggtgtcccgcatatccgcgacgtctcgctgacgctcgagagcggaaccctcaacgtgctgctcggcccgacattgtcgggcaagacctcgatcatgcggctgctcgcaggcctcgacaagccgaccacgggcaaggtggtggtcaacggcaaggacgtcaccggtgcggacgtgcgccagcgttcggtcgccatggtctatcagcagttcatcaactacccctcgctgacggtctacgagaacatcgcctcgcccctgcgcgtgcagcgcaagccgcgcgatgagatcgaggcgcgcgtcgccgaggcggccaagctgctgcggctcgaaccgttcctgaggcgcacgccgctccagctttccggcggccagcagcagcgcaccgcgatcgcgcgtgcgctggtcaagggcgccgacctcgtgctgctcgatgagccgctcgccaatctcgactacaagctgcgcgaagagctgcgcgccgaattgccgcgcatcttcgaggcctccggcgcgatcttcgtctatgccaccaccgagccgaccgaagcacttctgctcggcggcaacacggtctgcatgtgggagggccaggcgctgcagatcggcgagacgacaaacgtgtaccgccgtccacagaccttgcgcgtcgcgcaggtgttctccgatccgccgctcaacctcgtcggcatcgagaagaagaacgggcaggtcgcctatgcaggcggcacggcttcttcgccggcctcaggtctttacgcgggcctcgccgatggcgcctatcgcgtgggcttccgcgcccaccagctcgggctcgccaatggccagaccgaccgccacgccttccacgccacggtgacggtgaccgagatcaccggttcggagagcttcgtgcacttgacccgcgacggatcgaactgggtggcggtgctgcacggcgtgcacgagttcgagcccggccagacgctcgatgccgtgctcgatcccaatgatgtttttgtcttcgatgcggccgaccgtctggtcgccgctccaggctcgtaaggggaaggtgcgccatggcccgcattgacctcgtcgatctcgcgcactcctacggcggtaatgatgccgcgccggaaagctttgcgctcaagcccgttaccatgacctggcgccagggcggcgcctacgcgctgctcggcccgagcggctgcggcaagaccacgctgctcaacgtcatctccggcatcatcacgccatcgcgcgggaagatcctgttcgacggcgtggacatcacgccgctgtcaacccagaagcgcaacatcgcccaggtgttccagtttccggtgatctacgacaccatgacggtcggccagaacctggcgtttccgctgaagaaccgcggcgtgccgaaggccgagatcgacaagcgcgtcgccgagatcggccgcctgctcgacctcgaaccctacctccatcgcaaggcgacgcggctcacggccgatgccaagcagaagatctcgctcggccgcggcctggtccgctccgacgtcgccgccgtgctgttcgacgagccgctgactgtgatcgatcccgagctgaaatggcagctccgctccaagctgaaggcgctgcatcgcgagctcgacctcacgatgatctacgtcacgcacgaccagaccgaggcgctgaccttcgccgataccgtcgtggtcatgcatgacggccgcgtcgtgcagagcggcacgccggccgagctgttcgacaagccggctcacaccttcgtcggctacttcatcggctcgcccggcatgaacatcctgccggcgcaggtgaggggacgcgaggcgcgtatcggcggccacgtcatcgcgctcaaccgcgcctacgacaatctgcctgcgggcgccaaaatcgagatcggggtccgtcccgaattcgtcgaggccgtcgcgccggcgccgggcctgctcacggcgaagatcgagcgcatcgacgatctcggccgcatccgtttcgctcggacgcgtctgggcgacgccaaactggcggcgcgggcccctagcggcttcaccagcgcggacggcacggccgggctgaaactcgatccgtcgcacgttcacgtctatgccgacagccttctggtggagggagccgcctgatggacaagaccgtcaaccaaaaggcctggttcctggtgctgccggtgttcctggtcgtcgccttctcggcggtgctgccgctgatgacggtggtgaactattcgatgcaagacaccttcgggaacaaccagttcttctggaacggcgtcggctggttcaaggagctgctcgatccctcgaccgatctcggcggccgcttcctggcttcgctcgggcgcaacctgttcttctcgcttgtgatcctcgcaatcgaggtgccgctcggcatcgtcgtcgcgctgtcgatgccgcgcgagggctggaccgtcgcggcctgcctcgtgatcctggcgctgccgctgctgattccgtggaacgtggtcggcacgatctggcagatcttcggccggccggacatcggcctgctgggctatgccctcaacgccattggtctcgactacaattacgtctccaacgacgtcgacgcctgggtcaccgtcatcgtgatggacgtctggcactggaccagcctcgttgcgctgctgtgttacgccggcctgaagtcgattcccgaagcctattaccaggccgcccagatcgatggcgcttcgcgctgggccgtgttcaaggcgatccagctgccgaaaatgaaccgcgtgctcctgatcgcggtgctgctgcgcttcatggacagcttcatgatctacaccgagccgttcgtcgtcaccggcggcgggccgggcaactccaccaccttcgtgtcgatcgagctggtcaagatcgcgctcggccagttcgacctcggcaaggccgcggcgctgtcgctggtctacaacctcatcatcctgatcgtctgctggatcttctacaccgtgatgaccaatgccggcgccgagcgcgccgtgaaggaaggagccgcgtgatgcattcgatccccggccgccgcctcatcatggggctattcctggttttcctgctgctgccgatctactggctcgtcaacatgagcttcaagaccaacagcgagatcgtctcgacgatgacgctgtggccgcacaccccgacgctccagcactacaagcgcatcttcacggacgagagctggtattccggctacatcaactcgctgacatatgtggtcctcaacaccatcatctcgatctcggtggcgttgccggcggcttacgccttctcgcgctatcgcttcctcggcgacaagcacctgttcttctggctcctgtcgaaccgcatggcgccggcggcggtctacgcattgccgttcttcaacctctattcggcgatcggcctgttcgatacgccctgggccgtcgcgctcgcgcactgcatcttcaacgtcccgctggcggtgtggatcctggaaggcttcgtctccggcgtgccgcgcgaaatcgacgagaccgccttcctcgacggctattcctttccgcgcttcttcatcaagatcctggtgccgctgatcgcgagcgggatcggcgtcgccgccttcttctgcttcatgttctcctgggtcgagctcttgctcgcgcgcacgctgacctcggtgcatgcaaagccgatcgcagcgatcatgacgcgcaccgtgtcggcggccggcatggactggggcctgctcgcggccgccggcgtgctcaccatcatcccgggtgcgctggtgatctggttcgtccgcaactacatcgcgcgcggcttcgcgctcggtcgcgtctgagggggcatcaatggaatccatcgcatggatggcctggacgctgccgaccgcgatcttcttcgccgcgctcgcctgcacgctcgccgtgatgacctggctcgcagcggtctatcccgaggccgagcgggtcggcgtgctgcgcatcccgaccacgcgcggcgatcgcctgttcatctcgctgatcgcggccgccgtcatccacctggtgtggatcggcctcgtcggcaccgaccccatcgccacgctcccgatcggcgaggagggcttggaaatctcgagcctgtggctcgcaagtggaatttcgctgctgacggccgtgctcattttccgcacggtctgaagctcgcgaagggacggccagatccgggcgcaatccgggtctgtataaaagtttgtcgctgcaacggaggaacaacatgcgacagtttaggagaaggaaaggtccattgaccaagagcagttttctgaccatgtcgagcgctgccgcgattgttgcggtttcgttcgccctctcggctccggtgcgcgccgccgacgaggccacgatccagaagtggatcgcggaattccagccctcgactctgtcgaaggaagaccagaagaaggagctggagtggttcgccaaggccgccgagcccttcaaggggatggagatcaacgtcgtctcggagaccatcaccacccacgaatacgaggcgcagaccctcgccaaggcgttctcggagctgaccggcatcaagctcaagcatgacctcatccaggaaggtgacgtcgtcgagaagctgcagacgcagatgcagtcgggcaagaacgtctatgacggttggatcaacgattccgacctgatcggcacccacttccgctacggccagaccatcgcgctgtcggattacatgaccggcgagggcaaggacgtcaccaatccgatgctcgacgtcaacgacttcatcggcaagtcgttcggcacgggtccggacggcaagctctatcagctgccggaccagcagttcgccaacctatactggttccgctacgactggttcaccaacccagactacaaggccaagttcaaggccaagtatggctacgagctcggcgtgcccgtgaactggtccgcctatgaagatatcgccgagttcttcaccaacgacatcaaggagatcaacggcgtcaaggtctacggccatatggactatggcaagaaggacccctcgctgggctggcgtttcaccgacgcatggctgtcgatggccggcaacggcgacaagggtatcccgaacggcctgccggtcgacgaatggggcatccgcatggaaggctgtcgtccggtcggctcctccgtcgagcgcggcggcgacaccaacgggccggcggcggtctactcgatcaccaaatacctcgattggatgaaaaagtacgcgcctccgcaggcccagggcatgaccttctccgagtccggtccggtgccggcgcagggcaacatcgcccagcagatgttctggtacaccgccttcaccgccgacatggtgaagccgggcatcgccgtgatgaacgccgacggtacgccgaaatggcgtatggctccctcgccgcacggcgcttactggaaggaaggcatgaaactcggctaccaggacgcgggctcgctcacgctcctgaagtccactccgccggatcgccgcaaggcggcatggctgtatctccagttcatcgtctccaagtcggtgtcgctgaagaagagccatgtcggtctcaccttcgtccgtgaatccgacatctgggacaagtcgttcaccgaacgtgcgccgaagctcggcggcctggtcgagttctaccgctcgcctgcccgcgtgcagtggaccccgaccggcaacaacgtgccggactatccaaagctcgcccagctctggtggcagaacatcggcgatgcgtcgtccggtgcgaagacgccgcagcaggcgatggatgcgctggccgctgcccaggactccgtgatggagcgtctggagaagtccggcgtgcagggcgcctgcggtccgaagctgcacaagaaggagaagcccgagtactggttcgcgaaggccgagaaggacggcaccatcgcgccccagcgcaagctcgccaacgagaagccgaagggcgagacggtcgattacgacacgctgatcaagtcgtggccggcgcagcctccgaagcgcgccgaagcgaagtgatgtcgtagatgtcgtggccggagctgacccggccatccatccaaacacgaaaggccgggagcgatcccggccttttggttttgtctttgcctctcccatcaaccggagagagggataagacatcactccgccggttcggccgccagcgtcggatagtcggtataacccttggcgccgccgccgtagaacgtggtcttgtcccattcgttcagaggcgcgccctgcttcagccgctcgacgagatcggggttggagatgaacggcttgccgaaggcgatgaggtcggccgcgttagcgtccaggatcttggtggcgagatcgaaatcatagccgttgttggcgacgtaggcgcccgagaagcgcttgcgcaaggatgcataatcgaacggcgcgaagtcgcgcgggccgccggtggcgccttcgacgacgtggagatagaccagcttcagcgcgctgaggccgtcgacaatgtgctcgaacagcggctgcgggttgctgtcggaaatgtcgttggccggcgtcacgggcgagatgcggatgccggtgcggtcggcgccggcctcggcggcgacggccttggacacttcgagcatcagacgcgcgcggttctcgatcgagccgccataggcatccgtgcgcttgttggcgccgtccttggcgaactggtcgagcagatagccgttggcgccgtggatctcgacgccgtcgaagccggcctccagcgcgttcttcgtggcgcgcttgaagtcgtcgatgatccctggaatctcggaaagctcgagcgcgcgtggttcggagacatcggcaaagccgccgttcacaaacgtcttgcccttggcgcggattgcgctcggtgcaaccggggctgctccattggcttggagatcgacatgcgagatgcggccgacatgccagagctggatgaagatcttgccgccgcgtccatgcaccttgtcggtgaccttgcgccagccggcgacctggtccttgctgtagatgccgggcgtgtcctggtagccctggccctgctgcgagacctggcttgcttctgtgatcaggagacccgcggaggcgcgctggccataataatcggccgcgagcgggccgggcacgaaggtgcctggtacggcgcggttgcgcgtcagcggcgccatcaccaggcgattggccagcgtgatcgggccgagcttgtaggtttcgaacaatttggtcgggcggctcatgggagatgcttccgggcaatgagaggtcacgaacacttgtgcatcgtgactgcgggcgcaagggcggagccatacgcagcgcgcaggcatgctacgcggcagggccgcgtagcatgattcatgcgcaattccggccgctgcagcagagtttcgctacgcggccgtgcgtttcggcaaatcagttcgcgcccatgaaatcgcgcttgccgatctcgacgccgttatggcgcaaaatgccgtgggcagtcgcggcgtggaaatagaagttcggcagcgagaacgaactcaggaattgctggcccttcatggtggtggtcttgttggggccggacgggaaggtgacgtctctggcttcagccccttcgaactgctcgggcttgaacgacttcacatagtcgatggtcttggccaggcgttgcttcagctccgcgaaggtcgtctcggtatcgagggtcgagggcacctcgctgtgcgtgagccgggcgcagcccttggcggcgaaatcgctgacgagctggacctgtctcgacagcggcagcatgtccgggaagaggcgtgcaccgagcaagacgccggggtcgatcttcttggccgcgcaatgcgcctcggctttggtgagcagcccggtcacgctgttcagcatttgcaagtacgcggggacgacggcgtcgtagaaggacatgtgatgctcgcttcaatggtgggaaatctcaggagaaaacctgagcccctcacatgggaacctcatggaaaaatgcaatcgcggaaagaggccttctgcgatacgaagattccactctgtcacccttcgcgatccagtactccgagacggtcgtgattggagccgacaggctgcggcgtactggatggctcccaatgcgcaattgcgcacagcgacgggaaatgaccacggatggattgttcagcggatagtcgccgccggctgcgcctgcgccgtgctgccgcgcatgcgggcgagcaactcggcggtcggccaggaatcggcgggcaggccgaacttgatctgcatcgccttcaccgccgtgcggctctgctgacctagaatgccgtcgaccttgccgacattgtgtccggcgcgcaccaggagctgctgcaattccttgatctcgctgaacggcagctgcgccaccggctgcgccggcttgcgcatcggcgcggcaccggcaatgcgcgaggcgagatagcccgccgtggtcgagtagatcagcgagttgttccactcggtataggccgcgaaattcgcataggccaggaaggcgggaccatttcgtcccatcggcagcagcacggaggccgcgagattgtcgttcggcaggggccgcccgtcgggataggtgacgcccagctgcgcccatgtcgagcgcggctcgcgcactgtcagatcggtcttctcccacggcagggtcggcggcccccttatctcttccagccagggttcgccgcggcgccacttcaagccattggcaatgtagttcgcggtggatccgatcacatcggctggcgaccgcaacaggtcgcgccgcccgtcgccgtcatagtcgacagcgtagttcacgtagtgcacgggcaggaactgcgtctgcccgagctcgccggcccaggagccgatcatctcgtcgggatgcagatcgccgcggtcgatgatcttcagcgcggcgatggtctcgcccacgaacatctccgaacggcggcaatcataggcgagcgataccagcgatttcagcgtcggcagattgcccatgttggcgccgaaatcgctctccaggccccagaaggctgcgatcaccgccggcggcacgccatattccttctcggcgcgcgcgaacgcggcggcgtattgcttgatgtgctgctgcccgttctgcatgcggtagggcgcggccatgcggccggcaaattcggtgaagagctggccgaacacgcgttggccgcggtcgcgattgacgatgccctggtcgtagacgagatacggcgaagcctccgcgattgtccgctgcgacacgccggcggccacggcctgttgcttcacgtcggccaggaagcggtcgaagctcgccccgttgtggcatgaggcggcacggggcagggccgcggtgggtctgggcgcggcagtcttggcaggcggagcgagctgggcggaggcgggagcggagagggcgaaaagagcggtggccgcgatcgcaaatcgggtcaggagcatgaggtttccgctgagggagggagacgctgggagtcttgctgaagcttaatggagcggtggcgctcagaccagtgccgcggctccgcgacgcacccggaaaccttgaatcccggccggggtcatccctacctgatgtttgccggcctgcaggcgcttccagcggccgcggccggctccaggagacggccatgaactattttcgtaccgcaatgctgctcgcaggccttaccgccctgttcatgggcgtcggctacctgatcggcggcgcctccggcgccatgatcgcgctcgtcgttgccgccgcgaccaatctcttcacctactggaactccgaccgcatggtgctgtcgatgtacggcgcccatgaggtcgaccgttcgaccgcaccggagctggtcgggctcgtcgcggagcttgcgggccgcgccggcttgccgatgccgcgcgtgttcgtgatggacgaggtccagcccaacgcgttcgcgaccggccgtaaccccgagaacgccgcagtcgccgtcaccaccggcctgatgaaccagctgagccgcgaggagcttgccggggtgatcgcgcacgagctcgcccacatcaagaaccacgacacgctgctgatgacgatcaccgcgaccatcgcgggcgcgatctccatgctcgcgcagttcgggatgttcttcggcggcaaccgcgagaacaacaatggtctcggcatcgtcggctcgatcctgatgatgatcctcgctccgctcggcgccatgctggtgcagatggcgatcagccgcacccgcgaatatgccgcggataatctcggtgcgcgcatcgtgggacagccgatgtggctggcttccgcgctggtgaggatcgagggcgcggcacatcaggtgccgaactacgaggcggagcgaaatccagcgaccgcgcacatgttcatcatcaatccgctgtcgggccatggtgtggacaaccttttcgccacccatccttcgacgcagaaccgtgttgccgccctccagcaactcgcggccgagctcggcgcgcgggcgatgccatcggtcggcgccaacgagaactatccgccgcgcagcccttggggccgctcctcctcgcgcggtccttcgcgaggtccttggggctgacggaaccggcaagcatttgtgcccggctttgtgacctggcgcacacagggtggtcacggcaggtgttaacaccctgccgtgaccaattcttcgaaaggggatgcgcggccggacctctgccggtcgccgtcgaagatgacccgagctgccgtactatttctgatcgttctttgcgtgctcgccggcctgtccacgcacatggtcgtcaattgcggcgacgaggacgatcccgacatctgctcggccgtgatcggtttctcgccgctccgcggctcgctgattgccttcgcctatgaggggcgtggacggatcgcgctgcgccacggcgacttcaagcgtgcgattgccgatttcgacgaagcgatccatctcaatccgaaccgcggctcgctctatcgcgaccgggcgctggcgcgccgtctgaacggcgatctggagcttgcgattgcagactacgacgaggcgatcgcgcacgatcccaagcgcgccgcaccctatcaccagcgcggtctcgcgctcgccgccatgggcgacctcgaccgcgccatcctgagctacagcaccgctgtccgcctcgatccttccgatgcgcaggcccgtctcgaccggggccttgcgttcctcgcccgcggccaggccgatgatgcccgcgccgacttcgaagccgcgctggcgctgcccgcgggcaaagagagcggcatgcgcgatcttgcgcgcgccaagctcgccgagctggccagcgccgagccgacgcaggttgccacgccacgacggtgagggagttgtcgctggaggctttccccttcgccggccggagaggacggcctcttgattcgcctacttcgccttcttggctttcgccttcgccttggcagccttcttcgccggcttgtcttccttggccttcttctctgcctttaccgcaaccggcgcgctggcagccaggcgcatcgaccgcgcgtagctgtcggcgacgttgtcggcggacatctggaggcgcttggcggcggtggtggcctgctccatcgtggccttggccatcatcttgaagcgttcgccggtctccttgcccttggccttggccgcaaggccgttcaagcgatcccgccgctccttggcgcgggtcatcaggcccgtatgcagctgtctggccagttgccggatcacgacatccaggtcggcgtccgccatgttctctcatccccttcgaaaaacgctgttgatgcggcgcgactatgcagatcggggtccgccttggcaattgctgccatcccgtcatccgcagcttccagcttgcgaaacaaaaaagccgcgctgcttgcgcggctctgatgcggtctggcgcagggagggcgccttcggcctcatttcagcgaggccaccggtccgttcgacgctgccggggccgggtcgaagccgaatacgccgaccaggtatttgtagtagtccggcatcttctccttgagcgcctcgcgcgatttcggatcgtggaattcgctctttccggccaggaagatgctcgcggtcacggcgaagaactccatgggattcttcagcgcataggattccttgggcagcatgtccttggacttggccagcgcgtaataggctatcacgcccttgttggcgtagccgtccggcaggaggcgtgcgtgataggcgtggaggagctcgtgcagcagcacggcctccttctcgtaacgcatcatgtccggccgcagcatgatcacgccaaggcccgaatccacagcgaggtcgacggcgttcggattggtccagcgctgcttgtcgtggtcccacaccgttagcgtccgcggcacgcggcgctcgacgttgggagcgacgcggccgtagcaggccgtcgcggcaccttcgtcgaggcaggcgagctcgctcgcgatgatgggcacggtgcggaagaagcgcaggacgcgcggcgacaggccggcggattccacgacgtcgatctgctgcttcagattgtcggtgagcttgtcgacatccttgcggtcggagttctccgacaggtcgaacatgtagccgcggtagctctggaagccgggcggcaacgtctgcactgcgtcagcatccagcgacccggcatgagacggaccggcgaagaacgcgccgacgatggttgcggtcagcagcaacgcaatgcgcatgagtgagccccctgatgtcactttcaccggcagaataggccgccgtcgtttgcgaaacgtgagtggggcgagactaaggcatcgatgttgaagcgtgattaatcccacgtggcagatcgtgcgcgaggattagtgccgagttaaccacgacgactgccttcgccggagaggcgcacttgcgcagcggccgcggatccccgcggccgttctgcccccagccggctcaatagtcgtagcctggacgaccgggataatgcgcgcgattgcaggcccgtcgtccccggtcaaggccggctgcgcttttggcgagcgcgctgacatatttcaggcaacgcacgtagttttcattgccgagccagtcgaaactgccggcggtcgccggtttgagctgcgcggagccggcaagcgccacgacggcgatcaaggcggagcaggcaaaggttgtgatgatcttcatggtccgtattcccctccggccgcccgatgcagccggtgtggccgcaaccatgcccaaacccgactgacagaactgtgctggccgtcacgcatggcatggcctgccactgctgcggcggacgcggcgcgcgtgttcgtccagttccgggcgcgccgcgatcctcacagctctcgtgcgttcgaaaaggcgaagctcgagacccgccgcgtcgtctcgtccaggatcagcgtgcgcgtgatcggcggttcggcgcgctgggcgcagttttcgcgctcgcagaggcggcagttgacgccgatcggcgtgccctcggccttctccaggtccatgccggtggcataggtcaggcgtgcggcgtggcggatctcgcagccgaggccgatggcgaaccggggctgcggcagcgggtgcggcgcaacgggacggcgcaccatctgcgcgatcgagaagtagcgcgtgccgtcggggagctcgatcacctgcttgagcaggcggtccggggtgtcgaaggtcgagtgcacgttccagagcggacaggtgccgccgaatttcgagaacgggaaggtgccggaggagaagcgcttggagacgttgcccgcattgtcgacgcgcaacaggaagaacggaatgccgcgcgcgttcggccgctgcagcgtggtgaggcggtggcagacctgctcgaagccggaattgaagcgctgcgccagcacgtggatgtcgtaattgagcgcttcggcagcggcgagaaaggcgggatagggcatcatcaccgccgccgcaaagtagttgccgagcgtgatgcggaacaggcgacgcggcgcatcgtcgagtggacccgcgcggccgatgatggtctccagggcttgcgcgcattcgcctaaccccagctggaaggcgagctggaacgcgcggccgggcgggtcgaccagctccgagatcagaagctggcggcggtggcggtcgaaacgccgcagcgtttcgcgcatcacgtccacgggcatgatgcgggtctggatcgaatgtttctcgcgcaggcgcgcggccagcgccgcgtagagcccctccgccggcacgttcagttcatcgcgtaggttctccgcggcctgctccagctccggaaagtagttgcggttggcctcgatcagctcgcgcacacgctcgaccggattggcctcgtagcgcgtgccgacgtcgcggtcggccatctgcgccgccgccagcgtctcgccctggcgcgcctcggtataggccgcatagagccgttgcagcgcatgggtgaccccggggcagagctcggcgaggtcgcgcagctcctgcttgggaacgtcgatctggcggaacaggggatccgagaagatctcgttgagctcggcgaagaaccgatcctcgtcggcggtggcgaggtcgcgcagatcgaggtcgtagctctcggccagccgcagcagaatttgcgcggtcacggggcgctggttgcgctcgatcaggttgacatagctgggcgagatcccgagtccctcggcgatctgggtctgggacagccccaattgctgccggatgcgtcggaagcgcgggccgacgaagagcttcttgccggaagcggcgggcattccacggatctcctgaattccacattaggtcagttcagctgacctaatcgttacaaggtttacaaaataacatctattacaggttcagatgttacatgacatcaccaataagaaacaagccatctatacgaagtttccgttttcgcgtttagcttctgacacgcatatcgcaatgcactgtcaagaatgtcgatggccatgccatcgtcagcgaaaggatcaggcacatgaactaccagccccgcggcatcagcaccctccagggcccgtcttcgtacctggacgaggtcaaggcggctcaggcgctcatcgagacccagccgacctggaacggggtgacggccgaggccgtcgcccgcatgcgcctgcagaaccgattcaagaccggcctcgacgtcgcccgctacaccgcggcggtgatgcgcgccgacatggccgcctatgacaacgaccccaccaagtacacgcagtcgcttggctgctggcacggcttcatcgcccagcagaagctgatctcggtcaagaagcacttcggcaagaccgaccgcacctacctctatctctccggctggatgatcgcggcgctgcgctccgagttcggtccgctgcccgaccagtcgatgcacgagaagacctcggtgccggcgctgatccaggagctctacaccttcctgcggcaggccgatgcgcgcgagctgaacgacatcttccgcctgctcgacaaggcgcgcaaggaaggcgacaagacgcgtgagaaggagctgatcgagaagatcgacaacttccagacccatgtcgtgcccgtcatcgccgacatcgacgcgggcttcggcaatgccgaggcgacctatctgcttgccaagaagatgatcgaagcaggcgcctgcgcgctgcagatcgagaaccaggtctcggacgagaagcagtgcggtcaccaggacggcaaggtcaccgtgccgcatgacgtcttcctcgcgaagatccgcgcctgccgccacgccttcctcgagctcggcgtcgaagacggcgtcgtcgtgacccgcaccgactcgctcggcgccggcctgacgcagcagatcgccgtcagccacaagcccggcgacatcggcgaccagtacaacagcttcctggattgcgaggaagtcacgccggagaacgcccgcaacggcgacgtcatcatcaaccgcaacggcaagatgatgcgtccgaagcggctgccctccaacctctaccagttccgtcccggcaccggtgcggaccgctgcgtgctcgattgcatcacctcgctccagaacggcgccgacctgctctggatcgagaccgagaagccgcatatcgagcagatcgccagcatggtcgaccgcatccgcaaggtggttccgaacgccaagctcgcctacaacaactcgccgtcgttcaactggacgctcaacttccgttggcaggtctacgacgcctggaaggaggcgggcaaggatgtcagcaagtacaaccgtgccgatctgatgaaggcggaatatgacgagacgccgctggcgcaggaggccgacgagcgcatccgcactttccaggcggattcggccaagcgtgccggcatcttccaccacctgatcacgttgccgacctaccacacggcggcgctgtcgacggacaacctggcacgcgagtatttcggcgagcagggcatgctcggctatgtcaagaacgtccagcgcgccgagatccgtcagggcatcgcctgcgtgaagcatcagaacatggccggctccgacatcggcgacgaccacaaggagtacttcgcgggcgaagcggccctcaaggcgggcggcgtccacaacacgatgaaccagttcggctaacgaaccacgctactctcgacaggagactgacaatgaccaaaggcagcaatttctgggtgatcggcggcgagttcggttcgatgaacttccacaagctcgtggaaggctcggcccaggtcaaaggtccgttcaagacccgcaaggaagccgaggactgctggcgcgaggtgtcggaagagagccgccacaaggccggcgtccgcttctcgatcgtggaagagccgcagcgcgccccggcagcctgatcgggcggctgccgagttcatctgagaagacgtccaaggaccgatggtcccatccaggccctgcctgggtgggatcgtctgtttttggcacaggtgaaagctctgtgggcgccgtaagcctctggaattgtgggcctttgcggagggtgtggttgctgataggttaatgacggaaagtcgaggacgaggccgacaatgtcagagcccgagaccagcgggattcccggccagccgcgcccggtgcggctgcgtgatgcgctgctgcgcgcgcggatcgaggctgctgaccggaccggcgtcgttgtcgatctcagggatgccgaggtggcgcggctcgagatcctcaacgatgcgctcgatcccctgttcgcgcaggtgcctgatcagatcgacctgttcgaccgcgggatcagccagggcgatacgccgagactctggatcgacgtcgtcgcccacatcgtgatggggcgcgacaagcggatgtaccgcttcgtccaggacactcgcttcggccgcatcgtgctcgccgaatcgcacgacaccgccgtgatcgtcgaggccgtcacggactacgtcgcgcgccgcatggtcgagcgcgaacgtgcgatggtggtcacgcccgcaccgcaagcaccggtcgccgagccgccgcgccgctcgcgcttctggccgttcgtgttcgggtttgtgctcggtgcggccgcgctgttcggcgtcgctctgcttgcggtcttgcggaactggtgaggcgtcctccgccgtccttccgcggcgcgcgaggcgcgagcccgcaatccatccatcagcacgtattgccgcccgatggattccgggctcatgctccgcataccgcggaatgacggtgaactagatcaaccttacatgcttgatctgcccgacctgaaaccccgccccgaggctccgcaccgtctgctcgcagcgccagccggcattgtccttctcgatggttaacagattgtacgccgccgccggatagcgtccgtgtgcgagcgcggaagccgagggcacgccgagcacgggaatattgccgttggggccttcgacccatatcgtcgaatgaacgtggtcatgcccgtgcaggaccagctcgacgccgtggcgcttcaacagcgccagcaattccggcgcgtccgtcatccgcttctggcgtgcgtcggatttcagcggatgatgcaccagcagcacgcggaagacgtcctctttcgcgagccgttcgagcacctctgcgagagcggcgagctgatcgcgccccagcgtacccgtcgccatcagcggcagggtcggcaccgccgtggacaggctgatcagcgccagcggaccgcgccggcgtacggccggaaaagccgcagcgccaggcgcatctgcggcgatgtaggccaggaacgtctcgccgaagcgatgacgcgtcgcgctgacataggcgtcgtgattgccgggaatcgcggtcacgcggtccggcgggccgacgctttcgagccaggccagggccggcgcgaattccgcctccagcgccagattgacgaggtcgcccgtcactgcaatgtggtcgggcgcctgcgccttcatgtcggcgacgagcgcgtcgagaacctcgcggcgctggtatttgtggcggttgcgcgtccagttgacgtagccgagcgcgcgcttgcccgcgagctcgatcagccgcggcttcggcaagggcgctagatgcgggtcggagagatgggcgagcgtgaagggagccatggcgcgcgattgcctcgctattgctccgctgtaatggcaagctcgcaaggagcacgcaagcaaagcctgcaagggtccgtcgaggaaggctgatgggtgaacgtctgaaccgggtccgacggaaagccgagccgctgctgcggcgagtcttccacgcgtatttcctggtggtccgcggcatgacgctcggcgtccgtgccgtggtgctggatgccgacaaccgggtcttcctggtcaggcacagctacgtcagcggctggtacctgccgggcggcggcgtcgatttcggcgagaccatggaagaggcattgcgacgcgaactcaaggaggagggcgatatcgatcttaccggcgaggcggtcctgcatggcatcttcctcaacagccacgtctcccgccgcgaccacgtcgcggtctacgtggtcaggcagttcaggcaggatcgcctgcccgggcccaaccgcgagatcgtcgagtgcgggttcttcgacaacaccgcattgcccgaggggaccacgcccggcacgcgcctgcggcttgccgaagtgctcgatggccggcccccgattgcgacgtggcgctgagggtagcctgtgctagtaaccggctcgacgggtgccacgggaaaccggatgaagactgccaaactcgccttcggcctgatctgtcttgcgatcctcgccagcaacatcgccacgatgtctcgctggagtgaggcgcgcggggtctatgacgacatctgctatctccggcaggcgcacctattccagcgcgtaggtctcggtgggctcaacaccaatgccgccctggatgacgatcgctatttcgaaggcaagctgaagcagatcgcgttcgccgagtggcgggacccgatccgctggccgtgccacaacccgatgccgaacggcaagatcgtgatgcaatacccgccgggcaccggattcctgctggcgctgtttcccgaaggcaaccaggtggtgccgctctacatcgcggcgagcctgatcgtatgcggtcttgcgctagcgggcatcgccatggcgcgcacgctgtcttcggtcgccggtgcgggtctgttcggcgcgcttgccgtctatctcatgatcaatccggccaaggcgagctattccatcgcgccgacgatggcggtgtgcgccgtcgcaggctgtctgacggcgttgtggctgaccagggacaagcgcaacgtgctgctgattgcgctgattggcctgctgctaggcgcgtccgtcaatttcaggctgccgaatgcgctgctcgtggccggctacgtcatctatctcggcgttgcgttcctgcgggtgcggacgctgtcagccttcgcgcaggggctcggcttcggcctcgctgtcctcctcggcatggccccgaccctgatcgcgcaggcgatcaatgccggcagcccgctggccacgacctatggcagtgccgacgtggtcgcgccagccttcgatcttgccgtgctcggccagtatctgcgcgacatgcaattcgtgctgatcgtgctcgcgatcggctccacggcctggctgttgcgcgtagggaaggggagcgtacggcaggtggccctggtcgtcgccggcaatctcacggtcaacctcgtcttcttcctgagtcacccggtcttcacgccctattacatcgtgccgatcgcgatgctgtccctgtggagcgcctcgttcgcctggctgattcagccggggcaggcatcgcaggctgtgccgttcgggcgcgagccgacgggcctcggagcgacgtcgcgatgacctcaacgcaactccgcatcgccgtgctggtgccctgctacaacgaggaggcgacggttgcggccgtcgttgccggcttccgcaaggcgctgccatcggcggagatctacgtctacgacaacaactcgcgcgaccggaccgccgcggtcgcgcgcgaagccggcgcgatcgtgcgcagcgagggacggcagggcaagggccacgtcgtgcgccgcatgttcgcggacgtcgaggccgacgtctatgtgctggtcgacggcgatgccacctacgatgcgccgagcgcaccacgcatgatcgacaggctgctcgatgatcatctcgacatggtggtcggccttcgcatcgatcaggtccagtccgcctaccggttcggccaccgtgccggaaaccgcatgctgaccggattcctgtcctcgaccttcggtcacgccttcaaggacatcctgtccgggtaccgggtgttctcgcgccgcttcgtcaaatccttccccgtgctctccgatggtttcgaaatcgagactgagctcgcggtctatgcgctggaattgtcgctgccggtcgccgagctcgagacgccttactacgctcgtcctgaaggctcgttctcgaagctcaacacctggcgcgacggctttcgcatcctcggcaccatgctgaagctctaccgttcggagcggccgttgcgcttcttcacggcgatcggaatcctgctggccctggcctcggtgattctcgcaatccccatcgtgatcaccttcatcgaaaccggcctcgtcccgcgcctgccgactgccgtgctgtcgatgggcctgatgatcatggccctgctgtcggcatcgtcggggctcgtgctggacaccgtcacgcgcgggcggcgggagatgaagatgctcgcctacctgtcccaaccggcagcgaaaagcaactgagcgccctcgctggccgatggaccgcggtgcgttcaggtgctatcccgcaatcgacatgaacgatctctcactgaccatccttcccgaagccgccggagacgctcaggccatcgagcggctgcacgaacgtaccttcggtccgggccgcttcgtgctgagcgcctaccggattcgcgagcacgtcgatcatctgctcgaactctccttcaccgcccgcatcgcgaccctgctggtgggctccgtcaggcaattgccgatcctgatcggcgacacgcccgcactgctgctcgggccgctcaccgtcgagccgccgttccgcggccgcggggtcggtcgtctcctgatggagcgggccttgaacgacgccaggttgaaaggtcatcggctggtgctgctcgtcggtgacgagccttattacggccgtatcggattcaagcaggtcgaaaaaggccgcgtcaccatgccgggcccggtcgacgccgcccgcatcctggtcttcgagctcgtcgacggcgcctttgagggcgtgtcgggacgagtggggcctgactggagcaaggcgcggagataagagccttggcccagcgtgcgtctgccgcgcttcgtctccgctggagcgccaatttacggttcatggagcggccatggcaaagcaccgcatctacaccaccagcttcgcgagcgtgtatccgctttacattgcgaaggcggagaagaaaggacgcaccaaggcggaggtggatgagatcatctcctggttgaccggttacgatcggagccagctggaagcacaacttgccaagcggaccgatttcgaaaccttctttgctcaggccccgcgcgccaatcctgcgcgcaccctcatcaccggtgtggtttgcggcgtccgcgtcgagaccgtcgcagagccgacgatgcgtgagattcgctacctggacaagctgatcgacgaactggcgcgcggcaaggcgatggacaagatcctgcgggaggcctgatccgcatctgcggtcgcgttccgccgatgcgcagcaacgtgacgctgccggatggcttgcgaaggttcagcgcccctgcggagtgtattggttgagctcgtggatacccatctgctgctccaactgagcgacacgggcagccatcttctcgaagccatcctctccaaacaggtcgtgctcggtcttctcgaagtcctcggccatggcgtcgtattcatgggccgagaccagatccttcagcttcgggaagaggtctgtgtcctcacgggcggcgtgtggacggtacatggtgatgaacgactggatcgtgtcgaccagccgcgtacggtcggcgccgctgctcctgctggtcggtgccagcctgatgatggtctcggtcagcttccggcccgcctcgtgctggcgttccagggtatccaccagtgcgaccattttcccggcggtcctgaagcgcggaaagaggtgcttctcctccgtcttctcatggtagttgttgatgaagtcgcggatgatctcggctgaccgggtgatcagggcgggatcgaagtcctcgttcgacgcgtatttgcggacccccgcttcgtagaccagcaacactcgatcgagcacgccgtgctcgcgcatgagatcctcgggcggagtgacttccttgcccgttttgcctgtgaccgcctccttcagtttctcgccgatgcccttctcttctgcgaaggcccgtcgggtgaaaacggctggggccgcgacggcggccagcgtgccaaacagaaataggcggcgctttgctggtgtgacggcttccatgatggacgctcccgtgaatggaaacgccgtggatgtctctgtctgaaacggggcgatacacgtccgcgtgccgacgtggtccttcttccctggacatcgtgggcgctttccgcagcaacggccggtggaaaggctcgttccaattgcgacagatggaactggtggcgaccggtgaccgtccccggctgtttcagttgagccgcgctgttcttgtgcggatgagcgacgcaaggcttgttgcggcgcaacggtgctccggtatctctatgcatcgccaggccggatcgctccaagctgcgaggcagactccagcggctgatggaggcatggcggcttcgaggcgctcaggagcgcacatggaagccggcaaggcccatccaccatgtggcccgccggtttgctgcttgaggctagaacttgaaattcgcgaacgccctgactccgatgcctggcaacagcacctggtccttgttgaaggagacggcattgcggatgttctcgttcagtaggttgttgccgaccaagcccacatgcatctcgcgcgcgccgaaccagctttgatggagcttcgtcctgtagctgacctcggcccttagcaggttgtagccgggcgtcggcgtctccgcgataggtgcgatgtcgttttgcgcgaacgcgtgcagcaggttgatccgggcaaaccagtcggcgtcgcgatagtacacaccaccgcccagccgctggggcggaatgcgtggcacgttggtgccgtcgtcgaaggtcgcgcgcacgatgtcgtattgaccctcgatgccccagatcccgttccagaccggcatcacgtcgtactggaactggaattcgccgccacgaaatgtcgcgtcgcgctgcgaatagatcgcctgattcagttcgagccccgcgccaagctggcaaacgccgtcctcgcacgtgttgccggtcaggcgccggtagataaatccgttgaacttggtgtagtagccggtgatttcgaagcgaagcggccctaccgcccgtcgcagtcccgcctcgaccgacttggccgtctcgatgccgagattgggattgcctatgtcgaatgtgatggtggcatcgtggccgccgcgcgaaaacaattccgccggtttcggcgcacgctcgacatattgaccggtgatgctcgcgaccagatcccaaggaaggtcgtggatcaagccgatgctcccgctcacgggcgtgaagttgcggttgaccgccgttgcggggccgatcgcggccggatcgacggcgaggtcgaacacatcggggacgaaggctggcgccgtgccgctcaaccttgcgctctcgacgcgcccggcgatctgagccttggcagcttcgctgaacttgaactcgttgaagatgtacccggcgacctttgtgttcttgttcggatcgaacagtccgttgatcgggctgcccggatcgtctggactcggcgcggtcagcttctggtgcgacgcctgaacgcccacggcagtggtcagcgcagcaaagcggacgtcgaacggcgcaagctgcacctcgacgcggccttcctgttccttgctggtgaaggtttgtctcacgccgagggaggtgagatctgcagcgtcggcgagcccgacctcatcgtgtttatagtcggtggcccccgcccagaaccgtatcgcatcgatcgccgcagcgtccggccgatattcaccttttgtcgtgaattttgtttgccgtccgtcgatccgcgtgaggaactcgctgccctcgataccaggaatatgatagagcgcgttgtgctgcgtgatcgccgcgccaacatagccgccatcgaagatgtaggagccgccgacagacccgccgtagccctgcgatgccgaattcggctggcgtccgttgaacggcagcgtcgggtcggtcaagaacgggtagctcgggatgttgtaatcgccggccttgcggccaaaggcatcggcatggacggcaaagttaccgccgccggcgtcgagcagcatggcaccttcgaccccgcgatcgacagacgtcaccgccgtccgtgtttccgcggtgatgcagcccggtgatcccatgttcgccagcggcgccttggtcgggagtccgtaagtcggaaagggtgccgtgcaggacggcaaggcatccggaattcgattgttcgttgcgctgaccacgccgccgatcgcggtggagccgtagcgcagcgtcgccggtccgcggatgacctcgacctggttggttgccagcggatcaatcggcacgaagtgatcctcgccgagatcggacgcgccattgctgcctgttccgttctcgacgatgccgacacggttggtgtcgaggccgcgaatgatcgggcggctggatgcgccgcgtgcgatttcggagccggtgatgccgggcttcgagaacaggagatcgccgagcgtgccgccgccgttgcgccgaatttcctcgttcggcaccacggtgacggtcgcgaactgatcggtcacgatcggcagcacgccttgctgaggtgcggcaggcaccggggctgccggcgctggttcagccgcttgctcgcggctgcgcacccgcgcggtccgcgtgccgccgcgccctgcgttgcgggagggcaccaccgctctgcgcacgatcgggctcggcgccgtgacggtcacggccgggatctccgtcgatgatttgtcctgggccggatcttgagcgaagaccggcgtggcggcggcaccgagcaggagcaggcttgctccgccgagacgctgggcgcgtcgcaattgaaatgacatggtcctgattccagtcaggcgcgatccgcatgtgattgttgatcggaggcggcctgccgtcggggcgcgacggaattcgacttcaactcttcccgggcattcgccgatgcgcggcgacgctgggcgtgatcaagcgctggaagtcaggaggcgggaggggcgcggggctggaatgccgtgccggccgacctcagatggatgaattcggcgtccgtggtgcggcggagcagatcgatggcctgcggtagcagcagcacgggcggcgttgacgatacgacagcaccggccatcgcgatgatggcgcagataccgcaattgtcctcgccgtggtggtcgcggtcgggccccgagggcgattgcttctggaccgcgacgctgtcgatggacgcaaggctcttgccgctgtccttgccgccctcggcctgatgcagcgaggattgagcgaggggcgcggcctgcgcgaaccaatggctgtggccgaacgtcagcgcgagctgcaccagcatcgcgaacaacgcgagccgggcgccgtgcctgatattcgaccggaaccacttcatctggaaacgccacccctacatcggagcgtcgatcccaggacgctgcgatgttatagtgtaacatcgccgcatcggtccgccgatgtcaacggcagggggatcagcgcgtgcagaccgaggagccgatgtgtcgtttgggcaactagcgcccctcgcggacccaggtggcggcgaaagcgccgagcagcagcaacaggccgatcaggccggagaagatcggcaacacgccgacgcccttcacgacactggcgtcgcgcatccgcacccccatccagccgtcgccggcaaagacgctggccgaacgcaccggcaggatacgcggcagctcgacgctggagccgtcggccacgcgcacggcgttgccgccggttgcctgcgccagcggtctcaaggtatcgaccgtggaggtgacttccgaaaactccttcggattggtcgggccgacattgatcagcgctttcagcgtgccgtcggtcgcctgccaaaggccgagctcgttcgccggcaggctggcgcgccactcgccgggatcgccgggcgagagcgtcaaatcctgcgacacgccagacggtgaggtcacgctcaccggctggacgctgtccgccatggtctggcgcaccacgaccaagtccttgccctgcacctgcaggcgcagcgcctcctcgtccagatcaggctgcttcatcagccagtgcgatgtccgcctgagcaggtcgagatgcgggccgccgccttcatagccgcgcgcccacagccagatgtggtcggacagcaggagcgcgacgcgtccctccccgaagcgcgacaggaacagcagcggcttgccgtccacgccggtcatgacaggcggattgaccgcgttgcgcgtgtcgaccgtgcggaagaatcgactccagcgcggcggctcggatcccgagccctccagcccgcgcgtgacgggatggcgtttgccgacgtcggacagatgcgcatagaacggcttttcggtcacgccgaccggctctgccggcagcaccgaatccagcggcgtgcgccagatgctggtgttggaggcgtagtcgggaccggcggacaccagcacggcgccgccgccgcgcacatagcgcgcgatgttgtcgaaataggcgatcggcagcacgccctggcgggcgtagcggtcgaagatgatcagctggaattcgttgatcttctgctggaacaattcgcgggtcggaaacgcgatcagcgacaattcgttgatcggcgtgccgtcctgcttctccggcggccgcaaaatggtgaagtgcacgaggtcgacgctggcgtcggatttcaagagattgcgccaggtgcgctcgcccgaatgcggctcgccggagaccagcagcacgcgcagcttgtcgcgcacgccgtcgatggcgacgacggcgcggttgttcaccggcgtcaattctcgctccagcggcgaagcctcgatctcgacgatgttcgggccggcgtgcttgatgtcgacgtcgacgcttgcggcctggccacttgatagggtgcgctcgttgatgacctcgccgtcgcggcggatcgtgaccctggcgcgctcacccgagacgccctggtcgtcgaggcgataggagattgtctgggtctgcccgacgatgccgaagcgcggcgccgccgtgatcgcgatgcggcggtcgcgctcgtccttctggccggtgaccagcgcgtgcaccggcgcctggaagccgagcgcggtggcgttcgcgggaatgtcatggacgcggccgtcggtgatcaggaaggcgccggcgacacggtcgaccggcacgtccgacaaggccgaggcgagggcgccgaacagcttggtgccgtcggtctcgccgtcggcctggccggcatcgacgacgcggacctcgagtcccttgatcttcttcaggctgtcgaccagtccttcctgcgcagctgcggcctcgcggttgcggctgccgaaattctggctcgggctcttgtcgacgacgacggccgcgaccgaagtgaggggatcgcggtcctcgcgggtgaaggagggattggcgagcgccagcaggatcagcgcgagcgcagccacgcgcaccgcggcgccgcgcgcacgcgccgccagcagcacgatggcgatgacgacgatcgcggcgaacgcgagccacagaacgatggcgggaacaagcggcgtgaacgcgatgccgtaattcatgtcgatcctattgccccagccgttcgatcagcgccggagcgtgcacctggtcggccttgtagttgccggtcagcgtgtacatcacgatgttggcgccggcgcggtaggcgaattcgcgctggcggggatcatcgccggtcaccggcagcatggcctgcccgtcgggccgcaccgcccaggcgccggcaagatcgttcgaggtgatgatgatcggcgagacgccgtcgccgccgcgcgcaggccgctgcgcgctgtcctcgtcgtcgtcttcgcgcggcagcgtctcgacccaggtctggccggcggtgaagcggcccgggaagtcgcgcagcagatagaacgtcttggtcagcacgtgctcgcgcggcaccggctcgagcccgggcacgtcgagcgaggaaagaatgtcgcgcagcgtctgcatgcccggcgtttgcgacgcgccgttcgcgccaggcggtgcctcgatcgcgtcgcgggtatcgaacagcacggtgccgccctgcttcatgtaggcgtcgatcttgttgatggcgtcctgcggcggcttcggcgcgccaggcacgatcggccaatagatcagcgggaagaaggcgagttcgtcccgtgcaggatcgatgccgatgggatcgccggcctccagcgcggtgcgctgggcgaggaacagcgtgagcccgttcattcccgccttgacgatggaatcgacgtcggcattgcccgtcacgacataggcgagacgggtctgcgacactgccttcatcgcgaactcgtccgctgcgctgtcggcacgtgccgccgtcggcgcaaacgatatcaggcctgccagcgccagggcgagcacgatcgttgcgggcgcggcgcggcgcctcagcagcgcggcgaggccgccgccgagcagcgcgacgatgatggcgtcgatcaggaacagcgcaagcgccgtcgacagcagccagccgcgtaagtcgcgcggctccgcattggtgtaggtcgcgtgccgggcgcgcaggctcgcggtgttcaaagcggcgatgcggtcggcggcggcaagcgtgttcacggcgagcggtccttctgccggaccgtagaagccgggcggatgatcgggggtggcgcggtcgcgataatccgcgggcagcggctttgctgtcgccggcggcggaccgaaggcgccgaagccgtcgagaatgtgcagcggggccaccgtctcggcactcgcttcgccggcaaccccggcgccgggcttggacgtgtagccggacatgtcgacgacccgccgcagcatttcgacgaaggtgcccgacatcggaaggtccgaccagcgcatgtcggcgctgacatggaacaggctgacgaggcccttgccgcgatgctcgccggtcaccagcggcgtgccgtcttcgagcgaggcccagctcctggtggcgagaaccgcgtcgggctcggccagcacctgccggctcacggtgacgtccttcgggacggcgatgcctgcgaacgggccctcgcccgcgaaagaggcgagatgctgcggcttctcccaggtcaggctgccgccgagcgtgcggccgcccttgcgcagcttgaccggcacgagatcgtcttcggcctgcgccagccgggggcctgcgaaccgcaccaggatgccgccctggtcgacccaggcattgagacgctcgcggagctcgggcgatatggttccgacatcggcgaggatgatcatcggcagcttctggtccagaaattgcgtgatgccctgctgcggcgagcccttgtcggcgagccgcacgtcggcgaatggcgccagcgcgcgggtgagatagaaggtcggcgccagcagcggctgtgcggtttcgctggtcgaacccgagacgatgccgatggcgcggcggcgccagcgcttgtcgagcagctgcacggcgccggcggagcgctcgcccgagatctcgagccgggtgatgtcgttgcgcagctcgaccggcagatcgaacgccgcttcggtctccttgtcctgcggtccgaacgaatagcgggcttcgccgatcggcgcggccttctggtcgagtgcgcgcacggtgccgaccgcgatgccgctgtcggtgcgcagcaccttcaccgtcatcttcgccgcggcgttctcggctgcgaccagggccagcggggaggaggtgccgccttcgaacacggtcaggctgcgatcgccgatggtcttgccgaggccctgcacgaagtcctcgccgcggccggtgtcgacgccgtccgacagccaggcgatctcgcagtcgccggtgaccttgaggaaacggtcgaccgcagtcagcgtctcgacgcggtcgatcgagtacggcttcggcgcgagttgccgcagcgcgacgcgcgctgcgcccgccggcatgagggtgatgtcgcggttcggctcggacagcggcaccagcgcgatggcgcggccgtcattgtcggcatttgcgatcagctcgtcggcggtcctgatcctgatgtcccaatgcgaagcggcgctccagccgtcgtcgaacatgatcatcagcggcgccttgctgccggccgcgccggtttgcggattccagatcgggccggcggcggcgaagatcaccagcgcggcggcgagcaggcgcagcgcggtcagccaccacggcgtccgtgagggcgtttcctcccgcggcgtgatgtcgaacaacagccgcgtcggcggaaactcgatgcgccgcggccgcggcggcatcacgcggagcagccaccacagcaccggtaggctcacgagaccgatcagcagcagcggttgagtgaaggcgagcggcaatcccatcatgcggccggccccgccttgatcgtcgtggtgcgggcgcccgacttgctgacctgcatgccggcatgcaggaacagcagcagctccgcggccgagcggtcggtcgcgtgggtcgtgaacagccagtcgagcttgttggtctcggcgcggatctggtcgcggtgcagcgcgaggcgcgcggtgtaatcctgcgcccagctctcggcgcggcccgcggtaatgacgccgaagccttccggctcgacgaattcgacgcggcccgaataggggaacgactcttcggcgggatcgaccacctgcaccagcgcgccatgcgcgcccgtgccggagagccctgcgagcgtcgtcctgatctcggcgatcggcgaccagaaatccgacagcacgacgatctcggccagcgccgccggcacgaaggacggcggcaggctcagccggtcggcaccgtcatgcagcatggcctgcgccatcctgtcgatgacgctgcggcttgccgtcggcgccatcagcccggggatgccgacgcgctcgccgccggcgacgagcagctcggccagcgcgaaggcgacgatcagcgtccgttcgagcttggactcgcgcgcggtcctggaggcgaacgccatcgagggcgagcgatccggccagatccagaccgtgtgggaggcttcccattcaagctcgcggacatagagatggtcgtcgcgcgccgatcggcgccaatcgacattctgcgacggctcgcccgagacgaagcggcggtactgccagaaattctcgccggagccggcgcgccgccttccgtgcaaaccgtgaatcacgttggccgcgatgcggcgagcctcgagcaccaggcgcggcagcgaagcggcgagcgtgcggctttcgccatcggcacgtcggatcgccagtgtctccttcgccgcgtgcccgttctctgctgccatcaaccgatccgtgtcttcaattgccggatcacgtccggaatggtgcggccttcggcgcgcgcctggaacgtcagggccatgcggtgcttcagcacgggctcggcaaggtcgagcacgtcgtcgatagacggtgcgaggcgcccgtcgatcagcgcgcgcgcgcgcacggccagcatcagggattgactggcgcgcggacccgggccccacgcaatgaatttgccggcttcacccgcgtccggacccgggcgggccgagcgcaccagcgacaggatcgcctcaacgacggaatccccgaccggcaggcggcggatcagccgctgggcggtgatcagtgcatcggggctcatcgcgcctttggccagcgtctcctcgacgccggtggtctcgaacaggatgcggcgctcggcgtcgcgatcgggatagtcgacgtcgatctccatgaggaaacggtcgagctgggcttcgggcagcgggtaggtgccttcctgctccagcgggttctgcgtcgcgagcacgtggaacggcttcggcaaatcatggcgagcaccggcaaccgtgatgtgctgctcctgcatcgcctgcaagagcgccgactgcgtgcgcgggctggcgcggttgatctcgtccgccatcaacagctgcgcgaacaccggtcctgaaatgaagcggaaggcgcgcttgcccgcggtgctctcatccagcacttcggcgccgagaatgtccgacggcatcaagtcgggcgtgaactggatgcgcttggcatcgagaccgagcgtgacgccgagcgtctcgaccagcttggtcttggcgagacccggcacgccgatcaagagcgcgtggccgccggagaggatcgtgacgagcgtattctcgatcacgcgatcctggccgaagatgacggaggcgatcgcgtccttcgccgcgcgaatctggctcgacacctgctcggccgaacggacgatcccgtcctcgagtttctcgacactctccgccattcgctcgctccttcagcctgccacgcggcttgcctgcatcgtcccgtcactacgtcgcgtgaggtcatcacgccggatcatgggccccatgctagacttgcagggaaggccatgtattcgttggattaacctatccccaccttatcggcttcgggttatgtacggcatcacgaagtggcgacctccacaccggactatcccggatggaaccgcacacgtgagtacaacgtagacctgcaccaatcgtgccaatcacaaagtcagggcaaaccatggcgaaccaagggcagagcgccgatcgcggtctcgaggggctgacggctgccgccaagagcgctgccgatgccgaaggcgccacgaagggcctgcctccggtgcatctgtggaatccgccgttttgcggcgatctcgacatccgaatcgcctccgatggtacttggttctatctggggacgccaatcgggcgtcccgctttggtgcggctgttctcgaccatattgaagcgcgagggcgacaagcatttcctggtcacgccggtcgagaaggtcggcatccgcgtcgatgacgcgccgttcatggcggtcgagatgcagaaacaggacgagggcgattgtcgcgtgctgcggttccgcaccaatgtcgacgactgggtcacctgcgacgccgaacaccggctccgcttcgagcaggccagggatggcggcctgacgccatatctgcatgtccgcgccgacctatgggccaaggttacaagggcgctctattacgatctggttgacatgggcgaggagcgggtggtcgatggccagccgatgttcggtgtcgaatcggccggcgagttcttcgtcatggccgatgctgagcaggtgagggccgcgctttgaacatgaacaagcctatcctgacgaacgagcccgtcgcgatgggagctgcggatttcttcgcccgctcgaaggcgaagcttggcttcgacgtgccgccgggcctttacgatcccaacatcatccctgcctcgggcgatcccggcaccgacaagatgctcgagatcatcgcgcgggagcagccggtgcgccccgcagcggtgctgatcgcggtggtcgaccatcccgagccgaccatcctgctgacgcagcgctcggcgcatctcaacgaccatgccggtcagatcgcctttcccggcggcaagatcgacgcgaccgattcctcgccgctcgatgccgcgctgcgcgaggccgaggaggaggtcgggctgtcccgagagttcgtggagccgctcggctatctcgatctctacggcaccgcctttggctttcgcatcctgccgacggtggccagggtgcggccaggcttcgagctcgccatcaaccattccgaggtcgatgacgccttcgaggtgccgctatcctttctcatgaacccggtgaaccaccaggtgcacagcaaggaattccgtggcctggagcgatcctattacgcgatgcccttcgccgaacgctacatctggggggcgacggccggaatgctgcgtgtgctctatgagcggatctattcatcatgatccggacgattctgaccgagatcggaatcttcctcattccctttgccgtctatgcgctgtttctggctgctgcgcgctccggcgtgttcgcgcggtcgtcctggccggtcaccgtcgttgcgcgcctcgctctggtcgcgatcgtgctggtgattgcggggctgatcggcctcgcgcatttctccggcgcgccgccggattcgacctacgttcccgcccatatcgagaacggcaagctcgtgccgggcgcagaaaagtaggggcctcccgatgagtgcggagccgttactcgcccatgcgccctggctgaccgcaggcgggaccgcgcgcgtcctggaactgctcagcaccgctggcgaggaggcgcgggtggtgggtggtgccgtgcgcaacgcgctgctcggcctcctgcctggtgacatcgacatcgcgaccacggcgctgccggacgaggtgatgcggcgcgccaaggccgccggcatcaagggcgtgccgaccggcatcgaccatggcaccgtcacgctcgtgatcgacgggcatccctatgaagtcacgacgctgcgccaggataccgagaccttcggccgcaaggccaaggttgcgttcggccgcgactgggtgaaggacgccgagcggcgcgacttcaccatgaacggcctctcggccgatgcgcacggtgtcgtctacgactatgtcggcggcatcgccgatgcccaagcgcgccgcgtgcgcttcatcggcgatcccgaccagcgcatcgccgaggattacttgcgcatcctgcgcttcttccgcatccacgccgccttcggtgccggcgagcccgaccgcgacggctatctcgcctgcatccggggacgcgcgggcctggccaacctgtcggccgagcgggtgcgcatggagatgctgaaattgctggtggccggcggtgcagctgcggccgtcctcgccatggccgagggcggattgctgcagccgctggtcggcggcgtcgcctatacgagtcccttcgcggcgatgatcgcgaccgagcgcgcgctcggccttgctccaaacagcacgcgacgtctcgccgcgctctcggtcgccgtcaccgaggacgccaagcgcgtcgccgtgcgcttgcggctctccaacgccgagaccaaggcgctggattcgatgggccatcgctggtggcgcctcgccaccaaggacgaggccaatgcacggcggctgctctaccggctcggcgtggagcgctatcgcgatcgcgtgctgctggcctgggcgaggaacggcggcgacgtgcattcgccgcgctggcgctcgctcgccgagctgccgcagcgctggaccgcgccgaaatttccgttgaaggccgccgatttcatcgcgcgcggcatgacggaagggcccgggctcggacacgtgctgacgctcgccgaggacgcctggctcgccgcggattttcccctggacgaggctgcgctcgcttcgatcgccgaccaggctgcggcccgcgtcggccgcgatgagaaaacctaggctcgctggcgatgatcgcggcgccccgggatcgccccgagcatcggactttcgcctgtctcagctaggccaaccggcttcccgcgagcatgatgcggcgctcctccatccgtggcgcccacgggtcacccgagggatcgtcacccagtctctctgcaagaaagtcgataaagagacgaagccggctcggcgagaaacgccgatgcgggtagaggacatgaacgccgaggctgccccagtcgcaatcctccaggatcgggaccagcaggcccgcctcgatgtccttgccgcagacaaatgacggaagccaggagacgccaaggcccgcaacggccgccttgcgcaacgtatcggcgctcgtcgaggcgagccgggcggtcatcctgaccctgccgtgcatctcacgccggcgccaggaccagtccagacgaggcgcgggctgcgagaaggtcagcgcgggcagggctgcgagaatctcgggcgtctcgggcacgccgtgcctggccaggaattccgcgcttgccacgacgcgaaagtgggttgtcgcgagcttgcgtccgatcagcgcggtgtcgagcgacggtgcgacccggatcgccatgtcgaagccttcttgcacgagatccaccgggcggttcgtcaggtcggcgacgacggcgatcccgggatgccgcgacatgaaatcgacgagcagcggcgcgaggtggtcctggcccagttcgaccggcgccgtcacgcggagcgtcccgcgcgccagccgtttctccgctccgacggtgccctccgcctcgtcgacggcttcgaggattgcgagcaccttctcgaggtagagctgcccctccggagtcggtcggaccgagcgcgtggttctgtcgagaagccgggctccggtgcgctcctcgagatgaccgacatgcttggccaccattgcggctgacatcgcgcaggcgcgggccgccgcgttgaatccgccgagctcaaccacccgcacgaagacacgcatgctgctcagcgtatccatggcctatcgcacactcccagtcatcatcgttcctaccacgcggtgaattcccgcaagcgtctcggcggcgtagatcgcgcgagcccgctcgggccgttgcgaacaagaggtaccacatgacgacattgctgcaattcgacttcgcgtttgatgggccgtggggagaagatctccagatcgcctgccgcgatcttgcggacgacatcgcggcccagcccgggctcatctggaagctctggggcgagaaccgcgacgccggccgcgcggcaggcatctacctgttcgaaacgccggcagctgccgctgcgtatgtcgccaaacatcggccccgtctcgccgcccttggcgtgaccgaccccgccatttcgtccttcagcctcaacctgccgctgtctcgcatgacgcgggcgccattctgagagggtaggcgatgtacacgaccattgccgaagtcgagatcgaggatctcgcgcgctttctgtccgtctttgcaacggatggccgcaacaagcgggaggcgcatggaagcctcggcgccgaggtgctgttcgcatcggatggctcggaccgggtgatcgtcctgatcgactggcgggacgaagcggcctgcgacgcctttcgatccgatgcctcggtgccgccgaccatggccaatggcggcgccaagggccggccgcgattcacacccgtcatcagggcgggccggttcgtcgcatgacgtcggacgcggcggccaagccggctgccgcgtgcctcgctgacatcgagaagcgttgaacctgtgattgatcaacgatacccttgcaagtgcccggctggcaggaaatcaaagggggagcgtgatggtccgcaagttgacggcatgtgcaatcgttgcgacgggcatgtgtttcgccggcgtgacaaacgctgaggcgcagcagccggacttcaacgcgcctgacctgatccttgtcaatggaaaggttctgacgctggacgaacgatcgaccgtcacggaggccgtcgccgttgcagatggaaagatcctcgcaaccggaaccagtgcttcgatgaggtcgcttgccggcgcccgcacccgcgtgatcgatgtgtctggcaagaccgtcattcctggattgatcgatacccacgctcacttcaaggcggctgggctgggcgactatgtcgtaggcctgggccgggccaggaccgtcgcggaagcgctcgaggccatcaagtcattcgttgcgaagaggaagccgggcgagtggatcgtgggcggcgcgtggcatccgccgtcccagcttgccgagaaacgttatctgacgaggcaggagatcgacagcgttgctcccaacaacccggtctatcttcgcaccgtcgggcatttctccatggcgaacaccatggctctacaattggtcggcgtcgacaagtccaccgcggatccgagtggtggaaagttcgagcgcgacgcggccggtgacttcacaggcctgctcgtggaatcggcgatcgatcgggtcgagaaggccgtgccgccctggacggaggctgacgaaatacggcaattcaccatcgcccagggcgtgctgaacagcttcggtatcacgagcgcggtcgaaggagcgacggaggcacgcgacatccgcacgctgcagaagctcgtcgcatccgggaaagcgaccctgcgcaccggcgtgatgtttcgaccggagccacctgccgatctgaccgcatgggaagcgatcatggcgggcaatggggcctcctcggggtttggcaacgattggctcaagtttgccggcatcaagatcttctacgacggcggcatgactctgaagacggcgctcatgcgcgacgtgtatcccgattcacatgacaactaccatggcattgcgcagcagacgccggagcggctgaagcagctcgtctccatctgcaaccgttatgactggcgtgtcggcgttcacgtggtgggtgaccttggtatcgaccatgtgctcgatgcgttcgagtcggcagacaaggaaaaatcgatccgcgaccgtcgcttcgtcctcattcacgccagcctgatccggccggaacagatggagcgtgcgcaaagacttggagtccgtatcgatttccagaacgccttcatgtgggacaaagccgcgaccgtcgagcgatttctcgggcgagcgaccgctgaccgcgccgtaccgaccaggacgatgatcgagaaaatgggaatcgatagcctcggcgccggcacggactttcccgtaaacccgatcaaccccttcctcaacatgtatgtcatggtgaccaggaaggatcccaacggaaacgcctacggcgcggcagaggccataacgcgcgagcaggccctgcgcctctacagcagcgcggcttcgcgctcaacgttcgacgaagcgcgtaaggggaccatcgagcccggaaagctcgcggacatcgtggtgctctccgcggactacacggccgtgcccgaggaccagatcaaggacatcaaggcggacctgacgatcgccggcggcaaagtcgtctttcagcgctgaatcgacaccgacagacaaatgccgcgcgaggtccgcacgctgggcgttgacccgaacagcgccgcaacgtcgacgcttgccgaacaggagttcggcgttaaccaacgccaacggttccggtctgcgcgcgatcgcttcgaagtttcttaaattttgctgggtacctcttccaggcacggtgacctggagaaaatgatgggcaagcgcgccaaacgtggaaaggcagagccgctcgccctgccaatggtcgcgagagtcgcaattggcgctgtggccgtcgccgcgttgggctacggtttgctgtctcgcccggcgggcgtgcagccgatgcgcaaaccgtccgcgccgcaagccatggcttcgtcaactccggtttatgtggcagcaccagttcgtgcatcagcgccagctccggctccagtcgcgcccccggcgccgccggcggaaccaccgaaagctgccgacggtcccgaagctcttgtccggcaggtggtggattatgccagccgccagccgccgggcaccgtgatcatcgataccaagaacacattcctgtacttcgtcctgaacgacacgcaggcgttgcgctacggcatcggtgttggccgcgaaggtttcacatggtcgggtgagcagaccgtggcccgcaaggcagaatggccggattggcgcccgcccgacgagatggtctcgcgtcaaccttacctgccgcggttcatggcaggcggtcccggcaacccgctcggcgctcgtgcgatgtacctgggcgaaaccgaatatcgaattcacggcaccaacaagcccgatacgatcggcaagcgggtgtcgtccggctgtattcggctgaccaatgaagacgtcgtcgatctctatgaccgcgtgaaggtcggcgcgaaggtgatcgtgcttccggcaaccgcttcccgccggccatcccagggagcgccgtccgatgctgcctcgcggtcgccggacccggcatcgccgtcgaaccgcccttcggcaaccaacgcgcagatgctgtcatccggaccgaagattgccgaggtccggtaacaccgaatgccgcgatccaagccggaacgcgcccctgggcgtgactagtccccgtcctcctcctcgtcttcctcctcctcgtcgtcttcctcgacctgaacgagcacggcgagtggcagcgtctcgcggaacaaatcgccctccatgcccatccacaggcacagcacttcgtcctgcttgacctccgcgacggtcagcggctggccgccggacttcagcatcacgacatcgccggctttcagatccatgtattttcctttcggttgatcgacgcgatgacgaggctagcaggccgtcatgacaggtcgatcacgcctgctgcgcccgccgggaaattctgcagggcgcgcgttgcggcatgggctcaggcgcgctcgatcgcactcgcgtggttcggcaggcgctggtttggtgatgtgcccacgcagagcatgtcccgcgcaagcctgcgacggtgacactatgcccctgttttgcccgacgagtcaaagccgcttcgtataatccgtaggcccctgatcttgcggcggccggctactgtgcatggggttgttttcagttttttgtttggggtccggctgcgcctggtccggcagcagctcgccgagcgagcggatgatccgatctggcttgacggtcgagccttcgggcaggccgtcgccatggacgtccatccagatcgaatagatgccgaggcgctgcggcgtcacgacttcccattccagattgtcgccgatcatccaggtgtcctcggcgctgacgccaagcgcgtccatggcgtgcagataggcgcgctcctcgggcttgccgaagccgtgctcgccttcgatctggatatggtcgaagcggtgcgccagctcgaagcgctcgaccttggcgcgctgcatgtccgcggcgccgttggtgaccagcgccagcctgatgccgagcgccttgaaccggtcgatcgcatcatgcgcgccggggaagacgaacatctcctcctcgcgataggccgtgaagcggtcggcgagacggacggcgaggtcgtcgggcagggcgcgatggccggccgccgcaagcgcggcaaagccgcccttgacggtgaggtggcgcgcctcggcgagcctcagccgccatgcggcttccgcgctcgcccagaagtttcgcgcgaatgccagcaccgccgtggcgaccatcggcggcggcagcggcgccagttcgtcggcgaattcggccgtgatcgtattccaggcgatctcgggacggccataggccgacaggatggtgtcgtccatgtcgatcagcatggcgcgcggcagcggctttgatgcgggcttcatcgtcgtcacggccactttacctccggcggcatcgacgacaggatcgaatccacattgccgccggtcttgagcccaaagatggtgccgcggtcgtacagcaggttgaactcgacatagcgcccgcgccgtatcaattgctcctcgcgatccaccgcggtccaggcgctcgcgaaattgcgccgcacgatctcaggatagatcttcaggaaggcgcggccgacgtcctgggtgaagacgaggtcggcgtcccagtcaccgctgtcgtgccagtcgtagaagatgccgccgatgccgcgcggctccttgcggtgcggcagatagaaatactcgtcgcaccatttcttgtacttgtcgtagtcggcaacgccgttcggctgcgcacaggcctgcttcattgcggcgtggaacgagatggtgtcgggatcgtcctgtgtccgcctgcggtccagcaccggtgtgaggtcggcgccgccgccgaaccatgccttggtggtgacgacgaaacgcgtgttcatgtgcacggcgggcacgttcggattgcgcatgtgcgcgatcagcgagatgcccgaggcccagaactttggatcctccgcagcgccggggatctgagcgcgaaattcaggtgcgaattcgccgtgcacggtcgagcagtgcacgccgaccttctcgaacagccggccatgcatcatcgacatcaccccgccgccacccggcgtgccgctgtggtcggtgcgctgccagggcgtgcgcttgaagcggcccgcctcgccgggatagagcgcttcgggtgcgtcgtcctcgagccgctcgaagcttgcgcagatgtcgtcgcgcaagcgttcgaaccaggcgcgggcgcgggccttgcgatcgtccatcaagttcgggttcattggaattgcgactccgtcaaccttccggaccgtaatgggtgcagctctcgttgcaacagtcacgggttctatctgatgcccagcgatttgtgtgtctgcacgctgagccgccattgcggatgatgcaggcagtactcgatcgcccgcgcggtgttctcggccacctcgggcccgtccatcggctgcagcgagaagcgctcgaaggcgagatgctcgaacgtctcgggcgcggcgagcggctggggatagaccagcttcagctcgtggccttcgcgcaggaccaattcgctgccgcccttggggctgacgcagatccagtcgagcccttccggggccgcgatcgtgccgttggtctcgacgccgatctcgaagcctctggcgtggagcgcgtcgatcagcgcggcgtcgacttgcagcagcggctcgccgccggtgagcaccacgtagcggttggcagccgtggcacgccattgcccggcgatggtgtcggcgagttccgacgccgaggcgtagcggccgccgagagtgccgtcggtccccacgaaatccgtgtcgcagaacctgcagacggcgtccgcgcggtcggcctcgcgcccgctccagagattgcagcctgcgaagcggcagaacaccgacgcgcgcccggcatgggcgccttcgccttgcagggtcaggaagatttccttgaccgcgtaactcaagcctctctcctcgatctcctggtcaggcctcggggccttcatggttccggatctggcgcagcgcctcgccggcggccatcgccgcggtcatggccacgttgagcgaccgcagccccgccttgatcgggatcaccagccgcgcatccgcggcctcgatcaccgcgtcggtgacgccggcgctctcgcgcccgaatagcaggatgtccgacgtctggtaatgaaaatcgcggtagtcggtggccgccttggtggtgaacagcagcagccggtagcttcgtgccgcacgccattcctcgaatttcgtccaggagtcgtggcgggtgaggctgacatggtcgaggtaatccattcccgcccggcggaacaggcggtcggatacggggaagcccgcaggttcgatgatatgggcggccaggcccaagcaggcgcaaagcctgagaatcgtgccggtgttctgagcgatgtcgggttggaaaagcgcgatctgcatgggcggtgcgagggctttgacggggcaacggcgagcccggaatgtctcaataaaacatcgctcgctcgggaattcgtgcatggcacgcctccacgccgttagcgggcttgcgctcgccgggcaagggtgccaatagaacgattctggactgctatttcacccattttgaggtggacggccaagttctgccgccgcggggggccgcgggtgccggcagccattccggggacctcttgggcgcccctcggagcggttccaccggtagcgcaagaagaaagggttggaatcgtgacgacagcgtcttcggcggaccatccgacacgccgtgatttcttattcgttgcaacaggggcagctgcagcagtagggggcgcggctgcgctctggcccttcatctcccagatgaatcctgacgcctcgaccattgccgcaggtgcgccgatcgaggtcgatctcagcccgatcgccgagggccaggacatcaaggtgttctggcgcggcaagccgatctacatcagccaccgcaccaagaagcagatcgacgaggcgcgcgccgtcaacgtggcgagcctgcccgatccgcaggccgatgatgcccgcgtcaaatccggtcacgagcagtggctggtcgtcatcggcatctgcacccatctgggctgcatcccgatcgctcatgaaggcagctacgacggcttcttctgcccctgccatggttcggtgtacgatacgtccggccgcatccgccagggccctgcacccacgaacctggtcgtgccgccgtaccagttcgtttccgacaccaaaatccagatcggctgagcctcggaccttctccgaagctttgcgccgactcgtcgcattatttcctcaggatcgcatcatgagcggaccatccgactaccagccgagcaatccggccctgcaatggatcgagcggcgcctgccgatctttggtctcatccattcctccttcgtcgcctaccccaccccgcgcaacctgaactattggtggaccttcggcgccatcctttccttcatgctggcgatccagatcctgaccggcgtggtcctggcgatgcactacacgccgaacgccgatctcgccttcaagtcggtcgagctgatcgtccgcgacgtgaactacggctggctgctgcgcaacatgcacgcggtcggcgcctcgatgttcttcgtcgccgtctacgtccatatgttccgcggcctttactacgggtcgtacaaggagccgcgcgaggtgctgtggatcctcggcgtcatcatctacctgctgatgatggcgaccggcttcatgggctacgtgctgccgtggggccagatgagcttctggggcgccaccgtcatcaccaacctgttctccgccgtgccctatgtcggcgagagcatcgtgacgctgctgtggggcggctatgcggtcggcaatcccacgctgaaccgcttcttctcgctgcactatctgttgccgttcgtgatcgcgggcgtcgtcgtgctccacgtctgggcgctgcacgtcgcaggccagaacaatcctgatggcgtcgagccgaagacggaaaaggacaccgttccgttcacgccgcatgccaccatcaaggacatgttcggcgtcgcttgcttcatgctgctgtatgcctggttcatcttctacatgccgaactatctcggcgacgccgacaattacattccggcgaacccgggcgtgacgccgccgcacatcgtgccggaatggtactacctgccgttctacgcgatcctgcgctcgatcccggacaagctcgcgggcgtcatcgcgatgttcggcgcgatcatcatcctgtgcttcctgccctggctcgacagcgccaagaccaagtcgtcgaagtaccgtccgctggccaagcagttcttctggatcttcgtcgcggtctgcatcctgcttggttatctcggcgcacagccgccggagggcatctacgtcattgccggccggatcctgacgttctgctacttcgcatacttcctcatcgtcctgccgctgctcgcgcgcatcgaaaagccgcggccggtgccgaactcgatctcggatgcagttctggccaagaccgggagcaggtcgacgccgatggtgtcgacggcgatcgtgctggcgctcgccggttcgttgttcgcgggctcggtcgacagcgcgaaagcgtccgaaggcggcgacaagcctccgggcaacaaatggtcgttcgcgggcccgttcggtacgttcgatcgcggcgcgctgcagcgcggcttgaaggtctacaaggaggtttgcgccagctgccacggcctctcctatgtcgcattccgcaacctcgccgagcccggcggacccggctattcggtcgcgcaagccgcggcgttcgcgtccgagtacaaggtcaaggacggtccgaacgatgcgggtgacatgttcgagcgggccggccgggcggcggactatttcccctcgccatttccgaacgagcaggctgcgcgtgcggcgaacggtggtgcagcgccgcccgacctgtccctgatcaccaaggcgcgctcttacaagcgcggcttcccttggttcatcttcgacgccttcacccagtaccaggaacaggggcctgactatgtcgccgcgctgctccaggggtatgaggacaaggtgccggagggcgttaccatcccggagggctcctattacaacaagtacttcccgggccacgccatcaagatgccgaagccgatcagcgacggccaggtgacctatgacgacggctcgccgacgacggtcgcgcagtacgccaaggacgtcaccacgttcctgatgtggaccgctgagccgcacatggaagcgcgcaagcgcctgggcttccaggtgttcgcgttcctgatcatcttcgtcggcctgatgtacttcaccaagaagaaggtctgggccagctcccactgagcgacgcgagacgggacatgaagaagcccccgcaagggggcttttttgttggtgtgtcattccggggcgcgcgatagcgcgcacccgaattcatgggccgacagagttggcggatgaatggcttccaggctcgatgctgacgcatcgcgtcggaatgacgagagtgtggattgcgccgcacgcttgcacccgccaaaatagggccaaccgctcaaatctcatcggaggacaccatgggaaccgccattaccttcaagcgcccggacggccaggacgcctcgggctatctcgccaatgccgcgcgcggcaattcgccgggcgtggtcgtgatccaggaatggtggggcctttcggaccagatcaagggcctgtgtgatcgcttcgcgctcgccggcttcgacgcgctggcgcccgatctctacaagggcaaggtggtgccgtatcacgacacggacagcgccaacaaggagatgaactcgctcgacttcatggacgctaccacgcagacagtgcgcggtgccgcgcaatatctgtcgcgcaatggcgccaaggtcgggctgacaggcttctgtctgggcggtgccgtgaccatcatcggcgcgaccaagatcccggagctcgcagccggcgtcgtgttctacggcatcccgccggagcaggcggccaggcccgccgacgtcaagatcccgctccaggcccacttcgccaacaaggacgattggtgcacgccggagctggtcaacgggttcgagaaggccatgaaggccgccggcaagtcgctcgaactgttccgctatgacgccgagcacgccttcgtcaacgagcagcgccaggccgtgcacgaccgcgaagccgccgagctcgcttggggcagggcgatcaagtttttcgccaatcatctcgacggcaacagagcggcttgacgcagctggtagccaggatggagcgcagcggaatccgggactgtcccgtcgctgcgcatcactgattgcgcctcgctccagtcgggctaccgccttgcttacccttgacgccgcccccgcgccatggtgagtatccgcctcatgagcaccgccgtccgcccagcccgtcgttggtggcgcacctcctgacgaggtggccggtgcgattttcctttcccaaatcgactgaggccgccagcacagcgcggcggcctgatcgtttgtcctgtgtggcgttccctcggcaagtttcgtaagaggacgacatgaacaggaccgtctttgccctcccgcccagaagcgactacgtgacgcgcgcgggcctcgcgatcacgcgcgtggccgagcagttcaccgggggcgccaaccggctcgacgatctcgtgagcctgctcgaccgccgccgcggcgtggtgttgtcctcgggaacgaccgtacccggccggtacgaaagcttcgacctcggtttctccgacccgccgctcaagctggaaaccgtcggcttcgacttcaagctggaagcgctgaacgagcgcgggcaggtgctgatcgccttcctcgccgatgtgctgcgcgagccctgcgtggtgatctccgagaagacggccacgcgccttgccggccacattatccgcggcgacgccccggtcgaggaggaccagcgcacgcggcgcgccagcgtgatgtctctggtgcgcgacatcatcgcggccttctccgccaacgacgacgcgctgctcggcctgttcggcgccttcgcctacgacctcgtcttccagatcgaggatctcgtgcagaaacgcccgcgcgaggccgaccagcgcgacatcgtgctctacgtccccgaccgcctgctggcctatgaccgcgccaccggccgcggcgttgtactcgcttacgatttcgcctggaaggacaggtccacccaagggctgccgcgcgagaccgcggacagcccgtacctgaagacgccgcgtcagggctttgccgatcacggccccggcgaataccaggccacggtcgagactgcgcgcgcggccttcgcccgcggcgatctgttcgaagcggtgcctggacagctctttgccgagccctgcgaccgctcaccggcagaagtcttccagcggctctgcgtcatcaacccctcgccctatggcgctctgatgaatctcggcgagggcgaatttctcgtctcggcctcgccggagatgttcgtgcgctcggacggtcgccgggtcgagacctgcccgatctcgggcacgattgcgcgcggcagcgatgcgatcggcgacgccgaacagatccgccagctcctcaactcggagaaggacgagttcgagctcaacatgtgcaccgacgttgaccgcaacgacaaggcacgcgtctgcgtgcccggcaccatcaaggtgctggcacggcggcagatcgagacctactcgaagctcttccacaccgtcgatcacgtcgagggcatgctgcgccccggcttcgacgcgctcgatgccttcctcacccatgcctgggcggtgaccgtgacaggcgcgccgaagctctgggcgatgcaatttgtcgaggatcacgagcgctcgccgcggcggtggtatgcgggggcgatcggcgccgtcaatttcgacggcagcatcaacaccggcctcaccatccgcaccatccgcatgaaggatggcctcgccgaagtgcgtgtcggcgccacctgcctcttcgattcagatccggccgcggaagaccgcgagtgccaggtcaaggccgccgcgctgttccaggcgctgcgcggcgatccgccgaagccgctgtcgaccttcgcacccgacgcgaccggttcaggcaagcaggtgctgctgatcgatcatgacgacagcttcgtgcacatgctcgccgactatttccgccaggtcggcgccagtgtcaccgtggtccgatatgtgcatgcgctcgacatgctcaagcggaagaactgggatttgctggtgctgtcgcccggtcccggcaggccggaggactttgcgatcaagaagaccatcgatgcggcgctggagaagaagctgccggtcttcggcgtttgcctcggcgtgcaggcgatcggcgaatatttcggcggcgagctcggccagctcacccatccggcccatggccggccctcgcgggtgcaggtgcgcggcggccgcctgatgcgcaacctgccgaacgagatcgtcatcggccgctatcactccctctttgtcgagcgcggcagcatgccggaagtgcttgatgtcacggccagcaccgaggacggcgtcgccatggcgctcgagcacaagaccctgccggtcgccggcgtgcaatttcatccggagtcgctgatgtcgctcgggaatgaggtgggacttcgtattgtcgagaatgcgttccggctggacgcgcgttgattgagaggcaccaatgacctttgaccacgacctgaaggcgagcatccgcaccatcccggactatccgaagccgggcatcatgttccgcgacatcaccacgttgcttgcggacgcgcgggcgttccgtcgtgcggtcgacgagctcgtcaatccctgggccggcaacaagatcgacaaggttgccggcatagaggcccgcggctttatcctgggcggtgcggtggcgcaccagctctcgggcggtttcgtgccgatccgcaagaagggcaagctgccgcacaccacggtccgcattgcctattcgctggaatacggcatcgacgagatggagatgcatgtcgatgcgattcagcccggcgagcgcgtgatcctggtcgacgacctcatcgctaccggcggcacggcggaaggcgccgtgaaactgctgcgccagatcggggccaacgtggtcgccgcctgcttcatcatcgacctgcccgatctcggcggcgcggccaagctgcgcgccatggacgtgccggtgcgcacgctgatgacgttcgaggggcactgagccgccaagcggtcagatcatctcggccttcagctcggcccgccagtgcagcatgcgctccttcaggagcgcattcctgacataggcgctctcctcatcctccagccgctcgcattcgccgaacgtcaggcccgcctcgccgtgcgtgttccaggcggtctgaaggctgcggcaggtgtggctgccctggcgcagcgagaaccagatgcggttctggatcgtttcgaggttcggcgcttggccgacccaggtctcgcttgaggccgggcagcggacgacgaagatgcccgcaacggtcttccgctccttgtaggcggcgatggctgctttccggtcgatgctcacggggaagacctcgttgaaggacgcaatgagcgttctccataagcgcggcctggcgcgcagtcaataatatccgggtaaaatttctgcctaggaccgctgcaggatcaggctgagctcgagctcgcggaaggcgagatagttgcgccgaatccattggtgcagctcggtcgaggagtccttctcctggcgcaggtagccggtgaaggagaagttcagccggtcgatataggtcttgaggaagccgggcagcgcgggcaggcggaacagccgtccgctggccattgcgggcggcagctcgccgcgcacgacatattcgttgtccaccgtgatcaggttcattcgcgggatctgctcgcgcagcatcccatgagcacgggcggaggcgcggtcggtgtcggcgacgaacaggatctgtggcgcgacgtggcggcgcgccgcctccttgagaaggccgatctcctcagtcatcttgaagaactcgtcgaaggcgtggaagccgaggtcgatcaccttggcaacgccgtcatcgaggatgacgcggtccatcagctgcatcttgccaaaggtgtcgatcacgtcggcggtctcggtcaccttcggcaggtaatcgagcagcgacggctccttcagattgacgtcgaaggccgcgacgttgccgttcttgagcagcaggaattcaacgagaagccgcgccagcaaggtcttgccgacctgcgggcggggcgagcagatgatgtagacgggcgtcgcgggcatcgagagctatatcaggccaactcactgcccaatccagccgtatcagcccgggcttcgcaactatttttcgctgttgcggctcaccggcttggagccgacgatgtcggtcagacggatgcggtcgaactcgctccagacattggccagccagtgtcggacatagccgcgcagcacgaaggaatagttcgcggcctcgtcgttgatgcccttgttggcgacgaatttcaggaacgggaccgaggacacctcgacctgctcgtaggccatctcgttgagcttggggatggtcagctcggtcgcgtccttgatgcgatggaaatacgagttgtaggtcgcctggtcccactggaagaactgggtgtcgttgatgaagttcttcaccaggaaatatttcgcgccggtcatgaagcccgcagtctccgcgatctcctccagcgaggcgatcgaggggccgaggatgtggaacacggcaaacgtgatctggccggccttggcggcatcgaggaagccgatgtcgcgcagcgatgccagggccggagagagcaggccggcgcggacgtcgatgacggtcaccgacgggctcaccgcattgagcgtgtcgaaaatcttcatctggtcggccgtggtcgtcatgtcgacgatctcggtgatgtcggggtggaagcgcttcagagttccgcgcggcgactcggtgtcgaaggcgcgcgtcggaacgttgttagctgagaaataatcgagcagggtgcgcgacaccgtggtcttgccgaccccgcccttgtccgcgcccaccacaaccactgccggctttgccattgctgtcccctaacgcgcgcccccgatcgcgaggtcgcaatcggccgggcccagatcgatgtcccgagtctgctgttgggcgcgaacatggcagaaacaagggagaattcaattccgcaggcccaagtgacggcaattcccgaggtttttcccgatcgctgcgcaagctcccaagtgtagcggcaaatcgcgccctcaatggtggccccaaggccccatcgggttgcccgcgggggctcccgaggggcttggtgcggagacgggcggcaacggaccagccgggctgccggcgtcgctccatggcccatgcggtagcgccggcggggcgtcctcctcgggctgttccgcctcgggctggttcatctcttcggtggggtccggcagcggaccgggatcatggccaccggcaaacttgaccagtgcgtcgacccgggactgcacggacgggtgggtcgcgaacagatcggcgaagccctcgcgcggattgtccacgcagagctccatcacggctgacgtcgcgccgggcagttcgccgcgattctcgatcttgcgcagcgccgagatcatggcgtcagggtccttcgtcagctcgaccgagccggcgtcggcgagatattcgcgcgaccgtgagagcgcgagcttgaccacctgggacagcagccaggccacgacgatcagcacgatcgcgacgatgatcacgatcaccgcgccgccgccggagctcttgctgtcgctcgacgacgaggacgagcgcgacgaagagcccgaggaccatgagccgccggatccggagctccagctgaaattcgtgaacaggcggaagaacaattcaccgaagaagccgaccacgcccgcgatgatgacggcgaccaccatgagctgtacgtcgccgttcttgatgtgagtcagctcgtggcccagcaccgcctcgatctccttgtcgtccagcgcatcgaggagaccggtggtgacggtgatggaatattgccgcgggttgaggccggtcgcgaacgcgttcagcgccgggctctccatgatcttcagcttcggcatggtgatgccgcgcgagatgcagagattttcgagcaggttgtagagccgcggctcttcctgtcgggtgacgccgtggccgccggtcacggcatcgatcatcgactggtgaaagaaataggcgatcgcgatccaggcgatcgccgcaatggtcgcgaaaggcgcggccttgagcaggtcggaaaaggcgcggctcagataatacgcgaccgtcccgttgccgttaatgacgacctcggccaccagggcgccggcatagaccagcacgtagacaagcgcgaacaagccggcgagcagcagcatcgaacgaaacttgttcgaggcgatgtgcgtgtagagaccatacgcggccatgacgcgatgccctgccggcctgtcggctcaattcagaactttacctgcggcaccgtctcgacctcggtacggctggcgccgagatcgaagaagtccttttttgtgaagccgaacatcccggcgaacagggccgcaggcagctgctgaatgccggtgttgtattcctgaaccgcgttgttgaagaaacggcggctggccgcgatcttgttctcgaggtcggagagctcggatgcgagctgctggaaattggcgttggccttgaggtcgggataagcctccgaaagcgcgatcagccggcccagcgcgccggagagctggttctcggctgcggagacctgcgcgggtccctgcgccgacatcgccgaattgcgggccttgatgacgtcgtcgagcgtgccgcgctcgtgcgaggcatagcctttcacggtctcgaccaagttcgggatcaggtcgtggcgttgcttgagctgcacgtcgatgtcggcaaaggcttggccgacgcgctggctcagcgccaccaggcgattgtaggcgctgaaggcgaacagcgcgagaacgacgaggacgccgagaacgatccagccggtcgacatggaggactcctgaagagggaagaagacgggcgctagggtagaccaaattggcgcaggatgagagcccggctcagggggacagaggtaagacttggtcggatatgggatcgttctcgttcaaggcaaaagccccgaacgtggttaactttcggcaatgacggcatcgccccagcgccagcgccgggcacttgcataggcggccttgtcgcggcggggcaccttcgcgagctccacgcccgtctccgtgcagagcttcgcggcgatcccggccttgcccacatcgggcggcgccagcacgcgcgcggcgcgacttgcaggcggcgtacggatcagggcgacgtagatgaagcgctcgtcctcgaagggcacatcggcccctttgatctggcgatgcgcctgggagcgcggcaggcgctgcgagaaatggcaccaatcgggcgcgttgagcgggcagggcctttcgtgcgggcagggcgcggcgacgtgcgcgcctgctgcgatcagttgctggcgcagggcaaggaggcgggcatagccggcgggcgtgccgggctcgatcacgaccagcgcgtggcgcgccttggcccacatggcatctgtgagcttgcgctgatcggcctcgctgagctcgcccatgacgtagctggcgatgacgagatcggcctgtgagacctcggcgaggttaccgctggcatcacccggcacatagcggcactccgcgaggcgcgagctgtcgcgggccagatcaagccccaggcggctcagcgtggcgttggcgtcgagcagggtgaagtcgtgtagcgatggaaatgcttccgcggcagcccagctcgcggtgcctgggcccgcgccgacgtcgagcagcgtctccggggcgagatcgagcactatctccgccagcgcattgaggctcgcagccaccgcggcataggttgccggcatgcgcgcgagtgcataggcgagggcatcggcttccgacttgatcgtgccggagccgccaccagcgcgataggtggtcgagattttctgcgaccgctgcgcagcgtcgctccgcgagaagccctcaagcttgcgatcgagggcagccttcaactcggcggggagggcgggggcgatcatcgacaacctcacgtcatcccggagcgcgcgcagggcgaatccggaatctggaggttatagcgcgagattccgggctcgatgctgcgcatcgccccggaatgacggctgaaaatctcacgccacgttctggtcgaggatgtccaccgcctcggcgaggctcaccgacaccagctgcgacacgccgcgctcggccatggtgacgccgaacagacggttcatccgcgccatcgtgatcgggttgtgcgtgatgatgatgaagcgcgtgtcggtcgagcccgtcatttcgtgcagcaggttgcagtagcgctcgacgttgtggtcgtcgagcggtgcgtcgacttcgtccagcacgcagatcggcgagggattggtgaggaacaccgcgaagatcagtgccatcgcggtcagggcctgctcaccgcccgagagcagcgacaacgtctgcggcttcttgccgggcggcttggcgatgatctcgagaccggcctcgagcgggtcgtcgctctcgatcaggtgcagcgcggcctcgccgccgccgaacagctcgacgaacaggcgcttgaagtggttgttgacgacctcgaacgaggtcaggagccgctcgcgcgcttccttgttgaggctctggatgccctggcgcagccgcttgatggcttcgaccaggtcgtcccgctcggtgacgagaccgttgtgctgggtctcgacctcgcgcagctcttcctcggcgcgcaggttcaccgcgccgaggcgctcgcggtcgcggcgcatcttttcgaggtcttcctcgatatcgtgcagcggcggcagctccgcgccgggctcgatctcggcgaggccggcgacggcctgcggctcgacttccagcatgtcgcggatctcgcgctcgatatcctcgagccggcggcgagcgccttccatgcgctcctcggcgcgggcggtggcctcacgggcgctggagagcgcctcgagcgtcagcttcgcgacgcgatcggtctccgccatcgcgctttccgcggtggcgagcgcgtcagcggccatgcgacggtcgttctcggcgtactcgatctcggtgataagcgcgctgcgcttttcggcaaacacggccggcgcgttttccagttcgctgcgctcgatcgtgagttcggcgatgcgggcctggatggtgtcgatgtgggaggccgcgctctccttgcggttctgccattcggtgcgctcggcgaggatcgcctgcacgcggcgatcggcgagctcggcttcgcgcgccagcgcctgcgcctcggcgcggacctgggccgccatgcgacgatggccctcgatgtcgctgcgcacggcggcgagacgggtctccgtgtcctcgctcgacggcagctccccgatgcccgcctgggcgtattcgtaggcggcttcggcttcggcgcggtcggcggcgagacggctgtgtgcttccgacagcgtcgccttgcgcgcggcgtggcggctgatctcgcgctcggcattggcatggcgctcgcgcgcgacgttgagctcgcgctgcgcggcgcgccaggcttcgcggctggcgccttcggtgctggcggccatctgcagctcggactcggcgttttccagcgcctggcgcttgatctgcgcgtcgatgcgggcctgctccagctcgttctcgatgtcgacgaggcgggcgcgctcggccaggcggcgggccgcgccggtgggggcgtgggcggcggcaacgaagccgtcccagcgccagacgtcgccctcgggcgagaccagccgctggcccgtcttgagctgcgagaccagctcggcaccgcgctcacgcggcaccacgccgatctgggcgaggcggcgcgccagttcggccggcgcctgcacgtggttggcgagcggcacggcgccctcgggcagttccggatcgccttccgtgtggccgacattggtccagcgcatcggcgccgacggatcgatcggtgcatcgagatcgtcgccgagcgcggcgccgatggccttttcaaagcccttgtcgacggtgatgccgtcgataatcggcggccaaagattcttggtctcgccgttgacgatcttggagatggtgcgcgcctcggtctcgagccgctgtacgcgcttgtcggcttcgaccagcggcgagcgcgaggattccagggtctggcgggcggcaacgtgcgctgcttcgctcgcttgcgccgcggcttcggaagctgccagcgtctcttccgcggtctcgaccagagcggtcagctcgtcgagatcgccaaagccgccagtcgcctcagcgagcttctgctcttccgctgcgacgttcgcgatctcctggtcgagccgggcgagcttgtcgcgatgggtgcggacgttggcttcgagctggttgcgcttcgccgtgaggtcagcgagcgcggtggtgagttcggcgaactgctgctcggtctcggtcagcaccgcctcggcttcggcaacgcgctcgtcgacgcccgagcgcttctcgacgcgcgacttgatctcttccttcagctcggcgtcctcggtgtcgagccgctgcagcgcgacgtcggcgtccatggtctgctgctgggcccgcgagatgtcaccctcgaactgggcgaggcggcgctcgagctcggcgacgcgctccttggcgcgctcttcctcgcggtcgagctgctcgcgcgcattggtcaggcgctggagccccgccgcggcgcgcgcttcggcatcgcgcagcgccggcatttctgcggcgcggatggcctggatgcgggcggcttcggcctggtgctgggtgcgctcggccatttcgcgcaccgcgaggtcgtgggtctgagcggattcgttgacgtcggcatgcgcgccgatccagcgcagatgatacagcgtggcctcggccttgcggaccttggccgcgacctcgcgatagcgcaccgcctggcgggcctgcttcttcaggccttccatctggccggagagctggccgatcacgtcctcgacgcgggtgaggttggtttcggcggccttgagccgcaactcggcctcgtggcggcgggcatgcaggccggcgacgccggcggcgtcttccagcacgcggcggcgctgctcgggcttggcctggatgatctcgccgatcttgccctggtggacgagggccggcgaacgcgcgccggtggcggcatcggcaaacaggatctgcacgtcgcgggcgcgcacgtcgcggccgttgatgcgatagaccgagccggcctcgcgctcgatgcggcgggagatttcaaggatctggctgtcgttcaccgccgccggcgcggtgcgatcggcattgtcgatcgtcatcgtcacttcggcgtggttgcgcgccggacggttgccggagccggcgaagatcaccgcgtccatgtcggccgcgcgcagcgacttgtacgaggtctcacccatcgcccagcgcagcgcttcgacgagattggacttgccgcatccgttgggaccgaccacgccggtcaggccgggctcgatgacgaagtccgtgggctcaacgaaggacttgaagccgtgaaggcgcaggcgggtgattttcataagcacgcatctctgttggcaggcacgaatccccctgcctggacaataccatggaaggcaatgtcgctgtctgggtgagtcgcgcgaggcggctcatgcggctggacaatggccgtggtgcgccgcaagggcaaccagcgaaagccgcttttcccaagggatttgtgccgggaaagatacggctttcgagatgcgaatcaggattgccgcgtgcgaatcagctcttgagcagcggattgatcctcttggcgaattcctcgaacgaggtctcgcccttgatcttctcgccgttgatgaagaacgtcggcgtggagtccaccttcaacacgtcgctggcgtatttctggtcggcggcgatcttgtcgagcagcgcctggtccttcaggcaggcctcgacctgctgctgggtgaggccggcctgcttgccgatccgcgtcagtgtctcggtggtgttcttcatcacccagtcgttctgctggcggaacagcatgtcggtgacctcgaaatatttcggcgcgtcgccattggcaatgcagcgcgacagcatcgaaccggccgcggctttgatgtcgagcgggaactcgcggaaaatgtaacgcaccttcccggtgtcgatgtattccttcttgatcttcgggaacacctgctcgttgaaggtcgcgcaatgcgggcaggtcatcgaggcgtattcggtgatggtgacggcggcatcgttcgggccgagcgccatgtccggcagcgacaccggcttggcgacatccgcggccgattgcgccatggcctccgagatgagacgcagtggcgagagcccggcgaacgcggcgagcccggtcagcgacagcatcgtggtgaaggcgcggcgggggatgatcaaggtcggctcccgggattggcaaggtatcgccccaagggtctactgaattcccgctcgggcggcctgtcgctagcttgaaacctcgtttgaggcaatggcgcgcggcacggacgggtccagattggtcctgaattaaggctcaatttcgcttgatggccgccccaagccgcgccagcgccgtcttcaggtcgtcatcctcgatgtcggtcaggttctccgccgccttcgccacggccttgggatcggggggaccgggacgctttcgggcctggggccgcgacaggggggcttggcggaaggcgagcttgccaaccgcgctccagccgaagaagcgattgacccgctggaggatgacgtccgcagagtgctggatctccagcgccatcgggccctcgacccgcagcaccagggttgcaggctcctgcggctggccctccaccggtcgcggccattgcatcttcagcggctcggcatgggccgcgatctcgggcccggcgatctgcgcccaccgggtcaccagctcgcgcgcggcaaaaccctgcttggcataggcttcggcgaagacgtcgtcgagcaaggtgccgagcggcttggcgctgatggggccgggtttggcggggaatttggacatgaggccttatagcaccctgcgcgacctgccaggaactgctgtcgtcgtggtcaggcttgtcccggctatccacgtctcgccacgaagaaagacgtggatgcctgcgacgagtgcgggcctgacgtggagaggtcgtccctacatcgctacagtgcgagcatgcatctcaaatcggcccgcaaggcgaaatcggaacccgtcccatcgaaacgttcggctcgtccggtcgcgctcctgcaatggtacgatcgccatcggcgccggctgccctggcgcgccgcgccgggggagacctcggacccataccgtgtctggctctcggagatcatgctccagcaaaccacggtgaaggcggtcggaccctatttcgaaaaattcgtcgcgcgctggccggacgtcacggcgcttggccgggcatcactcgatgacgtgctgcggatgtgggccgggctcggctattactcgcgtgcccgcaatctccatgcctgcgcggtgtccgtgacgcgcgagcacggcggcagctttcccgacaccgaggaagctctgcgcgcgctgccggggatcgggccgtatacggcggctgcgattgcggcgattgcgttcgaccgccgcaccatgccggtcgacggcaatatcgaacgggtggtgtcgcggctctttgcagtcgaggaagaactgccgcaggccaaaccgcttatccagcgattggcggcaacgctgctggcggacagtcgcgccggcgacagcgcgcaggcgttgatggatttgggtgcctcgatctgcacgccgaagaagccggcctgctcgctgtgtccgctcaacgaggactgcacggcgcgtgcgcaaggcacccaggaaactttcccacgcaaggcgccgaagaagagcggagcgttgcgtcgcggcgccgctttcgtcgtcacgcgtggcaacgagctgctcgtccgttcaaggcccgaaaagggcctgctcggcggcatgaccgaagtgcccggctcggactggatcgccggccaggacgacgcggcggcgaagctgcaggcgcccgagctgaaggggctgtcgcgctggcagcgcaaggtgggtgtggtcacccacgtcttcacgcatttcccgctggaactggtggtctacaccgcgaaggcggaggcgcgcgcccgtgcgccggcgggcatgcgctgggtgccaatcgcgaccctggccggtgaggcgctgccgaacgtcatgcgcaaggtcatcgcgcacgggctcgagctttcccgagacccatcgtcctgacagaacgctggcagcagggctgcgctatcagcgcagggtatggaggctgccaatggtcaagaccgcgctcgacaattttccaagaccgccctgcgccgagctgctgggctggcggttgctcgacgcccgcccgcaggagggctggatcaagctcggcttcgagggcaagccgcagttctgcaacccagccggattcattcagggcggcatgctctcggccatgcttgacgacaccatgggcccggcggtgctcgtgctgagcgagggccgtctctacaccaccaccatcagcatgaccgtgaactttctcagcccggcaaagcccggtccgatcgttggcgaagccaaggtgacgcagctcggcaagaccatcgccttcgtcgaaggcaagctgatggccgaagacggcaccgtgctggcgacggccagtgcgagcgagcggctgctggaagcggcgagggtggtgggaaagtaactggctcgcggccgctttcccttctccctaaggtggcgcgaagcgccggatgaggggttctgcccgcactcacacatgcagccgaacgagcggagacattcccctcgtccaagtgagcttgcgtccccagtggagctgccctctcccacaaggggcgagagcgcatccatgcgcaactcgcttcgcacgaagtcttaggccaccacccgcttcgtatccttgctcacgatcggcggctttgcattcagcgcttccacctggaaacccgcgacgcgcttgtagttggcggcgatgtcttccagctcctgttgcgacagcacgtcggtgacgactgcaaagccgtcgggcgcgcgctcctcgacgagctgcatcacctgctcggggccgttcttgcggttgagcagcacgagatcggtggtcgcgggccgccgctcggcctcgtaggcgagcagcgcggcttgcgtcggtccatgcgcgagaatctcgcgggtgatgacgcgggcatcgaggatcgcctgcgaggcgccgttcgaaccgatcggatacatcggatgtgcggcgtcgcccatcagcgtgacgcggccgaacgtccattgcgacaccggatcgcggtcgaccaggggatattcataggcgcgcgggcagttcctgatcaggccgggcacgtcgagccagtcgaacgtccagccttcgaaccagggcaagaactcttccagccgcgctgtgcggttgtagtcctcgcgccgccactgataggtcgggggcatatgtcgctcggcgacccagttgatctgataattgccagcggcatccggcgacttgctgatcggatagcagacgaatttcaggatctcgtgtcccgccatgatcatggtgcggccgctgaggaaggctttcgccggcgtcacgccgcgccacaggatgcggccgttccagatcggcgggccttcgcccggatagagcttttcgcgcacggcggaatggatcccgtcggcggcgatcaggatcgcgccgtcgtaaattcctgcagccttgcccgtcgccttgtccacaaattcggcgcgcacaccacccgccgtctcggtccagccggtcagatggtggctggtgaggatgttctcccggccgagccgttcgaccgccgtgtcgagcaggatctgctggaggatgccgcgatggatcgagaattgcggccatttgtagccggcctccagcccgcgcggctcgcgccagatcggcttgccgtgcttggagaaataggcgagctcgctggtccgcacaccgttggcgtcgagcttgtccatcagaccgagctcgatcagctcgcgcaccgcatgcggcagcacgtttatgccgacgccaagcggcttcaattccgcgacactctcgaacactttcacgggaatgccgatttgatgcaggctaagcgcaagcgtcagcccgccgatgccgccaccggcgatgagtaccgtcatgaccaaacccctccaattgcgggcgtcttggcacagccggatggtggtgggcaactgcgaagagcatgcagtgctatggacgtcggggccgacagcggataatttccagctttcccatgaggtccgacatgctcaagctctactacgccaccggcacctgcgcgctcgccacctacatctcgctggaagaggccggcgccgactacacggccgagcggctgagcttcaaggacaaccagcagaacagtccggactatctcgccatcaacccgaaaggtcgcgtcccggccctggtgaccgatcgcggcgtcctgaccgagacgccggcgatgctggcctacatcgcgcaaatgttccccaaggcgaagctcgcgccgctcgacgaccccttcgattttgccgaggtgcagtcgttcaactcctacctttgctcgaccgtccacatcaatcacgcccacaagatgcgcggcgcgcgctgggcgacgcaggagagctcgttcgccgacatgaaggagatggtcccgaagaccatggcagcatgcttcaacctcatcgagcagaagatgttcaaagggccctgggtgatgggcgatcagttcacggtctgcgatccctatctctacacgctgtccaactggctcgaaggcgacagcgtcgacatcaatgcgacgccgaagatcgccgatcatttcaagcgcatgtcggatcggccagcggtgagcaaggtgatggcggcgcagaaggcgtagagaagcggttacatgctccgctgtgtccagggcatgcccgggtcacctgcgcggactcctcgatcgcgttcgggaggaccatcgagtttggcaagcccctctttacgaagccctttgcttgcccagctctcgtcccgtctccagcatcagtcgccgcagccagatcgagcccgggtccatctgcgcccgcgtcgggtagaacatgaactgctcgtcgatccctgggtcgagcggcggcgtcaccgtcgtaaggccgagttgcttcgacagcgcggcgatcagccggcgtggcacgaaggcaacaagatcggtgcgagcggcgacgtgcaacgcttcgagatagcctgacaccaccagcgcgatgtgtcgctcgacattcttggctcgcagccatgtgtcgatcaggtcctcactattgccgcggatgatgacgccgacatggcgcgcggccaagaacgcctcccgctgtttcagcttgccggcgacgggatggccgcgccgcacggccagcgcgtcgctgtcggtatagagcaattggcggtgaaagcccttgaaggcgttgccgatcgagatcacgagatcgatggtgcgggcaaactcggcatgaaaaatcgcgggtccccgccacggcaccacgtcgatgcggacgttgggtgcagcgcgggtcaccttcgccatcaagggcggcatcaacagctcgacggcgagatcgggcatcatcaggcggaagtgccgctcgctgcgcgcggcgtcgaattcatcaggcacgaacagtccgcgcacctggtcgagcgtctgggccagcggcacgcgcagcgccaacccccgtggagtcagctccatgcgcgcgccggtgcgcaccaagagcggatcgccaaaaatgtcgcgcaggcgctggagcgcgtggctcgctgccggctgcgacagtccgagccgtaacgccgcgcggctgacattggcctcgcgcaacaatgcgtcgagcgcggtcagcagattcaggtcaagcgaattcaaattcatgaagtgaatacatatcatatcttctatcgatttgaagaatgccggtcgagcagcgatgttctttgcgatgtcaccacacggagatgccgccatgaatgctgccgccaacaagaagctgatgcaggatatctttgccgccgccgccgatcccgatccggccgcgcgcgaccgggccctgttcaccgccagtcttgccgaggacgctaagtggatcgtgaccgggcaatattcctggtcgcgcaccttctcgggcaaggaggccatcctcaaggatctgcacggatatgtgcgcacgcgcctgcgcgaccgaacccgcaccgtggctcaccgcttcatcgccgatggcgatatcgtcgtggtggaagccaagggcgacaacgtcacgcccgagggcgtgcgctacgacaatgactactgcctggtgtttcgcctcgaggacggcaggatcaaggagatccgcgagtactgcgactcgatcctgacggagcaggcgctcggtccgttcccgcaatcgtccatgggggccgcgcgctgaccggattggaagaggctgcgtccaccgactggcctgcggcgttggtgcgggcctggcggacgctggtgaatcttgtggaggcgcgccgggagcggttccgggtccaccgtcagctcgcggtgatgaccgaacgggagcttcaggattgcggggtctcgcgatcggagatggagtacgaactcaaaaagcgttcgacggaaatagagcgccggacccgggatctctggcctgttcgcaggcgagcaccggcggaacctttgcgttccgccggcgtttttttgtctccgggcgcgcgtcgcccgcggcaatctgcgtcttcgggaaattcatgctggctggggcttcgaacgtttcaacgcaggtgggccacagcttctccggactccgcgaacgactgagggaagcaacgtcggctgcgcaccgcgacctcgacgcgcagctttccgggttcgatctcacgagccctgcgggctatcgcctctttcttcaagccagcgccgccgcgctgcttccgctcgaggccgcgctcgttgcggccggagtcgagcggatctttccggactggctcgaacggtcgcgcagcgccgcgatcgttgccgatctttggtgccttggcagcagcgtgccccgaacggtgcctgttccgccgctgacacgtagcggtgtgctgggcaccatgtatgtgctggagggctcccggctcggtgcgaaattcctgctgaagtcggtcacagacgcggctgatccgcgcctgagcggggcgaccgggtatctcggtcacggcgccggcaaacggctatggcagagctttctgacgaagctcgcaactgaagagcctcgcgacggggacgaggtgatcgtggcggcgcgcactgccttcgccgcattcgagcgggcggcggagcgggcatgaacgaagcggtcaatctcaccaattgcgatcgcgagccgatccacattcctggcagcgtgcagcccttcggcttccttttggctgtgctctcggatttcacgatctgcatggcctcggagaacgtcggcagctttcttggaggcgacgtcgcgggcctgatccagcggccgttatcgaccgtcatctccgaagctgccgtcgaaaacattcgcggccgcgtcgaccatttgagcgggccggatgccaccgaacgactgttcggaatcgagctccaggccggcaagccgctttacgatctctcgattcatttctccggtgtctacctgatcatcgaagcggagccgagcgtccacgagaccggcgtcaattccggcgagctcgttcgcttgatgctcgagcgaatccgcaagacgcgcggcatgacggatcttgcgcgggaggcggctcgccagctcaaggtgctgaccggtttcgaccgggtcatggtttatcagttccatcccgacggctcgggcgaggtgatcgccgagaccgcggaggccgggctcgaatccttcctcggcctgcgctatcccgcatccgatattccgaggcaggcacgggcgctctaccagcgcaactggttgcgcatcatcgccgatatcaatgccgggccagcgacgctgatgtcgacggccacgcacaacgcggggctgctcgacctttcgatgagcgtgctgcgctcggtgtcgccaatccatatcgaatatctgcgcaacatgggtgttgccgcttcgatgtcggtgtcgatcctgcgcgacggcaagctgtggggtctgtttgcctgccatcattattcgccgcgttatatttcgttcgacaaacgcaccgcctccgagctgttcggacagatgttctcgtggattgtggaggggcgcgagcgcgagagcgacgtcgcttatgaagcccgcgctcaccaggttcaggagcggttgatcgagatcgcggcctcgcacgagcacagccggcgcgcgatcgtcgatttcctcggcgactatcgcaggatggtcgatagcgacggcgtggctgtctggtcggacaacaatatcgcgctccaaggcgagacgccgaccgaggacgaggtgaaggacctcgtcgccttcgtcaaccggacttcgcccgggcggatcttcgccaccgccgagatcgccaaggtctatgccgccgggcaggccttccgggaccgcgcggcgggctttctcgccatcccgatctcgcgcacgccgcgggactgcctgatcttcttccggcgagaggtgacgcggtcggtcaaatgggccggcgatcccaataaagtttatgatgaggggccgaacgggccgcgactgacgccgcgcaagagcttcgagctctggcaggagacggtggcggggcagtcgaagccgtggtcggccgccgacatccgcatcgccgagagcctgcgcgtcaccctcctggaagtgatcctgcaactgtccgacctcgccgcgcgcgagcgccgcggggcgcaggagcgccaggaactgatgatcgcggagctcaaccatcgcgtccgcaacattctgagcctcgtccgcgcgctggtggcgcagagcaaggatacggcaaccagcgtggaagaattcgccagcgtgctcggcggccgcatccaagcgctggcgcgcgcccacgaccagatcacaaacctgaactgggccccggtcgcgctccgcaccctggtcgagtccgaggccggcgcctatctcggcgcccgcgcggaacgggtgaagatgggcggcccggacgttgcgctcgatcccaaggcctttgcaacgctggcgcttgtcgtgcacgagatgatgaccaattccgccaaatatggcgcgcttgccgattccaccggaagcgtcgaggtggtctggcgcctcgatccgtcctcgagcctcgtcatcgagtggaaggagagcggcggtccgccggtgcagccgccgtcgcgacgcggcttcgggaccacgatcatcgagcgatcggtgccgttcgatctcaagggcgatgccgaaatccgcttcgatctcctgggcgtgcaggcaaagttcgtcatcccgccaaacttcgtcgaattggtaccgtccatcgcaggagccgccatgcgcgtcgaggaacagcaatccgcccggcccaggatttccgacaccgcgctgatcgtcgaggacaatctgatcatcgcgatggcggctgaggtcatcctgctcgatctcggggcccgccatgtcgacaccgccgcaagcgtcgaccaggcactgcggtcgatcgaacgctcgcgaccgagctttgccctgctcgatctcaacctcggcagcgagagcagcatcaaggtggctcataagctgaaggagatcggggtgcccttcatcttcgcgacagggtacggcgagcgcgcgccgattccggagcagctggcgtcggcgccggtggttcagaagccctacacgctggaagtggtggagaacgcgctcggcaaactgcagcaggcgaacgcccaataatttgtcgtctggtcgacgtatgcagtcccctgcatgcggctgcgcattggcacgcgaactttgcatagctgccgacaaaatcagcaatgtcggtgcgcgttgatccaactcgcgcgaattatttgaaggttcaattaaggagtgtcccccattgtgttgcggtgcagcgtggaccgcagagatgcgacacacggctgccgggggccggtgacgattgccggagtcgttcggcccccgaagtgaaatgcatctggatggacagtgggaatgccgaaattgcgtttgcggatcaggggacgcctgtacgcaggcttcatggccctggtggtggtcggtctggtgatggcagttgttgccgtctggaatttgcagggcgtgcaggatcaggtcgcaagacaatccgcgctctcggacagcacggcgagagtgctggaaatatcagcccatttgcaggcgatccagcgggccaacctgcgctacgtctacgatgccagtgagcccgcgatgaaagaggcgcaagagcgggaaaccgcggcgaccgagctgttgcgggtcagcgcgaagggggcgctctcggaggaacggcgagcgctctacaacggcctcatcgacgacatcgccaaaatgagacgcctgcgtgacaatctcggcgacgccgtcaacgagaccagaacgggcaaggcgaggctgctgccgagtggggaggagctggccgccaagaccggcaagctcgtcgacgtggcgcgcgccgccgtggatgaagatacggcggccctcgttgccgatctcgaatcgagaatcctgctcgtgaggatcgcgaactggcgttttctggcgctccgcgataccaagggcccagcgaccttcagggcgagcgtcgacagggcagcgcaacggctcgcggcacttgaaaagagcccgcaggcggtggagctgcgagctgcgctggcgccggtgaagacctcgctcggaatctacaaatcggccttcgaagccacgtccgcagcgatgcttcaggccgacgagatctaccacaagagcctcgcgcctctcatcgcggacagcatcggcaaactcaaggttgcggagacgacgctaaagaaagactaccaggaatcgcggacgaacgccgacgccgtgatcgccggcacgaccaccgttcaggagatcgccggtggcctcgcaatcctgttcggcggcatcgtcgccttcctgatcgcccgcagcatcgtcggtcccctgacctcgatgacgcaagcgatgggacggcttgccggcggcaatctcgaagtcgagattcccggccgcggcagggccgacgaaatcggcgacatggccaaggcgattcaggtgttcaaggacaacatgatcgacaccgaacgcatgcgcgccgagcaggccgagctcgaggcgggccaggccgagaaccgcaagaaggatatggccagacttgccgatcagttcgagcaggcggtcggcgagatcgtcaacacggtgtcatcggcctcgagcgagctggaggcctccgcaggcactttgaccacgactgccgcgcgcgctcaggacctctcgacggaggttgccagcgcgtcgcaggaggcttccgccaatgtgcaggcggtcgcctcggcgaccgaggagctgtcctcatcggtctccgagattgcgcgccaggtgcaggagtccgcccgcatcgccaccgaggccgtcggtcaggcgagccggaccaacgagcgcgtcggcgcgctctcgaaggccgccgcgcggatcggtgacgtggttgagctgatcagcaccattgccggccagaccaacttgctggcgctgaacgctacgatcgaggccgcgcgtgcgggcgaggccggccgcggctttgcggtggtcgcctccgaggtcaaggcgctcgccgagcagacggcgaaggcgaccggcgagatcgcgcagcagatctccggcatccaggccgcgaccgaggaatcggtcggctcgatcagggagatcagcgtcaccatcgagcggctatcggagatttcgtccgcggtcgcagccgccgtggagcagcagggtgctgcgacgcaggagatctcacgcaacgtccagcaggcggccgacggcacgcagagggtatcgtccaacatcggcgacgtgcagcgcggcgcttcggaaaccggatcggcctcatcgcaggtgttgtcggcagcgcgttcgctctcggccgacagcaaccggctgaagcaggaagtggccaagttcctgaactcggtccacgccgcctgagtctcaaacgcaagaggccacgcgcatgcgcgtggcctcgaacaacgaagtggcgcgatcaggcgacctttgttgtcaagtgcttgaacatgttggcgcgcgcctcatcgtccatctcggccttgaaggtgaacttgtccttcagcgcgaccgcacgcgctgccgccgggcgcgccgagatctcgtcgaccagccgcttcacgttggggtagcgcgcgaacgcgtcgtcgccgagcttgaacggcaccatccgcgcccagccccacagcgccatgtcgacgatcgaatagtcctcaccgaccatgtagcggcggcccttgagatgatcgtcgagaatcttgtaatggcgatcggtctcgtactgatagcggttatgcgcgtagtcgtggttctggtccttcggcgcgaagtgcttgaagtgcacggcttggcccgaatacggccccacgccggtggccacgaacatcagccatgacagcaattcggcgcggttcgagggcaggaatttgccggtcttctcggcgagatagagcaggatggcgttggaatcgaacacgatggtgccgttgtcgtcgatggccggcaccttcccgttcggattgatcttcagatagtccggcgcgaactgctcgcccttgcgggtatcgaccttgaccggttggtacggaagtcccgcttcttccagaaacagcgcgaccttggtcggattcggcgatccgttgaaatagaacttgagcatcgggcatctccccagtgtctattgccgcgcaaacgcagcgtcattgcggccaggcgaactctcttgcctgaagctggtctgaaagagcaaccggcgactttgccgggcggtacctgcgcgtggcgcagaccgggcggcgtaacaaaggccgatcggcgccgtaatgaccgtcgccgcctacggcctcctcccggtggcggcattcggcccgcgccgtcattccggggcatgcctcttggcgcgaacggcatgggccgtggcttgatggagtccgggctcgcgcgccttgcgcgcgccccggaatgtcaggggaggggagttattccgcgcccatacccgcgcggatctcggcgcgcagctcgtcgatcagcctgaggcccttcttggtctcgacgtgccagaaggtccagccgttgcaggcttgtgcgccttgcgccacggcgccgatgcggtggatcgagccgaccttgtcgcccagcatgatggcgccgtcggcgcgcaccagcgcgcccagcttcttcttggcgtcgaacagcttcgtgccgggcatgatcatgccgcgctcgatcagctccgagaacgccacccgcggtgcttcgcgcgcggtcatgaacggggcaaggctctcttccggtagcggctcgaccttggcgatgcgcgcttccgcagccttcgcataggtcttgtcgcgctcgaagccgatataggagcggccgaggcgctttgcgacggcgccggtggtgccggtaccgttgaagggatcgatgacgagatcgccgggcttggacgaggacagcagcacgcgcgcgagcaggccttccggcttctgcgtcggatgcactttcttgccgtcggcgcccttgagtcgctcctcgccggtgcagagcgggatcagccagtcggaccgcgcctggacgtcctcgttggccgccttcagcgcctcgtagttgaacgtgtagccttttgccttctcgtcacgcgcggcccagatcatggtctcgtgcgcgttggtgaagcggcggccgcggaagttcggcatcgggttggtcttgcgccagacgatgtcgttcaggagccagaagccgaggtcctgcatgatcgcgccgacgcgaaagatgttgtgataggagccgatcacccagatcgtcgccgacggcttcatcgcgcggcgggcggccagcagccaggcccgggtgaaatcgtcataggcggcaaacgaatcgaacttgtcccagtcgtcattgacggcatcgacatgggattcgtcggggcgcttgagatcgcccttgagctggagattgtagggcggatctgcgaacaccagatcgacgctacctgcctgaagcttcgacatctcggcgacgcaatcaccgaggatgattcgatgcgacggggactcaaaatttgtgcggggcgcccttgcagacgccccgcgacgcgactctaccatgactcaagaactctgactcaggcgacgctgtcggcgacgcgggaccaaacaaccgactggccgttacattgaagcggcaaagtaaaaatcggcttaatccgccgctttcgtgagcagccctcgcatcgccgttcgtccgcgcatcgtcgtacgcgtctgccgtgttttacagtgtatttcgcgcttgctcggctcgcgaacgcaatcgtggctgcaaaaaggctgcaaaattctctcggaaaaacttgctcggcgctcggaaaaaaattgctggcatcggcaggctgccgcactaggcaatttttgccggccacgatattgataaaagcaacggaaattttacctgtgtggcgcgttgagctttcgcgttgctgtgcgccgtcgaaattgaatcagggaccccagaggaaaggccgccatgcgctacgatgacttccgccgcagcgacgacatcgaggatcgtcgcgacgaaggtggcggctttggcggcggcggaggaggcggcttcggcctgccgatgggcggcggcgggctcggcatcggcaccatcatcatcctcggcctggtcggttacgccttcggtatcgatccgcggatcctgatcggcggcgccgagattctgaccggcggcggccatgcgccgagctatcagaccgatcgtcaggcgtcctcgggcaagcgcggcgcgccgaccgacgagatgggcagcatgatctccggaatcctcggcgaactcgacgatcgctggagcgagatcttcaaggccaacggacagtcctacaccggtccgaagatcgtgctgttccgcaacgccaccaatggcggccgctgcggcatggcacagtcggcaatggggccgttctactgtccgcccgaccggaccatcttcctcgacacggccttcttccgcgaagtcgagacgcgctttcgcggctgctccggcaagtcggcgtgcaatttcaccaccgcctacatcatcgcgcatgaagtcggccatcacatccagaacctgctcggcatcattccgcgcgtaacgcggctgcaacagcaggtcggctcgaaggccgaggccaacgcgctccaggtgaaggtcgaattgcaggccgactgcctgtccggcgtctgggtcaaccgcgaggcgaagaaacgtccgaacttcctggagcccggcgacatcgaggccgcgctgaccacggcgagcgcgatcggcgatgatacgctgcagcgccaggcgacgggccgcgtcgtgccggattccttcacccacggctcggcggcgcaacgcaagcaatggttcatgaccggctaccagcagggcacggtccaggcctgcaacacgttcggcccgggagcgttgtagaccaggcctcattccccggacgctgcgcgaggctgatgcgccgaacctagtccgggacacgagagacgtatcatggcttccatcgacgcgacaaaacagttcatcccgctcaacatcgcggtgctcaccgtatccgacacgcgcgcgctcgccgacgacaagtccggccagacgctggtcgaccgcctcaccgcggccggccatcatctcgccgcgcgcgagatcgtcacggacgacgtcgaggcgatccgggccgtgatccgccgctggattgccgatggcggaatcgacgtcgtcatcaccaccggcggcaccggttttaccggacgcgacgtcacgccggaggcgatcgagccgctgttcgagaagcgcatggatggtttctcgatcgcgttccacatgctgagtcatgccaagatcgggacgtcgacgatccagagccgcgccaccgcgggcgtcgcgggcgcaacctacatcttctgtctgcctggctcgccgggcgcctgccgcgatggttgggacggcatcctcgcagcccagctcgattaccgcacgcggccctgcaatttcgtggagatcatgccgcggctggacgagcatttgcgccggccgaaggcgcaaggcgcgacggtgtaaatgcggacttcttccttctcccctagcgggaaaggtggcgcgaggcgccggatgaccgggtctccacgcgcgcaccgacgttcgcggggacatacccctctcccaagcgagcttgtatcttccggcgccgctgccctctcccgcaaggggcgagggcacatcaatgctcatctcgctcgctgccatagacgcccggtgcgggtcacaggtccatttcccaggtctccccgatcaagtcttgcccaaaactatggtgcggttcggaggcgacgagcttgaaccccgcgctctgatagatgccccgtgcggcaaccaggacgctttgcgtccacagcgtcatcttgttgtagccccgctcgcgggcgccctggatgcattgctcgaccagcgcgcgaccgacgccgagtccccgtgctttcttctccacctgcaacaggcgcagcttggcggtctcgtcggtggccttgaccaggaagatcgagccgatcggctcgccgcccgcttccgcgatccagcaatgctcgcgcgcggcatcgtagttcttgatgaactgcgcgcagatctcggcaaccagtgcctcgtagctgatgtcccagttgtagtcctccgcgtaggcgatcgcctgccgggagatgacccagcccatgtcgccgacgcggtggctgcgcagcatgaaagccgcgggcctgctttgacgttgctccagcacgtcctcgatggttgccatggcctgcgtgagccgcgtcgcatcgccgggcgagacccgagccagcattgctgcgacctcgttctgcgagttgaggttcagcttggcaaaggcctggcggcccttggcggtaaggctgagctggtattgcctgcgatccgtggcgagcggtttccgcgaaatcagtcccttctcgtcgaagccctgaacgatgcggctgagatagccggggtcgagaccaagctcgtttccgatctcctttgctgcaagctcttcgcgctgcgccagttcgtagagcacgcgcgcctcgctgagcgaaaagggactcttgccgaggtgctggtcgagcacgccgagcttgcgggtatagaagcggttgaaggcgcggacggctgcgatctgcgcgtttgcgacctgttcggccgccggatctgatagctgggatgtcatgggatcacctcgatgatgattgccattgtcaagcaattatttgactacggcaagtatctggtgattcagccggtcatgacgatccggctgcgcagcatggtccgggacgaccggccgagccgccggagcagccgtgcctcggaatggcgggcgggggcggatagccgccgatgcggtcgtaatggtcacgcgcgatcaaaagcccctgatcgccgagcggaccgaccagcttgcgcagtacgccccagagaatgtcgcgcattgcggtatcagcgtacggggaacgggcatagcggaacactgccgcccgatcccggccgctcgtggcgacggcctggatgaattgggtggtttcttcgatccagccggtttccagcacggcgccggccggcaggaacatcagccacggcgatcgggcctggagcgcgccggcagcgagcgcagcgccttgggaggacccctcgtagccgatgaagcggcagccggcgacgtcggcaacgcgctcgatgacgccgttgcgcgcaccgtcgaccagaaggacctcgcggatgacacccgcagccgcgccggggaccagcgcggccagggttgctaccgccgtctgctcgacaccgtcggtcggaatgatgacgctcagcatgattgaggcttcagtgtctgcacttcgggagaagcgtagcaatccataaagttgtcataaacccctaccgttgccgagtgcaactttccggcggtgtttgggcgtgcgatggtaaactgcagccttcatcgcacccgaatatgtcacgccggggctggtattattgccaaatgtttcggcacaagctcatccaggcgcaattaacccggagtcccatggcgacagttcgcggcgccggcaactggcgtctctcagggagcgtcctgccaggtttgtcgaatggaaaatgcttgatcttgatgctccggggagatctcacatgaacgccgatcagcttgccgcaggcacggcgccgacgtcgccgaaggaggccgcgccgaccttgcggatccgggcgctgatgctgggcgaccgcatcaatgcgtcgggcctggaaatcggcacgctcgtgtcctcgacgccggctgcctttcgcgtccatggcggtcttgccgtgatctttcgctacggcgtcgtcgtgctgattgggctgcttccgtccgaggagaaggtccttatcgacaatctgaagccgcgcgtgaccggagagctcagcccgtacgaggaggagatcgcgcaggcgcagctctgcaacgacgaagccgcagaggcgatccagccgggagggccgatctgccttgccaaattctccgacgaccggctgctgctggttgcggatgcgctcgccaagagcacgtcgctggcgcgcgacgagcggcgcgtcgccgcggtcttcgacgtgatcgagccgtttgcacgggagctcgccgagcatggccgcacgccgcaacggcgcaagggcatcctgcaattgatcggcaacgcgctgctggtgcagcagcgcgtcgccggccgcgtcgccatcgccgagaagcccgacgtgctctgggagaagcccgagctcgaccggctctattcgcgtctggaggacgagtatgaattgaaggagcgcctcgacacgctcgagcgcaagctctccgcggtgtcggagaccgccaacgcgctgaccgacatcatcgacacccagcgctcgctccgcctggagatcgccgtcgtggtgctgatcctgatcgaggtcgcgatggggacttttcagctcctgaccggccgcggtcactaggcatgatccggaaaagtgcgaagcggttttccggaaggatcatgcgtgaacaagaacctaaagcgcgacgaggattcatcagaatctcatcgcgcctcaaggcgtggcggcgcgcctgtcatgctggccggcttgcgcctgccacgccgcaatctcggcaagcgcggcctcgggccgtgtccggatcgtctcgcagcgtccgagatagagctctccggcgtcgccttcgatcgtgatccactcgccttcggcaagtgagagattgccgagctgggcccgcttcgcgatgggatcgatcttcagatcacggcagccgaccacgcagggcttgcccatttgtcgcgccaccagggccgcatgcgaggtacgtgcaccgaccgatgtgacgatgccggcagcaagcgcgaagcctgcgacatcggcagtgctggtgtcgggacgcagcaggatgaccggctcgccccccgccgaaaggcgctgggcgcattccgacgagaacgccgcacgcccggtgccgatgccgcccgaggcgccgatgccggtcgtcgcgggcctgcccggagcaaccaatctggtttctgtgagcgaggcgaggtcgatcccagcaatccgctgcaatgcctccgccttcgagatcaagccttcatgcacgaggtcgatcgcgatcctgacggcggcccgtggcgtgcgcttggccgcccgggtctggaggatccagagcctgccgttctcgacggtgaactcgacgtcctggacatcgacgaatgcgtgctcgagtcgcctcaggatgtcgccaagctccgattcgagcttcggcagctcgcgcttgatcgcctcggcagcatcaggcgcgcgtctcccggaaacgacgtcttcgccctgcgcatcgagcacgaggtcgatcatcgggcgcggcgcgccggtcgacggatcgcgggagaaggccacgcccgcgccggaggcaagaccgccgttgccgaacaccatcgcctgcacggtcaccgcggtgccctcgagcgcttcgagatgctggaggcttcgataagtcagcgcacgctcgctcatccaggagcgatagactgcctgagctgcggcctccaattgcgtgaacgcatcatccagcaggccatcggcgcgatcctcgaccagcgcctgctcgcggctggcgagccgctcgagcgcttcgctgtcgagctcgcggtcgctgtcgacgtgttcggctgcgacgagctccgagatgcatgcggcaaagctggcctggtcgagctcgagcactgtctcgccaaagctctccaggaagcggcgccggcaatcccaggcgagccgcggccggccggtcgcccggatcaggccgtgcacggcgtcgaccgtgcagccgacattgagaacggtgtcgagcatgcccggcatggatcgcgccgctcccgagcgcaccgacaccaggagcggccgtcggcggtctccgaaacgctttccggtggcgctctccaggaacgatattccctccttcaagccatcgcgcaggtgccgcgtggcatgcgcctggccggcgatgatctcggcgcagagcttgaccgggagcacgaaggcaggcggcactggcaggccgagcgctgccatgcgggccagattggcggccttggcgccgatctcttcggcaggccgcaattcggcggcgtcagcgccgatgcgcacgatatgcatggtggtcccctcaagctgcgagatcgatcatgatgtgacggcggagcaggtggccaaacgcggcgaagcgatcggtggcgcgctcgacggcgcgggcgagctcgatcaccgacagcgaggtcgcgacgtcgaagccgccgcagaagaccagtgcggtcgtcgcgcgttcgcggctgtcggcggcgtgttcggcgtcgatgaggcgggtcacagcggagagcgcgtcttcggaatcggcgcgccgaccttccggcacgtcgatcgcagcggcgacgccgctcgcggccacgtcggttgcggtcgcggccactgcgcaaagctcgaccagcgatgccagcagggccggatcagtcgtttccggcatcagcgacgcgatgaatgcggcctgctccagctcgtcgacagcctcctcgacgcgatcgatcaattggccgatcagcgggcgggcattgaggcgatcgacttcgttgcgactctcgatcgcgattctgtccgccttctgctcgatcatgccgcagcgttgcgtcagcagcttgccgtcggcgggctgaccggcttgcagcgcggcaatgtgacgtgagatggcggcgacgagatcatgggcgaggccgatctgacgcagcaccgccgccagcagtgcgccgtcgacgcgatccaggtgccgcatcagatcggcttcgatctggtcgcgcaccgtcctgaccgatcggcccgcaagcaatgcctcggttgaggctcgcaacgatgccttcagaaaatcgattgcggcggtgcggccgagcgcctgatcgagccgctcgccgaagccgatccgcgtgggggcggcgtttcggacggcagatcccagcagatcgttgccgccgagttcaagaaagccgcgatggccgatccgctgacgcgccgcccattccaggatgcgtgccgcgtcgtccttggcaacccaggtcctgagcagcttgcgcgccttgttccagtcgatcagaaagaccagtgcggcacccagcgccgcgaggaattcgttgcgatcggcagcgtggtccggctgatactgcccggtgacgagatagaaggaattgtcgtcgccaaggcccgctgcggtgtgacgatcgagcccgctccacgtcgcctcgaatgcgtcgaacagcgagatgaagaacttcgcccgcgccagatgcacatcggtgtaggtgacggtgaccgcgttcttcttcaccgcgatcacgacgacgtgggcgtccgtggtgccgatatcgttctggatgagcagccggccgccggcgcgtgtagccatggtgtcgagaccgggatgatcgaacttgagacctcgcgtcgcgttcaggcccttcatgaaagctgcgaccgccggccggtcctcgctgtgcaggccgaagacatgggcgccgtcgagcgcttcttccgagcagcttgcggcaagcctgttgagctgcttgtgcagatccatcacgagacgatgcaggctgtcaccgcctgcgtcgccgacgccggtcaggcgtgcgatgcgcgagagctcgatctcgccgctcgcatggagcagaccggctgcgcggatcgcctcgagccgcgcctgtgccctctcgccttcgcttgccgcgccggcgctgacggcgcggatcatggccgcggcatcgtccgcaatctcctgcatcatcttcgcaagatcgggagccgcgagccggccttgtccgatcagatgggcgccgccgatcagcgccgcgatggccgcgggagcgatgcctgcagtctgactttcgacaccaaggtcattcgcaggccggccgggctcctgcgcatgcagggccgccgcctgcaacgcgctcatccgcaccttgatgcggtcgttggcggccagcccttccgccaccagcgcgggcagcaggatgccgccttgtccgagctcttcgatgatgtgggttttcatgatctgtccgcaaccaggattgatgccgtctctttgccgcgaagacgcggggacagcattgcggcagatcattcataaaaatgtcacgtgacacgacgttcacggatcagagcggcgcaatggcgcgcgatcgtcatctcttcgttggtgggaatgacgaagacatcgacgttgctgccgctgccgtcgatgcgctcgcgcgcagcatcatttgccgcaacatcgatgcgcacgcccatccaggcgaggcgctcgctgattgcgccgcgaatttccctggcatgctcgccgatgccgccagtgaagaccaggcagtccaggccgccgagcgtggtcgccatcatcgcgacctgctgcgccgcccggaaggtgaagagatcgaccgcatcccgcgccgcaacctcgccgctcgcgagcagcgtacgcatgtccgccgagatgccggaaacgccgaaaaggccagactcgtgatagagcaggcgctggatctcctcgaccgacatgttctcatgctgctgcagatagagcagcacgcccggatcgatcgtgccgcagcgagtccccatcacgaggccatcgagcggcgtcagtcccatcgtggtgtcgacgctgcggccgtcgcgcaacgcgcagaggctggcgccgttgccgagatgggcgatcaccgtgcgctttgcgaagagttccggcgcgatctcggcgagccggcccgcgacatattcgaatgagaggccgtgaaagccataacgcctgacgccacgcgcctcgaagcgccttggaatggcgaagcggcgcgccgggggtgccaggccgtgatggaaggcggtgtcgaaacacgcgatctgcgtcagcccgggccggatcgctccgagcgtgcggaccggcgcaaggcagcgcggctggtgcagcggcgccagcggcgtcagcccctcgagctttgcggtgatgccgtccgtcaggatcagcgggcccgaatagtcgggccccccatggacgatgcggtgaccgacggcgcggaggctgcgtttgccgaagcggtcctcgatgaaggcgagcacttcggcgaacagatggccgccatcggcgtccgaaacctccctccgggtctcgaacaggtcttcgtccgcggggcccttcaccacgagccggggttttgcgtcgtgctcgtcgagaagccccttgcaaagcagggcaggctcggttcccgagacatcgaacaggccgaacttgatgctcgacgatcccgagttgaggacgaggaccgtgtccgacatcgctagtcgccggcttcggccggcgtgttgccgccggcactgttttgccacacccagtcgcggatctcgggcatgtcctcgccatgctcgcgaacatagcgggagtgctcgatcagcttgtcgcggaactgttgcttcacccgcgcggctttggtcgcaagccccggcacgcgttcgatcgcctcgatcgccaaatggtagcggtccagctcgttgagcacgaccatgtcgaacggcgtcgtcgtggtgccttcctcggcaaagccgcgcacatgcatgccggcatggttggtgcggctataggtcagccggtggatcaggtaggggtagccgtgataggcgaaaatcaccggcttttcgcgcgtgaacaggccgtcgaagtcgcgatcggagaggccgtgcgggtgttgctcccttggctgcagagtcatcaggtcgacgacgttgacgacgcgaatcttcaggtccggcagcgccttgcgcaggaggtcgacggcggcgagcgtctccaacgtcggcacgtcgccggcgcaggccatgaccacgtcgggctcaccctgtccgtcttccgttccggcccagccccagatgccgatgccggcagcgcaatgggtcgcagcgtcctgcatcgagagccactgcggcgccggctgcttgccggcgacgatcacgttgatgcggttgtaggtacgcaggcagtgatcggcgatccatagcagcgtgttggcgtcgggcggaaagtagatgcggacgatatcggccttcttgttggcgaccagatcgacgaagccgggatcctggtggctgaagccgttatggtcctggcgccagacatgcgaggtcaggagataattgagcgaggcgatcgggcgtcgccacggcagatcccgcgtcaccttgagccatttggcgtgctggttgaacatggaatccacgatgtggatgaaagcctcgtagcaggagaagaagccgtgccgtcccgtgaggagatagccctcgagccaaccctggcagagatgctcgctcaacacctccatcacgcgcccgtcctgggcgaggtgcacgtcgtagggctcggtcggctccatccagacgcgttcggtggcttcgaatacggcgtccagccggtttgacgccgtctcgtccggtcccatgatgcggaagttgcgctccttcgcgttgaggcggatcacctcgcacaggaatttgccaagttcgcgcgttgcttccgcaatgacttcgccgggctgtggaacgtccacggcgaagctgcgaaagtccggcagcttcagctctttcttgagcaggccaccattggcatgtggattggcgcccatgcgcctgacaccttcgggcgcgagcgcttgaagctcgggaatgagcgctccgctggcatcgaacagctcttcgggctggtagctgcgcatccagtcctcgaggatcttcagatgcgccgggttctcgcggcacgctgaaacgggcacctgatgcgcgcgccaaaacccttcgaccttcttgccgtccacctccttcggaccggtccagcccttcgggctgcgcagcacgatcatcggccagcgcggccgctcgacgcttctgcgtccgtcccgcgcatgctgctggatcgagcggatgctgacgaacgcgacgtcgagcgcatcggccatggcctggtgcatcaatttggggtcgtcgccttcgacgaatagcggctcatggccgaaaccgcggaagagatcacggatctcgctgtcgggcatccgtcccaggacggtgggatttgcgatcttgtagccgttgagatgcaggataggcagcaccgcgccgtcatgggccgggctcaggaacttgttcgaatgccaggacgcggccagcgggccggtctcggcctcgccgtcgccaacgacgcaggcgacgatcaagtcgggattgtcgaacgccgcgccataggcgtgcaccagcgcgtaaccgagctcgccgccctcatggatcgagccgggcgtttccggcgccgcatgactcgggatgcctccggggaaggagaactgcctgaacagcttgcgcattccgtccgcatcgcgcgcgacgtcgggataaatctcgctgtagctgccttccagataggtgttggcaaccatgccggggccgccatggccgggaccgcagacgtagatgacgttgagatccagcgcgcagatgacgcgattgagatgggcatagatgaagttcaggccaggcgtcgtgccccaatggccgagcagacgcggcttgatgtgttcgggccgtagtggctcgcgcagcagcggattgtcgagcaggtagatttgcccgacggagaggtagttggcggcgcgccaatagcgatcgagcagatcgaggtcgccggtcgcggcggccgcttttcgttgaattgtcatgttcccgtcggctttcacccagcgatcgtcaccaactttgttccgggacgattgatcccagtgcttggatgaaacgaaatcgtcgtgacaggcatgttgcgagacgtcaaaggcgcgcgcccgaaatttgggcagctactgtgcatggggttgttttcacgtttttggtttgcgttcttgatttgttcccatggcgtgctatcttggcttcatgagtccagcatcctctcatgctctcaagcacccgccggtcacggcgccctccgagccggcgggtgcgccttcagatttcccggagcttggcgtcgccatcgaccgcgtgcgccggcgagggcggggcgcccagtccaacgtcagcggccgctacgagcccgaggcccgcgtcgccttcgatgacggctggcagagcctggaacagctgccgcccttcaagaccacggtcgccatcgacacctcacgcaaggtgatcacccgcaacgactcgcccgacatcggcttcgaccgctccatcaatccctatcgcggctgcgagcacggctgcgtctattgcttcgcgcggccgactcacgcctacctcggcctgtcgccagggctggacttcgaatccaagctgttcgccaagcccgaggcgccggcgctgctcgaaaaggagctcgccgcgtcaggctatgagccgcggatgatcgcaatcggcaccaacaccgatccgtaccagccgatcgagcgcgagcgaaagatcatgcgcggcatcctcgaggtgctggaacgcgccggccatccggtcggcatcgtcaccaaatcagccctggtggtgcgcgacatcgacattctcgcgcggatggccaagcgcaatctggccaaggtcgcaatctccgtgacctcgctcgatccgaagctggcgcgcaccatggagccgcgggcctcgacaccatcaaagcggctcgaggcattgaagcagctctcggaggccggcattccgacgaccgtgatggttgcgcccgtgattcccgcgctgaatgattcggagatcgagcggatcctcgatgctgcggcccacgccggcgtcaaggaagccgcctatgtgctgcttcggctgccgctcgaggtccgcgatctcttccgcgaatggctgatggcgaactatccggaccgctatcgtcacgtcttcacgctgatccgcgacatgcgtggcggacgcgactacgatgcgaaatggggcgagcggatgaagggcaccggaccgatggcttggaccatcggccgccgttttgagatcgcctgcgaaaggctcggcctcaacaagcggcgctcgaagctgacgacggatcatttcgcgcggccgaagcggaacggcgatcagctcagcctgttttgagcggacacgtgcaataggtgtcgcatggttaaggagctcgccgtgcctgtgccgcggctgaccgtcatcacgctgggtgtgagcgacatccgcgccagcatcgccttttacgacgcgctcggcttctcacgccggctgaaggtaacgggggaggcggtcgcattctacgataccggtggggcggtgctcgccttgtatccgtgggatcagctcgcggcagacgcgaccttgccggaccagccgcggccggcggcctttcgtggcgtgacgctcgcatggaactgccggacgcgggaggaggtcgatgcggtgttggcctttgccctcaggaagggggcctccttgctgaaagccgcgcacgagacccactacggcggctattccggctattttgccgatcccgacgcacatgcctgggaagtggtggtcgcgccgggcatcgaggtgggcgacgaccggcgtgtgcatctggcggagtagggcgcagcctgaatagcgggaattaccctgggttcccggttgcgctggcgaagcgccttgcgcacgatccggccatgattcgggacaagtccgccaggaacccagccaaagacgcgcccaagaaggaggctgcggggaaggttgcgcctgcgaaggcggccaagacgcctgcggccaagacctctacgggcaaggctccgaagcttgctgttggcaagagagggatcatcgccattgctccccccagcttccggcgtgagcgcgcgctgatcaagcgcggcatctggccggtcgcggggtgcgacgaggccggtcgcggaccgcttgccggccccgtggtggcggcggcggtgattatcgatcccgaccgcatcccgcgcggcatcgacgattccaagcggctgaccgccggggagcgcgagaagctgttcgacaagatctgcgccagcgcgcaggtgtcggtcgccgtcgcctcgcccgcccggatcgaccgcgacaatattctgcgtgcctcgctgtgggcgctgaagcgcgcggtggtcgcactgcccgagccgccgaggcacgtcttcgtcgacggccgcgaccggctcgacaccgaatgcgactgcgaggccgtgatcggcggcgatggtatcgtgctgtcgatcgcagcggcgtccatcatcgccaaggtcacccgcgaccggctgatgtgcgcgctggcgcaggactgccccggctacggtttcgagcagcacaagggctacgccgtgcccgagcatctcgacgctctcgatcgtctcggcccctccattcaccaccgcagcttcttcgcccccgtcgccgccgcccgcgccaagcacatgccgtggaccgtcgagccggtgcaggatctgttctcggtggtcgatgcagaggtgcaggtggaggcgagcgtcgagattgacgcggctgccagcctctagggttggctcgacagcttctccatcgtcagggccgggcttgacccggccatcgcgtctttccgcggcacgaagaacgtggatggccgcaacaagcccgggcatgacgagcaaaccgtcgttgccacagcgtgtgacgccctttatcaaaacagatgtgagcgaatagggccggctggactggctgcatctttcggacgttgcatgcggtttacctccctggtcatcgagctcattcgcgcccggccgcggctgatcgtctggatcgccgtgctgctgcaggccgcgatgtggctgtttgtggcgctggtgttctatcgcagcccgcccggcaacctcgcgaccctcctggccttcggcagggaataccaggtcggcaccgatctcggcccgccgctgccggtctggctcgctgacatcgcctatcgcgccgccggcggccacatgttcggcgtctatgtgctcgcccagctctgcgagatcgcggccttcatcgcactctatcatctctcacgcgccgtggtcggttcgcagcaggcggtgctcgccgtgctgctgaccatgacggtgctggccttctcctcgcctgcgctcgacttcggccctttggtgctggcgcggccgctctgggcgctgttgctgctgcactcctggcagatcatcggtcaacgtcgcggcaatgcctggttcgcctggtcgatcgaagcggggctgttgctgctgaccacacctgcggcgatctttctcctcctgctgatcgtcgtcttcgcgctctcgaccgccgggggccgccgaacgctgcgcgggctcgatccgctgtttgcgctgatcgttgtcgcggtgctggcactgccctatgcggtgtggctggtgcgtgccgagacattgaccatgccggcactgccgcaagtatcggagctaaaagcccgcgcgctgcacgcggcctggctgttgggcgggctggcgctcggggcggccgccatcccggcgctgaccttcctcaacaccggcctgttcgccggcaagggcgaggagccgccgatcatctaccgcccgccggtcgagccgcttgcgcgcagcttcgtcttttacttcgcgctggctacgccgctcggagccgtgctgatctcgagcctgctaggaatcgacgccgtcgtcggcgggcccggtgtcgtgctgatcatgtccggacttgccgtggtcgttacggccggagatctcatcgccatgcgccgcacacggatgctgcgcacggtatggactgcggccgtcgtggcgcccgccgccggcatggtgctcgccgtcctgttcttgccctggacgggcgccaacgagattgcgacctcgatgccagcgcgggcgatctcggacttcttcgatgagagctttgcccgccgcaccaaccatcgcctgcgcgccgtcgccggcgaaacccagcttgccagcctgatcgcgctgcattccggccggccgcacctcttcatcgacgccgaccctgcgcgcacgccgtggatgaatcagaccaaattcagcgagaccggcggcgtcgtggtctggcgcgcttccgacaccgccggcacgccgccgccggacattctcaaacgattcccggacatcgtgccggaagtgccgcgcgccttcgaatggctggtcaccggccgccagcagctgctgcgcatcggctgggccatcgtgcggccgaaggggacgtaggcctggagtagttacacggccccttgggccagcaccttcgcgatcgcgcgcagatcctgccaggcgagccgcttgtacgatggcgagcgcaacagatacgccgggtggaacgtcggcagcgcgcggatggtgcggccacctgtgtcatagtcgaaccaacgaccgcgggtgcgcatgatgccctcgcgcgttccgagcagcgtctgcgtcgagggattgccgagtgtcaccagcacgtcggggttcacgagctcgatgtggcgcttgatgaagggcaggcagatttgcgtctcctgcggcgtcggcgtgcggttgccgggcggccgccacggaatgacgttggcgatgtaggcggtggtgcggtttagcccgatcgcgccgatcatgaggtcgagcagcttgccgctacgtccgacgaaggggagcccttcgatatcctcgtcgcgccccggagcttcgccgacgaacatgatgcgcgcctgcggattgccgtcggcgaacaccagccgcgtcgccgtgtgcttcagcgcacagccttcaaagccctgcatcagctcgcgcaacgcctccagtgtcggcgcagtgcgcgcggcctcgcgagcggacgcgatcgcgacatcgggtgcaggggcagcttcgccccgcatcactgcgggcgcgacgaccggccgcggcgcttcgaccggaggtgccgcacgtggagccggtggcgggacgtccaattccgccaggcggtcgatcggttcctccgcgagcgcgcagtcgaccccggcctccagatagaaggcgagaagctctcggacggtgggtgcgggctcggggatcatgggaaagtctgacttttataccaccttgggcggccttgcatcccagcggaatgcatttccgaggttgtcctacccggaaaaatcggaaacaaggaggcgcaaacgaccgaggaccgtctcaagggctgagatcagatgagcatcgaagaacttcccccgcgcgaatccatggaattcgacgtcgtcatcgtcggcgccggcccctcgggtctgtcggccgcgatccggctgaagcagctcaatgccgatctcaacgtcgtcgtggtggagaagggctccgaggtcggcgcgcacattctctcgggcgccgtgatcgatccggccgggctcgacaagctgatcccggactggcgagaggattcggactgtccgctcaagactgaggtgaaggacgaccgcttctactggatgacggctggcggtgcgatcaagctgccgaacttcatgatgccgccgctgatgaacaatcatcactgctacatcggctcgctcggcaatgtctgccgctggctggcgcgcagggccgaggcgctgggggttgagatctatcccggctttgccgccgccgaggtgctctatgacgaggagggcaaggtcaagggcatcgccaccggcgacatgggcgtcggccgcgacggcaagccgaaggactccttcacccgcggcatggaattgctcggcaagtatacgctgttcgccgaaggcgcccgcggaagcctgaccaagcagctcatcaacaagtttgcgctcgatgccaagagcgagccgccgaagttcggcatcggcctcaaggaggtctggcagatcgatcccgccaagcaccagaagggaatgatccagcattccttcggctggccgctcgatatgaagacgggcggcggctcgttcctctatcactacgacgacaatctcgtcgccgtcggcttcgtcgtgcatctcaactacgacgatccctatctctcgccgttcgacgagtttcagcgcttcaagacccatccctcgatccgcggcaccttcgaaggcgccaagcggctcgcttacggcgcccgcgcaatcaccgagggcggctatcagtcggtgccgaagctcagcttccctggcggtgcgctgatcggctgcgcggccggcttcgtcaatgtgccgcgcatcaagggtgtgcacaatgcaatgggcaccggcatgctcgccgcggaacacgtcgccagtgcgctcgcggccgagcgcgccaacgacgaagtcgtcgagtacgagaatgcgtggcgttcgtcctccgtgggcaaggatctgttcctggtccgcaacgtcaagccgctgtggtcgaagttcggcaccgtgctcggcgtcgcgctcggcggcttcgacatgtggtgcaacacgctgttcggcgcttcgctgttcggcacgcagtcccatctcaagcatgatcgcgccacgctcgatccggccaagcagcacgcgcccaagaactacccgaagcccgacggcaagatcaccttcgacaagctgtcctcggtgttcctgtccaacaccaatcacgaggaggaccagccggtccatctgaaggtcgccgacatgaacctccagaagacctcggagcacgacgtctacgccgggccctcgaaccgctattgcccggccggcgtctatgagtggatcgaggaagggtccggcccgcgcttccagatcaacgcccagaattgcgtccactgcaaaacctgcgacgtgaaggaccccaacggcaacattacctgggttcccccggagggcggcgggggtccgaattacgaggcgatgtaagcccaggtgaacaaggtgacctggcgcacgttcgcgtgaggacccggctgcggctacccgccgcggccacgataaggccacagtaacggcgtcttggggcgctcttggcggattcgcttggccgatttgggtatgcggcgggaacgccggtccgaatccttgcggcgaagcgccaaaagcggcattgtcggcctgacggttccgggtcccaatgctaccggccgcgtttgcatgcgatacggccttctgttgcaaatccaggcactaccaactcaaggcgagccctgatgttttcaaatcgtttcaaccgctggactgttgccgccatcgctctcatgggcaccgcgatcgcgacgctccccggcgcgggcctggcgcagacgccggatcatccggagaatacggcggcacagtttccgacacgaaacgatctgaagtcgctcacgggcgccggcagctatctcgccgcccgccatgccagcgtcgagcgcgatgccgcctcggccgccgcattctaccgctcggcgctgcgcaccgatccgaagaacaatgaattgctcgaccgtgccttcatctcttcggtcgccgacggcgacatcgaggaggcggtcaagctggccgaacgcatcctcaccatcgacaggaccaaccgcgtcgcgcgtctcgtcgtcggcgtgcatgatctcaagctgaagaagtacgcggccgcgcagaccaacatcaaccagtcgatccgcggcccgatcaccgatcttgtcgccacgctgctgtccggctgggccgcttatggtgcgggcgatgccaagggtggtgtcgccaccatcgacaagctggcaggaccggaatggtatccgctgttcaaggacctccatgccggcatgatcctggagctctcgggcaaggagaaggatgccggcacccggttcgagcgcgcctacaagctcgacgactcaatgctgcgcgtgaccgaggcctatgcgcgctggctatcgcgccacaaggaatccgccgcggccaccgccgtctatcaggccttcgacaagaagctcgcgcgccatcctttgatccaggaaggcctgcgcgagaccaaggccggcaaaaagatgccgccgctggtcgattccgcgcaggcgggcgcggccgaagcgctctacgggatcggcgctacgctgacccgccgcggcggcgaggatctggcgctggtttatcttcagctctcgctctacctgcagccaacccacccgctggcgctgctctcgctcgccgatctctatgaatcggtgaagcggccgaagatggcgatcaaggtctatgagcgcgtgccggcgacctcgccgctcaagcgcaatgcacagatccagctcgccatcgatctcgattccgccgaccgcaccgaagaggcgatcaagatcctcaaaggtgtcacgtcggaggatcccaaggatctcgaagccatcatggcgctcggcaacatcgagcgtggccgcaagaggttcggcgactgcggcgcgacctattcgctgggaatcgacgtgctgccgcccggcaacgacaaggccaacagcgtctggtattattatcgcggtatctgccaggagcgatccaagcagtgggccaaggccgaagccgacatgaaaaaggcgctggagctccagcccgaccaaccccacgtcctcaactatctcggctattcctggatcgaccagggcatcaacctcgacgaaggcatgaagatgatcaagcgcgccgtcgagcagcgtcccgacgacggctacatcgttgactctctcggctgggcttattaccgcatcggcaactacgaggaagcggtgaagaacctcgagcgcgcgatcgatctcaagcccgaggatcccaccatcaacgaccatctcggcgatgcctattggcgcgtcggccgaaccctggaagccaagttccagtggtcgcatgcccgcgatctcaagcctgagccggaagaactgccgaagatcgaggccaagatcgccaatggtctccccgacgacaattcgaactcttcggccgcgcaggcggagaagaagaaggacgacggcaagggcggttgagctggcgcatgatccggaccgaagggccgcgttcgcgcaaagtgcgtcgcggttggccggcaagatcatgcgcgacaaatgaagtaggtgggggctgtcgccgatgccggcgttgactgaagaggggcgcgcgaaggtcaatctcagccttcgcgtcgtgggccgtcgcgccgacggctatcatgatctcgaaagcgtggttgcttttgccgactgtgccgaccggctcaccctggagccgggcggcgagttgaagctcaacacgaccgggccgctggctgcggcttgcggcgataacgccgacaatctcgtgcttaaggccgccaggcttctggccgaggccgtgcccaatctgaagctgggcgccttcacgctcgacaaggtgctgcccgttgccgccgggatcggtggcggctcggccgatgctgccgcggcgctgcgcctcctggcccgcctcaacggtttgtcgctcgatgatccccgcgttcagaaggttgcgctcgcgaccggtgcggacgtgccggtttgccttctctcgcgcgcctgcgacatgaccggcgttggcgagcagctgttgccgctcgcgctgcccagcatgccctgtgtcatggtcaatccgcgcgtgccggttgcgaccaaggacgtgtttcaggccctcggcctgcgcaacggcgaactcctggtcggcgtcaccgacgtcatccgcgcgccggcctggccggaggagggcgcttcaattgccgattgggtcgaagttctcgaaacggtcgccaatgacctggaagcgcccgccatgcgcatcgagccggtgatcggcgaggtgctggaggctctgcgcggctctgccggcgtcaagctcacccgcatgtccggttccggcgcaacgtgttttgcaatctatggctcttcggccgacgcgcatgccgctgcggaaaagatccggcgcgatcactccggctggtgggtgcatgcggggacgttgagctgaattctctctctccgtcattgcgagcgcagcaaggcagcccagaaactgtccgggctgccggtctggatcgcttcgctgctgtcgcaatgatgtggatggagctgagctagtctagcccgcgctgctctcatcgagcttgaggaagtcccggatctcgcccaacacctcgtgcggcttgtcatgctgcagccaatgcccggccccggcgatggtctcgatgcgcgcatcttggaaatagcgctccaggcttgtccccttcgcgcccgccagaaaactctcgccggcattgagcagcagcgtcgggcaggcgatgcgtgaccagagctcgatgtgatcgtccggccaaagccggtgcggcgcggaggcgcgctggtacggatcgaacttccagctgtaggtgccgtcctcgttctgccgcgtgccgtgggctgcgagatgcagggcaaggtcacgggacagccgtttgttgtgaagcatcatctgtgcggcggcgtcctcgatcgtcgagtagcggcgcgggatgcggtcatgcagcttgtcgagctgggtcacccatttgccaatacgctcatgcgccggcggcttccgagcgtccggcagcatggtcacgccgtcgaggacgatcagcttggagaccagctcggggaatgatcctgacaagatcaggctgaccatgccgcccatcgaatgaccgatgagggtgatttgaggtgctgcgatatgacggacgagctgggcgagatcgtagacatactccgtcagcgcgtagctgccgcccctagtccaatcggaatcgccgtggccgcgcaggtcgggtgcgagcacgtggaaattcggctgcaacgatcgggcgatatgatcccagctccggcaatgatcgcgcccgccatggaccaggatcagaggtggtgcactctcgttgccccagtcggcataatgcagccgcaggccgtgcgattcatagaagcggctttgcggggcgctagccattggccggccgccgcgccagtgcgagcgagaggccgaggccagcgatgaagacgccggagccttgcgtgaggcgccgcatcagatgcggccttccgatcagctgcgtacgtgtcgcggaggccatcgctaccaccacgacgtctgcgagcgtgttcagcgtcaccgagatcgtgccaagcataatgaactgcagcgccgggttagttcccgcgggatcgagaaattgcggaatgaaggcgaggaagaacgccgcggtcttcggattcaacgcctcgacgagcacgccgtcgcggaacgcgcgcttgtctccgacgggctcgccttcgaacgacagcccacggccggcgctgcgaaacgtcctgatgccgagccagaccagatacagcgccccaacgaatttcacggcggcgaacagttccgcgctggccaggatgatcgcggagatgccaaggctgcccgccaccacatgaaccagcccgcccagagcggtgcctgcggttgacgcgaagccgctggcgcgtccctcggacagggttcgtgccgcgacgtagaagatgccaggaccgggaacggcggcaatgagacaggctgtggccaggaacagccagaaattcgtttcgatcatcctgttttcgtagcggagcgagcggcgattgcaaggcctctcgcttagcccatccggcggaagatcacgctggcgttcacgccgccgaagccgaacccattggagatggcatgctccatcggcatcggccgcgccgtgccggcgacgatgtcgataccgtccgcgcccgcgtcggggttctcgagattgagcgttggcggcgcgatctggtcgcgcaaagcgagaatggtgaagatcgcctccaggcctccggcggcgccgagcagatggccggtggccgatttggtcgcgctgacagcgatgctccgagtacgtccgaacagcgcgccgatcgcgccaagctcgctctcgtcgccggcttgagtcgaggtcgcatgtgcgttcaggtgctgcacatccgcgggcgcaagcttcgcttgtcgaagcgcgatctccatggcgcggcgggcgccctcgccatcgggcgggcccgaggtcatatgataggcatccgccgtcgtgccgtagccgacgagctcggcgaccggtgtagcaccacgcgccagcgcatgctcgagctcctcgatcaccaggatgccggcgccttcgcccatcacaaagccgtcgcggtcgcgatcgaacgggcgcgaggcgcgttcgggttcgtcgttaaagccgctcgacagcgcgcgggccgcggcaaagccgccgaggctgacgatgtcgaggcaggcctcggcgccgccgcagatcgcgacatcggcttcgccggcgcggatcatgcgcgcggcatcgccgatcgcctgcacgccggcggcacaagcggtgaccggcgtacccagcgctcccttgtagccgtatttgatcgagacctggccggcggcgagattggcgaggaacgaggggatcgtgaatggcgaaagccggcgcgcgccgcgctgttcggtgatgcgcaccgcttccgcgatcgccgggaacccgccgacgccggaggcgatgatcgtcgcggtccgctccagcgccgccgcgtccagcggcgtccatccggcctgcgcgaccgcctctgcggtggcaagcagcgcgaacaggatgaagcggtccatcttgcgctggtctttcggcgcggccgcctgtgccgggtcgaagccgcccttggtgtcatcggccctgtctggcacgagccccgcgatgcgcgcgggcagtgcctgcgcccattcgggcagcgggcgcagcccgctttgaccggcgaggagccgtcgccaggacaattcgacaccgcagccgagcggcgacacagctcccattcccgtcacgacgatacgacgcatgtcagtctccagccggcacgacggccgggttcatggccttgagcgaagcgagccgcgcgcgcatcttgcggctggcccgggggcctgcgatgacgactgcattggcgagagtgatcggctgcatgtcgccggcattgaccacgaccggatcgaccgggcgagcgtcactccggttcgccagcaggatggatttgcctttacgggcgagatgcttgttgccccaggccagcaacgccgcgatcacgggaaagaagtcccgcgccttgtcggtcagcacatattcatagcgcggcggtcggtcctgatagcggcggcgcgtgaacatgccgctctcagtgagatgcgcaaggcgccgcgacaggatgttcggcgcgatgccgaggctttgcgagaactcgtcgaatttggtagcgccctgcatcgcatcgcgcaggatcaggatgctccaccattcgccgaccgtctccacggcgcggccgacgggacattcctggatggagggcgatttgggctgcatgaacggaggttagggaagttactttcaaaatgcaagtgactagggtggcgctggaggtcgacagggcgcaagacgcacaggttgggctgcgattcgagatgcgggctgcaaatgatggccgcgcgtaggccgtcattgcgagcgcagcgaagcaatccagcctgttgccgcggcgggattctggatggcttcgctgcgctcgcaatgactgggcgggagcagcggtatcagcccgacaccgtcacctgagatgccggagcgcaacgaaggcctcgaagggcgacggccatgctgcagctcgcggctcccagcgatgcaacgcatcgcgctgctcccgcctcgggatgaccgagtcggcaacggtgcgaaatcaggacgtcagcccggtcggctaatgcgacctggccaaacagaacgccacgacctgctccagcgcgctcttcatcggcgaggacgggaacagcgccagcgcgtccaccgccatggcgccgtaatgctgggcgcggctcagcgtgtcctcgagcgcgcggtgcttgttcatgagtccgatggcgtggtcaagatcggtatcgccgatctcgcctcgctccagcgcgcggatccagaacgcgcgctcggtgtcgttgccgcggcggaaggcgagcacgaccggcagggtgatcttgccctcgcggaaatcgtcgccggtgttcttgccgagcttggcgctcttgcccccgtagtcgagcacgtcgtccacgagctggaaggcgatgccgagattcatgccgaccgagcggcaggcggtctgctccgccttcgggcggttggcgatgacggggccgacctcgcaggcggcggcgaacagttcagcggtcttgccgcggatcacggcgagatattcgtcctcggtggtcgcggtgtttttggcggcggcaagctgcatcacctcgccctcggcgatcgtggcggcggctgcggagaggatgtcgagcgcgcgtagcgatccgacctcgaccatcatgcgaaatgcctggccgagcaggaagtcgccgaccagcacgctcgcctcgttgccccagagcatgcgcgccgacagcttgccgcggcgcatctcgctctcgtcgacgacgtcgtcgtggagcagggtggcggtatgcatgaactccacggaagcggcgagcttgatatggccgtcgccggtgtagccggcgaggttggccatggcgagggtcagcatcggccgcagccgcttgcctccggaggagatcagatggttggcgacttccgggatcatggtgacgtccgaaccggtccgcgacaggatcgtggcgttgacgcgctccatgtcaggagcgacaagggcaaccagctcttcgatcgacgcgccgggagcttcgaaaggtacgatgacggccacgccggtctccaatatttgcccggaagggctattctgatgcaaagacaatagaaactggcggcgcacccggcaagacctcggaaccattgacatcagccgcctacccctttcaggcaggagatctgcgttttgcgtgaactggttcggaccaacgacatggtgctggtgtcggcgatcggcgcgctgctcgacggcgccaacatccatcacctggtgctggaccagaacatgagcatcatcgagggttcgctcggcatcttgccgcggcggatcctggttcatgaggacgatgtcctggaggcaagggagctcctcaccgaggccggcctcagccacgaattgcgcggcgatgattgaggccgcggacatgaccgaggatgcttttctcggcgggcaattgcggctcaggcagaagcggtccggccatcgcgccgggcacgatgccatcctgcttgcggcggccaccgacgcccgggcgggggaccgcgtggtcgatctcggcgccggcgtcggcacggccggattggcgctggcccggcgcgccgcagggatcaggctgagcctcgtcgagatcgatccggagctggcggagcttgcgcgcggcaacgcgctggcaaacgggattgccgccgagacgatcgtgctcgacgtcacggcagatgcgcaggccttcgcggcaaatggtctcgcgcccgacagcgtcgatgcagtgttgatgaatccgcccttcaacgatccggcgcggcatcgcggctcgcccgatcaggcgcgccacgccgctcatgtggcgacggaggacactctgcatgcgtgggtgcacgcagcgcgtcgagtcctgcgctcgaacggtgtgctgacgctgatctggcgggcagatggactggcggacgtgctggccgcgctgtcacgcggcttcggcagcctctcgatcctgccggtccacggcgaggcggaacggccggccatccgagtgctggtgcgtgcggtgaagggcggccgtgcgccgacgcgtctgctgccgggcctgatgctgaatgacgcgtcgcgttcgtccggaagcgaggtgacggagattttggaagggagagcggccttgccgctggtggaacctcgagggcttaccggggaagcgattccggctgttgctcctgcggggaggtcaggcggatcgccatgaacagcgcgccaatcagcagcatcagcagatagattttcatgatgttctccgctgcctattgcagcctccaaacgggaaatctgcaaaacacgttccgggcacttccaatgacactcgcgtgataagaaatggttaatcagaggtaacggcatggccgagcaattgaacgatcgtgagagttccggcctggccgacagactcatgcaatatctgccggcccgctttcgaccgggcacggcggtggtcccggtggtgcggctgtcgggcgtgatcggcgccgtgacaccgctgcgccccggtctgacgcttgcgggcatcgccaaagtgctggagcgcgcgttttcgtatcgacacgccaaggcggtggcgctcgtgatcaattctccaggcggctcgccggtgcagtcgcgccagatttatctgcgcatcaagcaactcgcagcggagaagaagctgccggtgctcgtcttcgtggaggacgtcgcggcctcgggcggttacatgatcgcctgtgccggcgatgagatcatctgcgatccctcatcgatcctcggctcgatcggcgtggtcggcggcagttttggttttcaggaggcgatcaggcggctcggcatcgagcggcgtctctacacatcaggcgagcacaaggcgatgctcgatccgttcctcccggagaatcccgacgacgtcgccaggttgaaagcgatccagcgcgagatccatcagatcttcattgcgctggtgaaggagagccgcggcgcacggctgaagggagcggacgagacgctgttcaccggagaatactgggccggcgatagcgccatcgcgctgggcctcgcagacggtatcggcgatctccgctcaactcttcgtgcccgctatggcgagaaggttctcactcccgtgatcgcgcaaccgaccgggctgctctccggcttcttgggccggaaatcgcctggcgcggggcagctttcagccctggagtcgatcgccggcctgccggacgagctgatctcggcagtcgagacgcgcgcgatctgggcaaaattcgggttctaggccaagcccgcccgcgccaattggcccgggccgggccaattgcggcgcaggcccatctgggtaacaatgtgcgtgggggctgagcactagacgaggatcgaccgatgccgccgttcgtcgctttcgcgggcgtgctgggcgggcttgccgtggtccgttgggcctacaagaccgccatgaagatcaaccaggagctggatgagatgcgcctgtcgcgcgtcaccgaggccgctcccatgggggatatcaagacactgaagcgagaccccgtgtcgggggcctaccggccgggttaggagctgcctttcacatgcatcgtcattccgggtcgcccgtagggcggacccgggatcgtcggattccgggttcgatgctgcgcatcgtcccggaatgactggtcaattaagcccttcgccttgattcccatccttgccgtcgatacggtcccgcgcgattcaaacccccgcgagagcccgatctgacgatggacgcctcattgcccgcccatatgcgcccggaacgctcgttccagggcttcatcctcgcgctccagcggttctgggccgagcagggctgcgtgatcctgcagccctacgacatggagatgggtgcgggcaccttccatccggcgaccacgctgcgtgcgctcgggcccaaaccctggaacgccgcctatgttcagccctcgcggcggcccaaggacggccgctacggcgagaacccgaaccggatgcagcactactaccaattccaggtcatcatgaagccgtcgccgccgaatcttcaggagctatacctgaagtcgctggccgcgatcggcatcgattccgccgtgcacgacatccgcttcgtcgaggatgactgggagagcccgacgctgggtgcgtggggcctcggctgggagtgctggtgcgacggtatggaggtttctcagttcacctatttccagcaggtcgccggcttcgaatgcgcaccggtcgcgggcgagctcacctatggtctcgagcgcctcgcgatgtatgtgcagggcgtcgaccgcgtctatgatctcaacttcaacggccgcgacggggaccagaaggtcacctatggtgacgtcttcctgcaggccgagcaggaatattcgcggcacaatttcgaagtcgcggataccgcgatgctgttcgaacagttcaagatggcggaagcggcctgccggaaatatctcgatgcgggctggaaagatgggaagcgcgaggcgcatctgatggcgctgccggcctacgaccagtgcatcaaggcgagccatgtcttcaacctgctcgatgcgcgcggcgtgatctccgtgaccgagcggcaaagctacattcttcgcgtgcgcgaattggcaaaagcctgcggcgaggcctggatccatactgaagcgggcggagcggcctgatgcccgatcttttgcttgaactgttctcggaagaaatccccgcgcgcatgcaaggcagggcggccgacgatctgcgccgcatggtcaccgacaagctcgtcgccgaaggcctcgtctatgaaggcgcgaaggccttcgcgacgccgcgccgccttgcgctcaccgtgcacggcatccccgcgcgccagccggacctcaagaccgaacgccgcggacccaaggtcggcgcgcccgatgcagccgtgcagggatttttgaaagcgaccggtttgaagtcgctggacgaagccaagatccagcgcgaccccaagggtgatttctacatcggattgatcgagaagccgggccgcgacgcgatcgacgtgctcgcggagatccttcccgtgatcattcgcaccttcccctggccgaaatcgatgcgctggggcgcgcgctcgggcaagccgggctcgctgaactgggtgcgtccgctgcacgcgatcacggcgaccttcgggctcgagaccgaagagcccgatgtcgtgaagttcgaggtcgacggcattgaagccggccagacaacttatggccaccgcttcctggcgccggcgcccatctctgtgcgccgcttcgaggactacgaagccaagctgctcgacgccaaggtcgtgctcgatcccgaaaggcgcaaggacgcgatcctcaccgacgccaagcagctcgcgttcgcgcaagggttcgaactggtggaagaccagaacctgctggacgaggttgccggcctcgtcgaatggccggtcgtgctgatgggctcgttcgaagaagaattcctggcgacgccggcggaagtgatccgcgccaccatccgcaacaaccagaagtgcttcgtggtgcgcgatcccaagacgggcaagctcgccaacaagttcatcctggtcgccaacatcgaggccaccgatggtggcaagaccatcgtcgccggcaacgagcgcgtcatccgcgcgcggctgagcgatgcgaagttcttctacgagaccgacctgaagaccaagctcgaggagcggctgccgaagttcgagcagatcgtgttccacgagaagctcggcacgcaggcggagcgcatcaagcgcatcgagcgactcgcggccgagatcgcgccgctggtcggcgccgatgtcgccaaggcggtacgtgccgcgcatctggcgaaggcggatctgctgacggaagtcgtcggcgaattccccgaggtgcaggggctgatgggcaagtactacgcgttggcgcaaggcgaggaggcttccatcgcggtcgcctgcgaggagcattacaagccgcaaggtcctgccgatcgcgtgccgaccgatccgatcagcgtcgcggtcgcgcttgcggacaagctcgacacgctggtcggcttctgggcgatcgacgagaagccgacgggcagcaaggatccgtatgcactgcggagagcggcgctcggtgtgatcaggctgattgccgagaacgacttgcgtctgtcgctcctgaagatcgcaacctccgcgcttgccggcctgtcggtgaaggcggccgaagcgcagaagctcccgagcgacctcctcgctttcttcgccgaccggctcaaggtccagcttcgcgagcagggtgcccgtcacgatctcgtcgatgccgtgtttgcgctcggcggccaggatgatctcctgatgatcgtccgccgggtcgaagcgcttggcaagttcctcgagaccgacgacggcaagaacctgctcgccggcaccaagcgcgccagcaacatcctctcgatcgaggagaagaaggacaagcgcacgttcgatggcgcgccggatgctgcgctttacagccttgtcgaggagaaggcgctggcgcaggcgatcggcgaggtgaaggcggaagccagcgctgccgtcgcccgggaagacttcgccgtcgcgatgagcgcgatggcaaagctgcgcccgcccgtcgatgcattcttcgacaaagttcgcgtcaacgacgacgatgcaagggtgcgcgagaaccggctgaagctgctgaacgaaatccgcagcgccacgcgtgcggtggcggacttctcgaagattcaggattgaggcgacgatcttcgatcaagcgctggcgcagcaaccaacgctgtcattccgggggcgcccgaagggcgcccccggaatgacggctgtggcaaaaaaagccccgcccggcggggggaggaccgggcggggccggatgcccgcttcactgctcgcgccagcctgatgcgacgcgccggacatctactcgatctcagtccaccacctcgacgatgcggcgcgagcgcggttcgaccagcacggtctcgccgttcacgacggtgtagcgataggtggtggccccgaaacgttgcggcacgtcataataagtgacgcccgcctcgggtaaggtggtgccgaccacgacgcgatccggaatgctgaagggcggcacacgctgttgcacgacatattcacggaatgccggccgctgttcggccgcaatcgtcaccgcgctgtcgaccgacgcaggtgcgcgtccgaccgtgacaccgctttgcgcctgcgcggcaaggggcgagccgatcgcggccgcgagcgctgcaagagcaagaatcctgttccgcatgggcaactccttccacttggttttgtaggacgcgcaagcggcgcgaccggttgccaatgcatgcccaaagccaatgttccggcaaatggcctgccgtattcgcggcaatttcgggcagttttcgtgagcgcggggaactcgcagcacgtcttacgcatctctactcccggaacccggccgggtatgatccgcgcgcgattcgccccaactccacagaaagatagttcatgcacatcaccgtcgcccacatttcgccgatcctgtcgttgattgcgggcgtgctcatcctgatcatgccgcggctgctcaacctcatcgtcgcgatcttcctcatcgtcaacggcgcgatcgggctcgggctcctgaagtggctccgcttctaggcgttcacttttcggaactgttcgtcttgcgcgggcccgcccaaagtggtgtaaggcccgcgatttcccattcctctcgcaggttgtgtgcaagctatggccaaagccgcctcgaagcccaagaaaatgccagcgaaatcaaagtcctctgccgtcgcaaaagccgcgccgccggcccgcaagacgctggccaaaagcgcgccgaagccggtcgccaaagccgctggaaagccggcagcgaagcccaccgcaaaggccgcgaccaagccggctctgccaaaggccgccgcgaagcccgcaccgaagaaagctgcgcctgccaaggcggcgccagcagcggcaaaggctggcaaatgggtgttcacgttcggcgacggcaaggccgagggccgctcggaaatgcgcgacctgctcggcggcaagggagccaatctggccgagatggccaatctcggtttgcctgtgcctcccgggttcaccatcccgacctcggtctgcacctatttttacgaacacgacaagacctatccgaaggagctgaagccgcaggttgagaaggcgctggactatgtcggcaagttgaccggcaaggtgttcggcgacaccaggaacccgctgctcgtctccgtgcgctccggtgcccgtgcctcgatgccgggcatgatggacaccgtgctcaatctcggcctcaacgaccagaccgtggaagcgctggccgagctgtcgggcgaccgccgcttcgcctatgacagttatcgccgcttcatcacgatgtactcggacgtggtgctcggcttcgagcatcatcatttcgaggaaatcctcgacaccttcaaggacagccagggctacacgctcgacaccgatctgtcggccgacgactgggtcgaactggtcggcaagtacaaggatgcggtggcgcgcgagaccggcaaggagtttccgcaggatccgcacgaccagctctggggcgcgatcggcgcggtgttctcatcctggatgaacgcgcgcgcggtgacctatcgcaagctgcacgacattccggaatcctggggcaccgctgttaacgtgcaggccatggtgttcggcaacatgggcgagacctcggccaccggcgtcgccttcacgcgcaacccctcgaccggcgagagcaagctctacggcgagttcctgatcaacgcgcagggcgaggacgtggttgcgggcatccgcacgccgcaggacatcactgaggaagcgcggagggaatcgggctccgacaaggcctcgatggaatcggcgatgccggaggcattcaaggagctgacgcgaatctacacgctgctcgagaagcactaccgcgacatgcaggacatggagttcacggtcgagcagggtaagctctggatgctccagacccgcggcggaaagcgcaccgccaaggcggcgctgcgtatcgcggtcgaactcgccaacgaaggcctgatctcgaagaaggaagcggtcacccgcatcgatccggcttcgctcgaccagctcctgcatccgaccatcgatcccaacgccaagcgtgacgtgatcgcgaccggccttccggcttcaccgggcgcggcctccggcgagatcgtgttctcctcggacgaggccgccaagctccagggcgacgggcgcaaggtcattctggtccgcatcgagaccagcccggaagacatccacggcatgcatgccgccgaaggcattctgaccacccgcggcggaatgacctcgcatgcggcggtggtcgcgcgcggcatgggcaagccctgcgtctccggctgcggcaccatccgcgtcgattacggacgcggcaccatgagcatcggctcgcgcaccttcaagaccggcgacgtgatcaccatcgacggctcgctcggccaggtgctcgccggccgcatgccgatgatcgagccggagctgtccggcgagttcggtacgctgatgaactgggccgaccaggtccgcaagatcggcgtgcgcgtcaacggcgatacacccgatgacgcgcgcactgcgatcaagttcggcgccgagggcataggcctctgccgcaccgagcacatgttcttcgaggagacgcgcatccgcaccgtgcgcgagatgatcctctccgaggacgagcagtcgcgccgggccgcgctcgcaaagctgctgccgatgcagcgcgccgacttcgtcgagctgttcgagatcatgaagggtctgcccgtcacgatccgtctgctcgacccgccgctgcacgagttcctgccccacacccacgccgaggtcgaggaagtggcgcgcgccatgaacaccgacccgcggcgcctggccgatcgcgcccgcgagctctcggagttcaacccgatgctcggcttccgcggctgccgcatcgcgatcgcctaccccgagatcgcggagatgcaggcccgcgcgatcttcgaagccgcggtcgaggccgagaagcgtaccggcagggccgtcggcctcgaggtgatggtgccgctgatcgcgaccaaggcggagctcgatctcgtgaaggcgaggatcgattccaccgcccaggcagtgatgcgcgagaccaacaccaagctggcctatcaggtcggcaccatgatcgagctgccgcgcgcctgcctgctcgcgggcgagatcgcagagtcggccgagttcttctcgttcggtaccaacgacctgacgcagaccacctacggcatcagccgcgacgacgcggcgagcttcctcggcccctacgtggcgaagggcatcctttcggtcgatcctttcatctccctggatcaggaaggtgtcggcgagctcgtcaagatcggcgtcgcgcgcggccgcaagactcgtgcctcgctcaaggtcggcatctgcggcgagcacggcggcgaccccgcctccgtcgccttctgccaccacatcggcctcaactacgtgtcctgctcgccctaccgggtgccgatcgcccgcctcgccgccgcgcaagccgccctcggcaaggcgatcgcaagccaggcgtagcaaagcgcagattgacgcgagaggggcggggcgaacccccgcctctctcattttacgcggcgctctttcctgcgagggcccttgcgacgaaccaatccagactgcctcagcggaaaggctctggattgcttcgctgcgctcgcaatgacgagtttgcggcacgtactcgatgcacactccttcatcgcccggcttgccgcggcgatgcggtatgccgagacgacgccgatgaatggagaagcggcgcaccggatgcccgctttctcagcgcatgacggaagcaacttggcgtaaggcgcgatctcatcgcgcgtcccttcttgataggcatgcgtaagggttccttcaccatccgcgttgacggcttgtttaccgcttcgaatgatgcggcgtttaccacggcgcagcatcacccggtgaaatcacctgtgctcgcttgagtgtgccgcacgggccacgcggattaacgccccggcaacctaaattagatacttacgataaagatcgaattgcacggatgtactgagttcgatcggaccagcgtaagcgtagcgtgagcgtatcgatgtcagtgttgcgtaaccatccgaagggcgcgcggttcgcgtccttcggcatcggtctctgcatcttcgcattgatgccgagagagaccggctatcaggacattgcctcgctgctggcgcgccaacccggcgtcgccgagcgctggcagaagcaggtgttctccgccgcgtcctcgatccagctcgccacctacagttttgcccgccccatcggcacgtcggttccgcagagcgcgatggttcgtctcgcaagcatcgatggccgcgacgtcacgggtgcgatcagtcgcaatcctgcgcttcaggcgccgccgcgctatcaggcttccgactttcccaccgtcgatcgctcccttaagggtgatcgcctcgcaatcgtcacgcctacgcaggctccggagacggtcgcaccggctgtggctccggcgcaggaagatcccgcgacatcgaacagctcggtgttcggcgccaagaccgccgcattgcctcacccgatgtcgccggagtccgcggccgcactcgatcccgagctccaggaagccctgcgcgcgccgccgctgccgcaatattccaattcgccgcaggccagcgatgctgcgcgcacgctcgcgaccgcaccgctggagacgttgaagggcgcctccgttccgcctgcaccggcgcccgatcccttcagcgtcaagacctcgaccctgttcttcgccagctcctcgctcggcggcaatcccgagaccatggagagctggcagccgggcgccgagccgctgatcgtgatgcccgaccccgacatgaaggtgaccgccgcgctgactccgccgacggcggacatcgccaggaacatcgacagcggcgagagcgtggccgcgaaaggcgaggtcaacggcgacaaccagcgcgctaggtcgcccgcggagcggctcgggctcgacgacaagtcgcgcgccaaatcggaaaaatgtctcgccgaagccgtctatttcgaagcgcgcggcgaggcggtacgcggccagatcgcggtggcgcaggtcgtgatgaaccgcgtattctccggaaaatatccggaaaccgtgtgcggagcggtctatcagaacaagcaccgccatctcgcctgccagttcaccttcgcctgcgacaagaacccggacgtgatccgcgaacccgagatgtgggagcgtgccaagaggatcgcgagggccatgctcgatggccagatctggctgcccgaggtcggcaagtccacgcactatcatgcctattgggtgcgaccctcctgggttgccgagatgaagaagttgtacaagaccggcgttcacaccttctatcggccgcgcaattggggcgacggcagcgaggaaccgagctggggcacccaggcacagaccgccgcgctatccgccgaactcgtgcaggaagccaggagctccgcagagctgggcgaacggcggtagcgccttcaggaaagaccgtgctgtccgggacaagcgcggccgcgttgctgtcctctcaagcctcgatgtccaacgcacagtcgaagttcggggcggaatgcgtcaatgcgcccgccgatgcgtagtcgacaccggtcgcggcaatggcggcgatcgagtccagcgtgacgccgccggatgcctccagctcaaggcggccctcgttgatcctgaccgcctcgcgcaacgtcgccaggtccatgttgtcgagcagcaccgcgtcggccatcccgctgtcgagcacttcgcgcagctgcaccagcgtatcgacctcgatctcgatcttgacgaggtggcccgcatgggcacgggcgcgttccagcaccggacggatgccgccggcgaccgcgatgtggttgtccttgatcaggatcgcatcatcgagcccgaagcggtgattgaatccgccgccgcagcgcaccgcgtatttttccagcgcgcgcaatcccggcgttgttttccgtgtgcagcagatgcgcatcccggtgccttcgatgcgcgcgacatagtccgccgtgagcgtcgcgacgcccgacaggcggccgacgaagttcagcgcggtccgctcggcggtgagaatggagcgcgcggggcccgagatcgtcagcacatgctgtccgcgagcgacccgcgcggcatcgcggacctgtgcgcgcacctcgatctcgggcgacagcttctgcaaagtcgcgagcgccagcggcaatccggcaatcacgccggactggcgcgccaccaggaccgcttgcgcgctcgtcgtttccgggatcgtcgcaagcgaggtgatgtcgccggcgcggccgaggtcctcgtcgagcgcgcggtcaacggccgtctcgatcgcgagcgaagagagaaaggcgtcgggataaagcagtgaggttgggctgatcatggggaactccgtcaggcgatcatggattgcgcaatgcgtggcagcgggcggtcgtccaggctgtgcgcgacatcgcgcatggcggaaagggtcgtcatcgttctccgcccgggcccgggcgtctcagccggatgatcggaacggaaatgcgcaccgcggctctcgcgtcgcgtccaggccgcggtggcgaccagcagggccgaagtcgccatgatgcggagaacgatgtcgccggcctcacgctcgatcgcggcgaagcggcgcacggcttcggcaaggccgtcaccgtcgcggatcacgccgacatgcgcgctcatcatcgtgcgcagccgcttcacggctgcgctgtccgccgcgccgcctcgcgccgtcacgaccggatcgggtgggcgggcagtcgaggacattgtgcggccggcgatgtcgtcggcaacgcgcgcggcataaaccacggcttcgagcagggagttggaggcgagccggttggcgccatgcgcgccggtcgaggatacttcgccggcggcccagagcccgtcgatcgagctgcggccgcgcgcgtccacggcgatgccgcccatgtggtaatgcgcagccggcgcgatcggaatcggctgcgttgccggatcgatgccggcggcggtgcagcttgcatgcacggtcggaaacttcgtcgcgaagcgcgcgcccagcgcctgccgcgcatcgaggaaggcgccgcggccggccgcgatttcggcgaacaccccgcgggccacgatgtcacgcggcgcaagctcggccagcggatggcgcgacagcatgaagcgttcacctttgccgttgatcagcgttgccccttcgccgcgcaacgcttcggtagcgagcggtgccggatcgccgcccaccatgatggccgtcgggtggaactgtacgaattccgggtcggcgatcaccgccccggcgcgcgccgcgatcgcaaggccggagccgcttgcctcgaccggattggtcgtgacggcatagagatgcccgatgccgccagttgcaagcacgaccgcgcgcgcggcgagcacgatctgccgtgcagcgggattgccggccttccgcaattgaagtccggagaccgcgccgtccgctgtcagcagtgcttcggcgacgaagccttccatcaggcggatcgagggtgtgcgacgtacggcatcgctcaaggccgcaatgatcgcggcgccggcgccatcgccgcgcacatgaacgatgcgacgcgccgaatgcgcagcttcccgtccggccgcaagcctgccgtcgagatcgcgatcgaacggcacgccaaaggcgagaagatcatggatgcgcggtagcgcctcgcgcgcgatcccgagcgcgacggcttcatcaacgaggccgccgccgaccgccacggtgtcggcggcatgtgcctccggcgtatcgccttcggccacggccgcggcgatgccgccttgcgcccatgcggacgatgcgccctgcccaagcggtgccgccgagatcaacgtcaccggccgcggcgcgagcttcagcgcgcagaacagcccggcaaggccgccgccgacgatgacgacgtcgtcggtgcgagcgaggtcgtggatgtcgtgttgcatgttgttcgctctcaattcctcagattgatcatgcgctcgaccgaacgtcgcgcgcgatccgcgagcgcgggatcgatcgacacctcctcgcggagcgtcagcaggctctccagaatgttggcgagcgtgatgcgcttcatgtgcgggcagaggttgcaaaggcggagcatctccacatcaggcagctcggcccggacattgtcggccatcgagcattcggtgatcatgacgagacgccgtggcctcttcgcgcgcacccagttgatcatgtgtgcggtcgaaccggtgaagtcggcttccgcgagcacatccggcgggcactccggatgcgcgatgatctggaccgacggatcggcctcgcgaaagctccgcagctcctcgcccgtgaaccgctcatgcacctcgcaggcgcctttccaggcgatgatgttcacatccgtcttcgacgccacataggtcgcgaggtagcggtctggcaggaagatcacgctcggtgaattgaggctctcgaccacctgcacggcgttcgacgaggtgcagcagatgtcgacctcggccttcacctccgcggaggtgttgacataggcaacgatgggcacgccggggaatttttcgcggagcagccgcacgtccgcgccggtgatgctggcggcgagcgagcagcccgcgcgcgaatcggggatcaagacggtcttgtgcggattgagcagctttgaggtctccgccatgaagtgcaccccgcactggacgatgatgtcagccttcaccttggtggcttcgaccgcgagctggagcgagtcgccgccaatatcggccacacagtggaagatctccggggcttggtaattgtgggcgaggatgaccgccccccgcgcgcgcttcagctcgttgatcgcgtggatcgccggtgccatcagcggccattcgatcggcgggatcacgtgcttcacgcggtcatagagcggcgcggtggcccgttcgatctccgacgtccattccagtgaggggatcggccattccggtcccgcgggcaccgctacggtgccgggggaggagttgcgctgggcctggggtcggtcggtgaaatcgtcggggccgtaaattccggtgatcggcatgaaagcctcccatgttgtcatttgtgctcagtttgagaatatatggggcctgagaaatccggccgagaggccggacccataacagcattgcacctcatatgctcaatctgagtaaatcaaacatagcacgcggcgctgcagaccgccaagccctgtcgcgcacattcccgtcactcgccggtcaatgcgtcgggtgaggccgtattgaaacgcaatgctcccgcggcagctcctcttggaatgcaatggttttgagcccgggtctccttttgacttgggctttccatgcagatgcattaaacgggccctcctgcggctgctgattttgcaggcccgccaatgacagacgaggaagaccatgtcgacacagatcggcgaactcgctccggcctcgcgttcctccaactggcgtaccccggccgtcatcattctgtgcggctgtgcgatcggcatgctcggcttcggcccgcgctcggcgctcggctttttcgtgcagccgatgagtcacgaattcagctggggccgcgatgtgttcggcctcgcgattgccgtgcagaatctcttgtgggggctgggccagccgttcgcaggcgcggtcgccgatcgcttcggcctcttccgggtgatgtgcgtcggcgcgctgctttatgccggcggcctgctgctgatgcgctactccacgaccccgctgtcgctcgacatcggcgccggcgtcatgatcggttttgggctcgccggctgttcgttcaatctggtgttgtcggcgttcagcaagctgttgccgcctgagaagcgcggccttgcgctcggcgccggcaccgcagcaggctccttcgggcagttcctgttcgcgcccatcggcgttgcgctcatcgacaatttcggctggcagcaggcgttgtccgtgttcggcttcctgatgctgctgatcatcccgctgtcgctggcgctctcgacaccgccggtcgcagaatcagcaaaggcgacggccgctgatgagcagaccttcaccagggcgctggccgaagccttcggccatcgctcctacgtgctgctcgtgctcggcttcttcacctgcggcttccaactcgccttcatcaccgtgcatctgcccgcgtttctggtcgatcgcggcatctccgcgcaaaccggcggctgggtgattgcggcgatcggcctcttcaacatcatcggctcgctcagcgtcggctatctccagaaccatctgcccaagcgctatatcctctccaccatctatttcacccgcgcgctggcgacgctggcctttatctcgttcccgatcacgccgttctcggcgatcgcattcggcgcgatttccggcctgacctggctgtcgacggtgccgccgacctcggcgctggtggcgctgatgttcggcacgcgctggcttgcgacgctctatggctttgccttcgtcagccaccaggtcggcggctttctcggcgtctggcttggaggcatcgtgttcgagcgcttcggttcctatacgccgatttggtggctctcgatcctgttcggcgtgctttccgcgctgatcaatcttccgattgtggagaaacccgtcgagcgagcggttgcacagccggcctgatcggctaaacaatccggacaagcaagtcagggagttcagtcgtggccacattcaaggcaatccggatcgacaaggcggacaagggcaccaccgcgcagctcacgcagttcgatgaagccgagctgatggacggcgacgtcaccgtccgggtcgaatggtcgacgctgaactacaaggacggccttgcgctgaccggcaaggcgccggtggtgcgccgcttcccgatgatcgccggcatcgacttcgccggcacagtcgaagcctcatcgcatccgcagtggaaggcaggggacaaggtggtctgcaccggctggggtatgggcgagacccatctcggcgcctatgccgagaaggcgcgggtgaagggcgactggctggtcgccctgccgcaaggcctgtcggcgcgcgacgccatggcgatcggcaccgccggcttcactgcaatgctcgcggtgctggccctcgagaaacacggcatctcgccgaagagcggtccagtcgtggtgacgggtgctgcgggcggcgtcggctcggtcgcgatcgccgtgctcgccaagcttggctatcacgtcatcgcttcgaccggccgggcctccgaggccgactacctgaagcagctgggagcagccgagatcatcgaccgcagcgaattgtcggcaccggcaaaacctctcgccaaggagcgctgggccggcggtgtcgacagcgtcggctcgaccacgctcgcgaatctgctctcgatgacgaagtacggcggagcgattgcggcctgcggtctggccgccggcatggacctgccgtcctcggtggcgccgtttattttgcgaggagtgtgccttctcggcatcgactccgtgatgtgcccgattgagcccagaaaggccgcctggcagcgcctggcatccgatctggatcgaacaaagctcgttgaaattactaaggaaataccgttgtctgaggtttcggattggggcgcgaaaatcctggccggggaggtccgcggccgcatcgtggtaaaaattgtctaacgacgttcagactttaccaaccaagctgcttcaatgtcgccatggttcgtatggtaagcagcgggtaaagagataaggcatcgcccgctgcggggttgggttcggagttgagcatgcttgcgcgtattgtgttgggggctgtcacggcggcagcaacgtttgcgccggccattgctggaagcatgaacgccgacgaggcgcgccgcttcgtggccggcaaggtgttcgcctttacctgcttcgatggcacccgcggtgcaggccgcattctcgacgatctcggcgccgccggcgccgtgcagttctcgggcgcaggaccggtcaaacatctccggctgcccggcaacacgctccagatccgcggccagaacgtctgcgcctcgatcaagggcattccgttcgagccctgtttcaacctggaaaagaccgatgatcgcagcttccgcggctcggtatccggcatgggcttcgcctattgcgacttccgccaccagggcggcaaccagatgctgatggcgcgtgcaacggcgcgcccgcgctcgccgcggaattcggatcgcaccggttcggtcggcccggccaacaccgaagtcgccgcgcgtgtcgaaaccccgcgtgtcgagagtagccggctcgagccggtgaagccggagcccgcgaagaccgaggccccgctggagctgcgtcgctcgactcagtgagttggcgttgccgcgcagtcgctgcttcctcaatgacattcgtccagcgcggagctgccgccgtagtcatacggacagcggcgttcacgggttggtagctgttcgcgcctcagtttgcgtgcggccggggcggtgccacgcaagggtcgaacgatgtcgctgtatttcttccgtatcagcaccggccgctattccggcgccgccgatcagccctacgaattcgaggatcgcgcagccgcctggaccgagatgacggaggtctgcgccaacctgctcggcagcatcgcgcgcggcctgaagccgaacgccgagtggtgcatggagctgatcgacgagaacaagaacccggtctttcgcgtcaccctcatcggcgagaccgtcggatgcaaagcttcctagacctcacttcaagctgcaatttacaaccagcgcgagatcactccgcgtcgcgttcaatcatttggcgtaaaatgtaggtatttgtgcgagggatctcgttaacctaacgatggaactctgaccgttagcttcgcggtaaggacgacgatcaaggtccaggcggccaacaacgacttggcagctcgtttcgggggaaacgtaccgatgttcagcctcttacagaatttgcagatcgggaccaagctggcgatcgcttcggctctcggcgtgctcctggtcggagccatgatcgcaagccagacgcttggcaatgcgagcatccgcgaaaccagccaaagcgcacttgcccagcagcagatcgcacgcgacgctgtgaaggccgaggcaacagttcgcggcatgcagcttgcggtacgagacattcgtctcgccaacagcccggccgatatccagaaagccacccagaacctgggcgagcagcagaaatcgaccagttttctggtcgatgagatgctgaagctttctcacgagatggagaaccgggctccgatcgagaaactcagatcgctggccgcgaactacgaaaaggctgcgcagcagatcgcgcgcgtccgcggcgaagctgtggccgcgagcggtgccgacggcgccacgcgcgctgcaaagctcaacgaagacgccatccgcatggcacgcgagattactctgccgattgccggcgagctcgacgtggtgatcggccagatcgccgaccacgcgagacataaatccgaggagaagaatgccttggccgcggcgcaaatgagatcaagcgagcaacttgcgatcctggtcggcgccttcgctgcgctcgtgctcgtctgctcctggctgatgtcgttcctgaccgtcgcgcggccgatccgcgcgctcaccgtggcgatggataagcttgccggcggcgatttctcggtggtgctgcccggtctcggccgcaaggacgaggtcggcggcgtcgccgcggcagtcgaaaagttcaagctcgtgtccgagcagaaggcgcgcgaggaggccgaagccaagatcaggcaagaccagattgcggctgcgcaacgcaaggccgagatgcacaagctcgccgacagcttcgaagccgcgatcggtgaaatcgtcgataccgtatcctcggccgcgaccgaactggaggcatctgcgtcgaccctgacgtcgactgcggcgcgtggacaggagcttaccacgatggttgctgccgcctccgaggaagcctccaccaacgtgcaatcggtggcatcggcgaccgaggagctgtcttcgtccatcaccgagatcagccggcaggtgcaggagtccgcccgcgtcgcgggcgatgcggtgagccaggcccgcaccacgaccgaccgtgtcggcgacctttccgccgccgcagcgcggatcggcgacgtggtcgagctgatcaacaccatcgccggccagaccaatcttcttgcgctcaatgcaaccatcgaggccgcgcgcgccggcgaggcgggacgcggctttgccgtggtcgcctcggaggtcaaggcgcttgcggagcagaccgcgaaggcgaccggcgagatcgggcagcagatcgccagcatccagaccgcgaccgatcattcggtcggcgcgatcaaggacatcagccataccatcgagaagctgtcggagatctcctcgaccatcgcagccgcggtggaagagcagggcgccgctacccaggaaatttcgcgcaacgtgcagcaggcggcggcaggcacgcatcaggtgtcgtccaacatcaccgatgttcagcacggcgctagcgagactggctcggcgtctgcgcaggtgttggcggcggcgcaatcgctgtccggcgacagtcagcgcctcaagctcgaggtcggcaaatttctctccaccgtgcgcgccgcctgacggcgacgtgctgcggcagatccgggcgaatgctacgacgcatccgcattagggcggaggatttccctgcggctgcaacagaggattgcagcgaagatggccgtcgaccgggcacgagccgtagttttacgtaggttcctgttaacgcctgtttgcaattataggcgcaatctcacgggataagaaccagccagcatcgttggaatgacccccgccctgtcgtccgccgcgacgattgcggcgcaggtgatttgcgcgttgctggtgctaccggggttatcgtgatgtcgaagttgtcgatcgttttcaagctgctgaccgtgctgtcggtcctcgtgctctccctcgccggtgtcggcgtgatggcgatcggcacgatgcagaacatcaatgcccatacagtcgagattgcggagagctggctgccgagcgtgcgtgcgcttggctcgatgcgcgccgacatcaacgaactgcgcgtcgtcctgcggctacacctgatgcaggagagcattgaaggcaaggacgccgctgagaaacgcatggctccgctgcgcgagcgcatcgagaagacgcgcaaggtctatgaagcgctcatcactttgcccgaggagcgctcgatctaccagcagtggaccaaggcatgggccgaatacctgaacggcgttcaggagacgatggcgctgtcgcgcaagagccccggccgctttccgaccgatgccaacgagctgttgcagaccaaggtcgcgaagatggcgcaggcggcggatccgctgctgctgaagagcatcgagctcaacaacagcggcgccgaagctgaaacgaagcaggcggccgacagctacgccaccatcttccgcttgctcgtcggtatcatcgttgcagccgtcgctatcgcgatcgccgccgcctactatctcgtgcgcgacgtctcccgcggcatcgcctcgatcatcaagccgatgcagtcactcggccaaggcgacctctcggccgaggtgccgcatcgcggcgagaagaccgagataggtgcgatggcggatgcgctccagatcttcaaggacgcgctgatcgccaagaaggccgccgacgaggcggcggcgcgcgacgccgaggccaagatcgaacgcggccgccgcgtcgatgccatcacccgcaatttcgaggtcatgatcggcgaggtcgtcgagaccgtgtcgtcggcctcgaccgagctcgaggcttccgccgctacgctcagcggcacggcgcagcgcggccaggagctcgcgaccgtcgttgcggccgcgtcggaggaggcttccaccaacgtccaggcggtggcgtccgcctccgaggagctgtcctcctcgatcaccgagatcagccgccgcgtacaggattcggcgcggatggcggcggaagccgtcgagcaggcggcgcggaccaacgagcgcgtcaacgcgctgtcgcaggccgcctcccgcatcggcgacgtcgtcgagctcatcaacaccatcgcgggccagaccaacctgctcgcgctgaacgcgaccatcgaagcggcacgcgccggcgaggccggccgcggcttcgccgtcgtcgcctccgnnnnnnnnnnagtcaaagcgctcgccgagcagaccgcgaaggcgacgggcgagatcggggcgcaggtgtccggcatccaggccgcgacgcaggaatcggtcagcgccatccaggagatcggcggcaccatcgagcggctgtccgaggtgtcctcggccatcgcggccgccgtcgaggagcagggcgcggcgacgcaggagatttcgcgcaacgtgcagcaagcctcggtcggcacgcaggaggtgtcgtccaacatcaccaacgtgcagcgcggcgcgatcgagaccggctctgcctcggccgaagtgctgtcggcagcgaagtcgcttgcgaccgacagcactcgcctgaaggtggaagtcgcgcagttcctggaatcggttcgcgcgacctaaaggcaaggcatttcggttcttcacctctccccgctccggagaggtggaacctcgcctggagctctatgtgcccgtttgcgcagccggtggcggtgcggcctgccgccggaacaggatgcgctggtacagccagccgatcgcgaccagcacgacgccgaggcacatgaatgagagcgcgcggtagacgcctgtcagcgtcgacatgtcgatcacgaaggccttcaggatcgtcagtgcgatcacagcggccgaggccagccgcgcacgctccgaattgacgaggatgccgacgccgagcagcgcaacgccgaaggcgagccagccgatcgaataggtgtattgttccgcgcccgtcgtcggtccggtggacaggatcggaccgtgatagaagcggcggatctccagcgtgacataagcgagcgcgaacacgagcgcgccagccgcaatagtgttggcgtagaccttgccgcgctcgccgacgacagcatacgacagcagcagcatcagtaccgccggcagcgcgtagcccagcagcagcagattgaacacggcgccgccgacgtcgatgcgccacagcaggggattctccatgatcaggaggccgaacacgctgatcagcccgccgatcgccgtcagcaccaccgcgccgacattatgcacgatgctgtggctgcgcagccgcaaccgctccagcccgatcgccatcgcgagtgtgatgcagacctgcagcgcgaactcgagcagggaggggggcacggtcatgcggccgcccgccgcaaagtgccgaatctccatgaacgcgagcagggcggtgaacaggatcgcggcggtctcgaccatgcgtagcggcgcatcgtcggcacggcggcgcaggaagatgctcgcagcccagaacgatgcggccggcacgccgtagccccacaagagccagttgaaaatcggcgtggtgccgacggcgtcgccgacgatgcgcggatcataggcgatgcgcgcggtgacgagcccggccaagatagcggcgagccagcgcaggaacggaatcggccgctgcatcgagatccaggcggtgccgagcgacatcagcgccagcgcgatcgtcagccaacccttatccagcgcgaaggtcagcgccagcgccattgcgccgagcgtgccggtcgcgaacagggccgtggagatcgcgatgcctggtcgggtctcgcggcgcgcgagcgcttcggtcgctgcgccgaaggcggcggcaagcagcaccgcgacgatcgcgaacgggatcgagcggtcgagatgagcgatgcgtgcgtagagcgcgaccagaattgcgatcggcatcgcaactgccgttgccgaccacaccaccgggatgattgccgaattcgagcggccttgcgcgaggaaacccgcgatgccgaagcctgccgcgaagatcgcggccatcaccagatgcagcgtcaccgcgctgccggtcgcggtcggcccgatgccgggcatggcgccgcccggcagcaccagcatatcgggattggcgcgcaccgcccattcggcgaacacgatgaagacggtcgcggcggccgcgccaagggcgccggtggccgccggcgcgcgccaggcgacgaacagcgttccggcgaccagcagcgtgaaggcaagcaacgcgagatcggcgtgtccgctcgagagcacgatcagcatcgcgccgaacagataagcgccgagcgcgctcgacgagaccggctcgatctcgccatcgtcgatgccgggcccgaacatgaagccgcagacgaccagcagcgcggcgagcaggaagccggcgatgacatggaaggcgtgcggcgcgacctgcaattcggcggcgtcgagacccgggaaggtccacagcacggcgaagacgatggtggtcaccgcgagccagcgccacagccggatacgggcaaggccgaagctcgccgctgtcacgatcgcaagataaacatagagtgcccaatagtctggcttgccgctggagacgaggataggcgtcacgaaggcgcctacgacgccgagcccggcgagcgcggggccatgcagcagcgctgcggcgagcgtgccgagcgcgaccaggccgagcagcacgaaggccgtcgcgggcacgaggaattcgtacagcgcataggcggcatagatggtcgcgaaggccaccgccgtgccggccgcggtgaggattgcagggatgttggcgatcggcaacgcctggaggctcgagatgctctccttgcgccgcgtccattcgccggcaccgagcagcgccagtgcgaacaggccgctgaggaatacgcgcacgccgggaccgagaaggccggcctcgatcgaatagcgcaccatgaagaagccaccgagcgcaagcgcaaggccgccgatccaaacgacccagcgggtgccgagccgctcctcgaagccgggtgcgggcgccggcacgggcggcggtgcgccggcttcaaggctggcttccagcgggg

SEQ ID NO: 238 - DNA, 82233 bp, Bradyrhizobium colbertium
  misc_feature (33307)..(33316): n is a, c, g, or t
  misc_feature (47370)..(47379): n is a, c, g, or t
  misc_feature (74437)..(74446): n is a, c, g, or t
cgatttgcccggctttccacacagcctgcttgtgccggggcttttttattgttgcagatcagcgagttaaccattcttttccagagcggttcagacagcttgactcctaagaacgaaaagagaacaatgttcttcatacgttctggtaggagcgagacatgttcagggtttttgtcgaagaagccgccgcactggcgtcgatcacgctattcgtcgggatgatcgcgatctgggcgcaggtgatcccgcagctctgattctgcgagtctaacgcagtggtcccttacgccggtgcgcgtctctaccggtgccttggggaaaagcgggacgacgcagccgatcggccgctccggcgtggactctgaagctgtgacacctcaccattgggtggcgagtcggccgggagagtgcttgatgccttgacgagccggcgaccgcgccatctcatctgcaagaggccgtcacgcgaccatgccgagcgccggatttgttcaccttcacgttcactcggcctattcgctgctcaaaggctcgatcaagatcgccaagctcgccgagctggcgaagaaagaccaccagcccgcgctggcgctgaccgataccgacaatctgttcggtgcgctggagttctccgacaagatggcgggctccggcatccagccgatcgtcggttgcgatctggcgatcgatttcgccgaccaggatcccaatgcgcgcaacgcgatgggcccctcgcgcgtggtgctgctggccgcgcaggagcgcggctatcgcagcttgatgcggttgaactcacgcgcgttcctcgaatcgccggacagccatgctccgttcatcaagttcgactggctcgagggcgagaccgaaggcctgatagcgctgacgggcggaccggacgggccgatctcgctggcgctcgccggcgggctcagcgagcttgccgccctgcgctgcgagcgtctggccggtctgttcggggaccgcctctacgtcgaattgcagcgtcacaacacggagaaggagcggcgggtcgaaagcggcctgatcgacatcgcctacgccaaaggcctgccgctggttgcgaccaacgagccgtatttcgccgccacagatgactacgaagcgcatgacgcgctcctctgcattgccggcggccgactgatcgccgagaccgagcgcgagcagctcacgccggatcatcgcttcaagactcgcgccgagatggcgctgctgttcgccgacattccggaggcgctggcctcgacggtggagatcgccgagcgctgctcgttccggccgatgacgcgcaagccgatcctgccgttcttcaccgtcggcgccgcctcgagctcggatgctgccgccgtcgaggccgccgaattgaagcgccaggcggaggaggggcttgccaagcgcctgcgcgtgcacggcctgtcgcagggcacgacggaggagacctacgccaagcggctcgccttcgagctggacgtcatcacccgcatgaaatacgcgggctacttcctgatcgtgtccgacttcatcaaatgggcaaagagccaaggcattcccgtcgggccgggccgcggctccggcgccggctcgctggtcgcgtgggcgctgaccatcaccgacctcgatccgatcaagttcggcctgctgttcgagcgcttcctcaatcccgaacgcgtctcgatgccggacttcgacatcgatttctgccaggatcgccgcggcgaggtgatcagttacgtgcagcagcgctacggccgcgaccaggtcgcgcagatcatcaccttcggtacgctgcaggcgcgcggggtgctgcgcgacgtcggccgcgtcctccagatgccctatggccaggtcgacaagctcacgaagctggtgccgcagaatccggctgcgccggtgacgctggcggcagcgatcgagagcgagccgaagctccaggcgttccgcgacgaagatccggtggtcgcgcgtgccttcgacatcgcccagcgcctcgaaggcctgacacgccacgcctcgacgcacgccgccggaatcgtgatcggcgatcgccccttgagcgagctcgtgccgctctaccgcgatccgaaatccgacatgccggtgacccagttcaacatgaaatgggtggagcccgcgggcctcgtgaagttcgacttcctcggcctgaagacactgaccgtgctcgacgtcgcctgcaagctgctcaagccgcgcggcatccatgtggatcttgcgaccctgccgatcgacgatgccgagagctacgcgatgctggcgcgcggcgacgtggtcggcgtgttccaggttgaaagccagggcatgaggcgggcgctgatcgacatgcgccctgaccgtttcgaggacatcatcgcgctggtggcgctctatcgcccgggcccgatggcgaacattccgacctattgcgcgcgcaagcacggcgacgaggagccagaatacctgcatcccgtgctggagccgatcctgaaagagaccttcggcgtcatcatctaccaggaacaggtgatgcagatcgcgcaggtgatgtcgggctattcgctcggcgacgccgaccttctgcgccgcgccatgggcaagaagatccgcgccgagatggacaagcagcgcgatatcttcgtcgcgggtgcggtgaagaacggggtgccgaaggggcaggccgagaccatcttcgaattgctggccaagttcgccgactacggcttcaacaagagccacgcggccgcctatgcgctggtgtcctatcacaccgcctacatgaaggcgcattatccggtggagttcatcgcggcgtcgatgacgctcgatctgaacaacaccgacaagctctccgaattccgctccgaggcgcagcgcctcggcatcaaggtcgaaccgccaaacatcaaccggtccggcgccacgttcgaggtcggcgagaagacgatctactacgcgctcgcagcgctcaagggcgtcggcatccaggcgatcgagcagatcatcgaggagcggaccaagcgggggctgttcacctcgctggccgacttcgccgcgcgggtcaatccgcgtgcgatcaacaagcgcatcatcgaaagcctcgcggccgcaggcgccttcgacacgctggagccgaaccgggctcgcgtcttcgccggcgcggattcgattctcgcagcttgtcagcgggcgcaccaggccgagaccatcggccagaacgacatgttcgggatgtcggcggatgcaccgaccatcatgctgccgcaggtcgagccgtggctgccggcggagcggctgcgacgcgaatacgacgcgatcggcttcttcctatcgggccatccgctcgacgattacgccaccgtgctgaagcggctgcgggtgcagagctgggccgagttctcgcgcgcggtgaagaccggcgctaccgccggcaaggttgcggcaactgtggtctcgcggatggagcggcgcaccaagaccggcaacaagatgggcatcatggggctctctgatccaaccggccacttcgaggccgtgctgttctcggaagggcttgcgcaatatcgtgacgtgctggagccgggcgctgccgtgctgctgcaactgggggccgagctgcagggcgaggacgtccgtgcccgcgtgctgcacgccgagccgctcgatgacgcggctgccaagacgcagaagggccttcgcatcttcctgcgcgacaccaagccgctggactcgatcgccaagcgcttggccggccccgacatggccggctcgaacggcagcgcaccaaagcccggcagtcccgccatggcgccgcgatccaatggcgacggcgagatctcgctggtgatgatgctcgacctcgagaccgaggtcgagatgaagctgcctggtcgcttcaaggtctcgccgcagattgccggagcgatcaaggcggtcgccggcgtggtggacgtgcagcagctctgacgtttgcctgcagcgcccaaaccaaagcttaactatttggctcgcacgaggtttcgaacttgcgcgagcgcagctatcagttgctggctcgacaatctcgttcggcgggaagccaggaagaagaacaaccatgtgcgacaaatgctctgaaaatctgcatcaagctgttgctccctcccggcgcgcgatgatgcttttcgccggttcggcacttgcggcggcggcgtttggcgggtccgcgctggcgaaggaggcgaaggaggcgaaggcgccgccgaagccgcagaacgtgctgtcgcccgatgctgcgctgaagcggctgatggaaggcaatgcacgctatgtgtcgggcgtgtcgcgccgccacgacttcaagcacgagcgcgaagctttggtcggcggccagaatccatacgcagccgtgttgagctgcgccgattcccgcatcgcgcctgaatacgcgttcgacagcggacgcggagacctgttcgtgtgccgcgtcgccggaaatttcgccggcgatgagaccgttgcaagcatggaatataccgtcgccgtgctcggcacgcccctgatcctggtgctcggccatgacaattgcggcgccgtcgatgcgacgatcaagtcgctgaaggacgacaagccgttgccgggacacattccctccctcgtcgccgcgatcgcgccggcggtgaagacggcagcccagcagagcgggaatgcgctcgacaacgccattcgccagaacgtcatggacaatgtcgcgaagctgaaatcggccgccccgatcctcaacgctgcggtcgagcagggcaagctcaaggtggtcggcgggatctatcggctgagcaccggggccgtcgacttgcttacgcagggctgagccagattccggagcatggggccagtcgcgcctcttttcagcagaggccggcccccgggcacaggtcccgcgcgatccgcgcagtggtcgtcggatgtagttgcaacctgtcgctgattccagctaccatgcatcccggggaatgaaacggggtgtgcgatgctgcgacgagccgcgttgttgctggccgtcggtgcgatgctggtgggctgtgtcagcaatcaggtcgggaccgactttgcgtctgtatcgcagaaggtggggcctccgcgcgtcgggcactctcgcatcgttctgctccaggacaagaggaacggcctcagcatgcaggtctgcgcctgcgaggtgaagctcgatggcgcgccgctcggcaaggtcgtggccggaaaatatgcctttgccgatcggcctgcgggtcggcacgaattgctggtgaccgaactgatgtttccgggcgacaccaagcgcgagatcgtgatggaagccggccgcacgcacttttatctcatcaagagcagcgccaggcacgatgccgcaacgggcggcgcgatcctcggcggcctggccgggcttgccgttgtttccattgcaacggcgggagaggccaatcccgggccggccgaactcgttgcgctggacgaggcgaccgcgcgaacgaagcttgccgaactgcaagccgtggagtgaggtgcgctgcacgaccgatgttcgatcggatgcgcatagtttcggtgcttgaaggagcctgcgccttttcaagccgacgtgaggccgactggtgctggcgccagcagcggcgtggccacgccgccgcctcaatccgggcttttcgttcaagcgccgttcagccggcagcgcgcctcatgcgcggtggcacgtcaactgcaataacgggcaagcaagccatgcgtgggacgctcagaaccttcatctgccttcttctgccgatcgtggcccttgccgccggcgcgcccgagacggcgcgcgcgcagcagccggaaaagcgcatcgcgctcgtggtcggcaacggcgcttatgccaaggcgccgctcgcgaccaccgccaatgatgccggattgatcgcacagacgctccaggcggccggcttcgacgtgatcggcgcgcgcgatctcgatggcgacacgctgcgcaagagcttgcgcgatttcatccagaaggcgcaggcttccggcccgggcaccgtcgcgatgatctatcttgccggctacggcgtgcagcttgccggcgagaactatttcatcccggtcgattccagcatcgcccgcgataccgacgtaccgaccgaggccttgcggatcagcgactatgcgcgccagctcgcgtccattccgctcaaggccaacatcgtcgtgctcgacgcggcccgcgcgcagcctttcatcgagggcggtcagcacatcgcgagcggcctcgcgctggttgagccggaggcgaacatgctgatcgccttcaatgcggcgccaccgtgccgggcgccggaggagcccgggccgtacggcatctacgcgcagtcgctcgccgagatgatccgcaccggcggactgccgttgcccgaggtgttcgaccgcgtgcgcctccgcgtcaacgaagccagcaagggcgcgcaggtgccctggaacgagcagaagatatcggcgcagttctcgttcttcgagcgcgggcccgacgcgccgccggagacggcgcccgaccaggtcgccgcgatccgcaacaagccgatccgcgatctcggcgtgcaggatgcctatgccgcggcgctcgaacgcgacacgctggcggcttatgaggaattcctcgcggcctatccgaatgatccgctcgcaaagcgggtgagggcgatcgtggcggcacgccgcgaggcgcttacctggcggcggacctatcgcgccgatacgccggacgcctattggtcgtatctgcgccggtacccgcgcgggccgcatgcgggagatgcccggcggaggcttgcgatcctgactgcgccgctcgagccgccgccgaccttcacaatgctggattacgacgtgccgccgccgccgccggaggaggtgttctatgtcgatcgtccggtgctgtacttcagcgatcccgatttcggcttcgtgccgccaccgccgccgcccgtgtactatctgccgccaccgccgccggatttcgtcgtgctgccgccgccgctgccggtggtcgggctgttcgtgctgccgcagccggtgttcgtgccgatcccggtgttcgtcagggcgccggtctatgtcgcgccgccgccgaacaacatcatctatcagaacatccacaacacgacggtcatcaacaccgtgatcaatcgcccgccgccgccgccggccgcggggccggcgcttggtccgggcaatctggcgccggcggttgccggccgcgccacgccggcaggtcccgccgtgccgcaggcggtcgcgcaacgcgccgccctgatccagcaaggcaaggcgccgatgccgccgagcgcgacgatccagccgacggtgaggcccgcgatcgcggcacccgctccggccaatgtcgctcctggcacgacagcgcagccgccggctgcggccacgccgcaagccaatacattgacggcaccagggacttccggagtgccgccggccggtccgggagcagcgcccggcaatgtcccgccgaacggcaggccgggttcgacggcgaccgctccagccggcaacgttcctgcgacgccgcaagcaacggcgcctgccaagctgccgcaggccaatacgctgccggtgcccggaaccccgggcgggccgccgccgccggcccgggcagggggcgcgccgggcgctgccccgcctcatggcaggccggctgcgaccgtcacggctcccgccggcaatatcccggcggcgcagccgaacgccgcaaccgctgcggcgcccaaccctccgccggctccccgaggtgcggcgtcgccctccgcaggcctgccgaagccgccggcgaccataaacccgcctgcgtctgagctgcgcggcagggcacccgggtcccagccggtcgctgcgccgccttcgagcgcggcctccggtaagccggcggtcccgcccaccgccaggatcgcgccgccaccgccgcccgtggcggcgagagggccgtccggagttcaggatcaccggccggcaccgccgcaggctgcaaggcctgccgcacccccaccgcatcctcaggccttggcgaagccgacgccgccgcctccgccgcgggtcgcgccacctccgccgccgcgcgcagcgcctccacctgcggccgtggctcgaccggcgccaccgccgccgattgcccgaccggcaccgcctccgcctgcgatggcgcgtccggcgccatctccgcctccaatggcccggcccgcgccacctccaccccccgtggcccggccggcgccacctccaatggcggccgcgccgccgcgtgcggcgccgcctccacctccgccggcgcggcccgcagggccggcacccaaaagctgcccacccggtcagccgaggtgctaggaagcgaagaggcatcaagaagcgactgaagctctccggcgtcccggatggcccttatttccttgcttctggccgaaatggcgctatatagcgcgccatctcacacggaaacatggctcacaaggccgtccggtggcagccggggcgagaacgctccgttttgctcacacgtttccggaggaaccaaccggagaactagaacgatggcgctacccgacttcaccatgcgtcagctgctcgaagctggcgtgcactttggccaccaggcccaccgctggaatccgaaaatggctccgttcattttcggcacccgcaacaacatccacatcgtcgacctcgctcagaccgtgccgatgctgcaccaggcccttcaggccgtcagcgacacggtggcaaagggcggccgcatcctgttcgtcggcaccaagcgccaggcccaggacggcgttgctgacgcggccaagcgctgcgcgcagtacttcgtcaattcgcgctggctcggcggcacgctgacgaactggaagacgatctcggcctcgatcaagcgcctgcgtcacctcgacgacgtgctctcgggcggagaagccaattcctataccaagaaggagcgcctgacgctgcagcgcgagcgcgacaagctcgatcgttcgctcggcggcatcaaggatatgggcggtctgcccgacctgatcttcgtgatcgacaccaacaaggaagacatcgcgatccaggaagcccagcggctcaacatcccggtcgccgctatcgtcgacaccaattcggaccctaagggcatcacctatgttgtccccggcaatgacgacgccggccgcgcgatctcgctgtactgcgatctgatcgcgcgtgcggcgatcgacggaatctcgcgcgcccagggcgattcgggcatcgacatcggtgcctccgctcagcctgtcgccgaggagctgccggccgcgtcgtccagcggcttccagggccttgcgggtccccgcggcaccgccgacgacctcaagaagctcccgggcgtgtcgggtgcgatcgagaagaagttcaacgacctcggcatcttccattactggcagctcgccgagctcgaccacgacaccgcgcacacgatcggcgaagaagtcggtctgccgagccgcgcggatgcttgggtggccaaggccaaggcgctgaccgcggaagcggaatagtcaaaaagaacgatgggttggccggataggatccggccaccatttcagttgacgcgaattcctgaaatggaccgtggcggggccaattggatgccgcgccgcggcaaaccggcaggcacaaaggattttcaacgatggcaacgatcacagctgcgatggtcaaggatctgcgcgagtcgaccggcgcaggcatgatggactgcaaggccgcgctgaccgagaacgacggcaacatggaagcggcccaggactggctgcgcaagaagggtctgtccaaggccgccaagaagtcgggtcgcgtcgcggccgagggcctgatcggcgcgctcaccaagggcaccaagggcgtcgtggtcgaggtcaactccgagaccgacttcgtcgcgcgcaacggtcagttccagggcctcgtcaagatgatcgcccaggtggcgttcgacgtcggcgccgatgtcgagaagatcaaggccgccaaggtcggcgacgtcacgatcgacaccgcaatcaatgatgcgatcgccaccatcggcgagaacatgacgctgcgccgcgccgcccagctcgaggtgagccagggcgtggtctcgcactacgtccacggcgccgtcatcgagggcgccggcaagatgggcgtgctcgtggcgctggaatcgccaggcaaggccgacgagctcgccgcgcttggccgccagatcgcaatgcatgtcgcggccgccaacccgctggcgctggatccgtccggcctcgatccggccgtggtcaagcgcgagaaggacgtgctcgcggacaaataccggcagcagggcaagcccgagaacgtgatcgagaagatcgtcgagtccggcctcaagacctactacaaggaagtctgcctgctggagcaggccttcatccacgacaccggcaagtcggtggcgcaggccgtgaaggaggccgaaggcaaggtcggcggcgctgtgaagatcgccggcttcgtgcgctatgctctcggcgagggaatcgagaagcaggaaagcgacttcgcagccgaggtcgccgcggccagcggcaagaagtaagcgccggaacgttccttccggcgtgccgccggaagcggcgcgcggacaaggaaagtgctcatgactgatccggtctatcgtcgcgtcgtgatcaagctgtccggcgaatatctcgcggggcagcaaggctttggcatcgatcaaccgactgtcgaccgggttgcggacgacctgatcgcggcccgccatctcggcaccgaggtcgcagtcgtgatcggtggcggcaacatggttcgcggcgtcgaggtctcctcccgcggcgtcacgcgcaccaccggcgacaccatgggcatgctcgccaccatgatgaattgcctcgcgctggaagcagcgatcgagcgcaagggcacgccggcacggacgctgtcagccttcgtcatgcccgagatctccgagctgttcacccgcactgcagcacacaaatacctggccgagggccggatcctgttgcttggcggcgggaccggcaatccgttcttcaccaccgacacgaccgcggtgctgcgcgccgccgaaatcggcgcgcaggcggtgctgaaggcgaccaatgtcgacggggtctactcggccgacccgaagaaggatccgaccgccacgcgattcgaccgcctgacgcattcgcaggcgatcgaaggcggttacaaggtgatggatgcgactgccttcgcgcttgcccgcgagacttcgctgcctatcatcgtattctcgatcgcggagccgggatcgataggcgcgatgctgcgtggcgtcggccacggaaccatcgtcgccggctgacggctcgtctggcgcgcccgaaagggaagggcgcggagcggtcgccgggattttgaaggagaaacgtgatggccacgggtaatttcgacctcaacgaagtgaagcgccgcatgcagggcgccgtccaatcgctcaagcacgagcttggcggcctgcggacggggcgcgcctccgcctcgatgctcgacccggtccaggtcgaggcttatggcagtcacatgccgctcaatcagctcgccaccgtcagcgtgccggagccgcgcctgatctcggtgcaagtctgggacaagtcgatggtcaaggcggtcgagaaggcgatcgtcgattccaatctcggcctgtcgccggcgaccgaaggccaggtgctgcgcctgcgcatccccgagctcaacgaggaacggcggaaggaactggtgaaggtcgcgcacaaatacgcggaagccgccaaggtcgccgcgcgccatgtccgccgcgacggcctcgacgtgctcaagaagctcgagaagaatcacgagatgtcggaggacgatcagaagcgtcacgccgacgaggtgcagaaggcgaccgacgggaccatcgccgagatcgaccagttgctggccatcaaggaaaaagaaatcctgaccgtttagggccacctccatgtccaacgccgccgcgccagcaacggaagggcccgaccggtccgaggcgcctgcgcacgtcgccatcatcatggatggcaatgggcgctgggcggcggcgcgcggcttgccgcgtgcggaagggcaccgccgcggtgtggacgcgctgcgccgggtggtgcgcgcctcgcatgagctcggaattcgctatctcaccatcttctcgttctcttcggagaattggtcgcgcccggcgagcgagatcggcgacctgttcgggctgctgcgacgcttcatccgcaacgatctggcgagcctgcatcgtgacggcgtcaaggttcgcatcatcggcgagcgcgacggccttgagagcgacatctgtgcgctcctcaatgaggccgaagagctgacgcgcgacaacacgcgtctgacgctcgtcgtggccttcaactacggctcacggcaggagatcgcgaaggcggcccagaagctcgcccgcgaggtcgcggagggcaagcgcgatcctgccaccatcgacgccgagacgctcggggcgtatctcgacgcgcccgacattcccgatcccgatctcatcattcgcaccagcggcgagcagcgtctgtccaacttcctgatgtggcaggccgcctacagcgagctcgtgttcgtgccgatccactggcccgatttcgacaaggcggcgctcgaaagcgcgatcgccgaatttgccaggcgcgagcgccgtttcggcggcctggtcgcgaaaacagcctcgtgagcgaacccgacgccgcatcggcaggcgccaagcctgccccaagcaatctggtggtgcgagtcctcgcggcgctggtgctggcgccgctgacgattgcgatcgcttatgccggcggttggctgtgggcccttctcgtcaccctggtctcgatcggactgttcgcggaatggctgatggtggtgggcgcgggatcggctgcgctgaccggggcagggacggtcgtgatcgccatgatgggggccgctgtcgcgtttggcgcgctgaagaccgccgtcatcaccggtctcatcggcggggcgattgtgacgctgatcgcgcgcggcaagttcttgtgggcggctaccggcttcgcctacgcggcggcggcgctgctggccgcgatcctggtgcggaaggatctcgtcaacggtttctccgcgctgatgttcgtgctgctggtggtgtgggcgaccgacatcggcggctatttcgccggccgcagcattggtggaccgaagctgtggccgcgcgtgagcccgaagaagacatgggcgggtgcattcggcggctttggcgcgagcctgttggtcgcggtgggctttgcggtcttcggctttgggaagatgggaccattgctgctcgtcagcgccgtcctctcggtggtatcggcattgggcgacctgttcgaatccgcggtgaagcggcgcttcggtgtcaaggattccagtcacttaattcccggacatggcgggctaatggaccgcctggacggttttgtcgccgccatcctggcggcctggattatcggctttctccgccatggtgtgcatagcgccggaagcggtcttatggtttggtgagcacatgagcgcggtcccattgcgtaacaacaggcttgcggcgtccgacgtccgcagtgtcacggttctcggcgctaccggctcgatcggcgatagcaccatggacctgctgcgggccacgccagagcgctaccgtgtcgaggcgctgacggcgaacggcaatgtcgcagccctggcaaagctcgccaaggaattctccgcccgctacgtcgcgatcgccgacacctccaagctcgccgaactcaaggctgcactcgcaggcaccagcaccgaatgcggcgccggcgaaagcgcggtgatcgaggccggcgcgcgcccggccgactgggtgatggccgccgtgagcggcgctgcgggcctgaagccggcgctggccgcggtcgaccgcggcgcccatgtcgcgctcgccaacaaggagtgcctggtctgcgccggcgatttcttcatgcagcgcgcggcaaaggcaggcgcctgcatcctgccggccgattccgagcacaatgcgctgttccaggcgctcagctcgggcaatcgcgacgagctcgtccgcgtcatcatcacggcctccggcggcccgttccggacctggaagccggcggacatcgagcaggcgacccttgcgcaggccctgaagcatccgaactggagcatgggccagaagatcacgatcgattcagcctcgatgatgaacaagggcctcgaggtgatcgaggcgtcgtatctgtttgcgctctcgccggacgagatcgacgtgctcgtgcatccgcagtcgatcatccacggcatggtcgagttttccgactgctcggtggtggcccagctcggcgcgcccgacatgaggacgccgatcgcgcattgcctcggctggcccgatcggatcaaggggccggcagcaaagctggacctcgccaagatcggtcagctgactttcgaagcgccggacttcgagcgtttcccaggtctccggctggcctacgattcgctccggacagggaagggggcgaccaccgtctacaacgccgccaacgaggtcgctgtggccgccttcatcgccggcaagatccgcttcggggcgattgcccggctggtcgaggcgaccctcgaggattggatcaaaggcgggaaccaggcccctctgacgtccgccgacgatgcaatctccgttgaccatgttgcgcgaaatagggcggccgccctattgcctcaaattgccttaaaggcatcctagttggttcgggccagggccttgcggcgctgggtgagggaaatcgatgatcgactttttcgtccatagtttcaacacgttgagccatgggctcctcggttacgccgttcccttcctgttcgtcctgaccatcgtcgtgttcttccacgagctcggccatttcctggtcgcgcgctgggctggcgtgcgcgtgttaaccttttcgctcgggttcggacctgagctggtcggtttcaacgaccgccatggcacccgctggaagatctcggcgatccccctcggcggctacgtcaagttctttggcgacgagagcgaggcctccaccccgtcggcccagacactctcgtccatgacggccgaggagcgcgccggcagcttccaccacaagaaggtcggcccgcgtgctgccattgtcgctgccggaccgatcgccaatttcatcctgggcgcgctgatcttcgccggcatggccctctactacggcaagccgagcaccatcgcccgcgtcgacggcgtcgtcgccaccggcgccgcggcggcggccggcttcaaggtcggggacgtcgtccttcagatcgacggcaagccgatcgagagctttgccgacatgcagcgaatcgttgcgatgaacgccggttcggcgcttactttccaggtgaaacgcgatgacgccattgtcacgctgaccgccaccccggcgctgctcgagcgcaaggatccgttcggcaacagccaccgtctcggcgtgctcggcatcgagcacaagtcgcaggccggggaggcgtcgaccgcgccggtcggcatcggcgaagcgctcaagatcggggtcgagcaggtctggttcatcatcaccagcaccttcaagttccttggttccctcttcgtcggacagggcaatccgaacgaggtcagcggtgttctgggaatcgcgaagatgtcggggcaggcggcgagcgccgggttccagttcgtgatcaatctctgtgcggtgctgtcggtctcgattggtctgctgaacctcttcccgatcccgctgctggatggcggccatctcatgttctatgcggccgaggtgctccgcggtcggcccttgtccgagcgaacccaggaaatggggttccgaatcggtctcggcctggtgctgatgctgatggtgtttgcgacctacaacgacatcctgcggatggccgcttcctgataggggcttttttgtggcgttgctgttgagcaacgtcttgcaatgaaattgaaattacggcgctttccgccgtttgcggagtcggcgaaattggctacaagcagcctgaacttggggaatctccggaccggcgttggggttgggtctggcacggaatgataagggcgcgttgcgcgatgaagtttggactgcgactccgggggggcttgctcgcaaccctgatcatgttcggcgcgccggtaattgccccggtcggggctgttttcctgtcttcgtctgcgctcgctcagagcgtccagtcgatttccgtcgagggaaatcgccgcgtcgaagtggagacgatccgttcctattttaggccgggtccgggcggccgcctggatcagggcgccattgacgacggtctcaaggcgttgatcgagaccggcctgttccaggatgtgaggatcaaccgcggccccggcggtcagatcatcgtctcggtggtggaaaacccggtgatcggccggatcgccttcgagggcaacaagaagatcaaggacgagcagctctccgccgaggtgcagtccaaggcgcgcggcacgttctcccgcgccatggtgcagtccgacacgctgcgaatcgctgaaatttatcgccggtccggccgctatgacgtgcgcgtcacgcccgagatcatcgagcagccgaacaatcgcgtcgacctgatcttcacaatcgaggagggcgccaagaccggcgtcaagtcgatcgagttcgtcggcaacaacgccttctcgtcctaccgcctgcgcgacgtcatcaagacgcgtgaatcgaacctcttgagcttcctcgccagcggcgacatctatgatcccgatcgcgtcgaggccgaccgcgacctgatccgccgcttctatctcaagaacggcttcgccgacgtccaggtcgtggccgcgctcactgagtacgatccggagaagaagggcttcaacgtcaccttcaagatcgaggaaggcgcgcagtaccgcgtcggcacggtcgacttccgctccagcattcccaacttcgatcccgcgtcgatgcgcgcctattcgcgcgtcaatgtcggctcgctctacaacgtcgagtcggtcgaaaagtcggtcgaggagatgcagatcgaggcctcgcgtcgcggctatgccttcgccgtggtccggcccggcggtgaccgcaacttcgaggcgcacacggtctctgtcgtcttcaacatcgacgagggcccgcgcacctacatcgagcgcatcaacctgcgcggcaacacccgcacgcgggactacgtgatccgccgcgagttcgacatctcggagggcgacgcctacaatcgcgcgctggtcgaccgcgccgagcggcgcctgaagaacctcgactatttcaagacggtgaagatcacgacggagccgggctcgtcgagcgaccgcgtcatcctgaatgtcgacatggaagagaaatcgaccggcgacttctcgatctcgggcggttactccaccaccgacggcgcgctggccgaagtgtcggtctccgagcgcaatctgctcggccgcggcctgttcgccaaggcgtcggtgacgtatggccagtatgcccgcggctactcgctgtcgttcgtcgagccttatctgctcgactaccgcgtggcgctcggtctcgacctctatcagcgccagcagctgtccaacagctacatctcctacggcaccaagacgctcggcttctcgccgcgcctcggcttctccttgcgtgaagatctggcgctccaggtgcgctactcgatctaccagcaggagatcacgcttccgtattaccttgcgaactgtaacaacgtggtcggttcggcggcgttcaatcccagcccggccttctctgctgccactggtatacctctggatccgtccaccaatggcctcggctgctacaacgatggcgaagcctcgctgccggtgcgcagggagctggccaacggcaagaccctgacctcggcgctcggctacacgctgacctacaacacgctggacaacaacaagaaccccaccgacggtctgcttgtcgatttccggcaggattttgccggcgtcggcggggacgtctcctatctgaagtcggtcatcgatgcgaagtactacacgccgctcgtctccgacatcgtcggcatcgtgcgcctgcagagcggcatgctgaacaagatcggcagcgatctgcgcatgctcgaccacttccagatgggcccgaatctcgttcgcggctttgccccgaacggcatcggcccgcgcgacttgaacccgtacggttcgcgggatgcgctcggcggcacccagtactggggcgcttcgctcgaattgcagatgccgttctggttcctgccgaaggaagtgggcctgaagggcgcggtctatgccgatgccggcggcctctacgactacagggggccgacgagctggaccacgaccaacgaagtcaatgcgcccggctgtatcccgtcgaccatcgatccggcgagcagcggcacctgcaccggcctcgtgtatgatgacagcaaggttgtgcgctcctcggtcggcgtcggcctgatctggcagtcgccgttcggtccgcttcgcttcgactacgccgtgccgctcagcaagggcaagtacgatcgcgtgcaggaattccggttcggcggcggcaccacgttctagttcgatcaatacggcacgatccggatcagtggagccggtttccgaagaggatcgtgccaatccaagtcatgaggcatgatgcggcctggccgcttcatgccgaagcaggaccgcgacggggtggaatggcgcagtcgatcttcttcacaaagccgcctgccacagcgttggccgagattgccacgctgaccaaggcgcagctggtcgaccccgcgaggggcggccacgtcatcacgggccttgcctcgctggacgaggcgggccccatgcatctggcgttcttcgacaacctcaaatatgccgatcagctccgggcgaccagggctggtgcttgcctggtcagcccgcgattcgaggccgaggtgcctgcgcatgtggccgtgttgcgggtggcgcagccattccgcgccttcgtcaggatcgcgcgggaatggcatggagacgcgctgaggccgcaatcctgggtcggcaacgacggtatcgcgccatccgccatcatcgatcccacggcccggctcgaggatggcgtggtcgtcgatcccctggccgtgatcggccccgacgtcgagatcggcagcggcaccgtgatcggcgtcggcgcggtgatcggcccgggcgtcaagatcggccgcgactgcaatgtcggtgcccgaaccgccatccagtgcgccctgatcggcaacaacgtgctgatccaccccggctgctcgatcggtcaggacggctacggcttcatcttcttcggccccgaaggccatctgaaggtgccgcagaccggacgggtgctgatccagaacgacgtcgaggtcggcgccaacaccacgatcgaccgtgggtccttgcgggataccgtgatcggtgaggggactaaaatcgacaatcaggtccagatcggccacaatgtgacgatcggccggcattgcctgctcgcggcgcagatcggtctcgccggcagcctgaccatcggcgacaacgtggcgctgggagcgaaggttggcatcaacaatcacctcaagatcggcgacggagcgcaggtgacggccatgagcgcggtcaaggacgacatccccccgggcggcaggtggggcgggcatttcgccaagccgaccaaacaatggttcaaagagatcatcgcggtggagcgcctggtacgcgacagcaaggcggagccgaaagacgagggacgggaatgacggcggaatcacctgttaagttcgagctggtggatatcaacgccatcctccagaccctgccgcaccgctttccgatgctcttgatcgaccgcgtgatcaacatccgggccgactacagcggcatcggcatcaagaacgtcaccttcaacgaaccggccttccaggggcacttccccgagcgccccgtctatcccggcgtcatgatgatcgaggcaatggcacagacggcgggcgtgatcggcatcaagtcggtcgagggcaccgagaaaccgcgggcggtctatttcctcacgatcgacaagtgcaagttccgcaagccggtgctgcccggcgacaccattgaatatcacatgcgctcgctggggcgccgcaaagccatgtggtggtttcacggtgatgccaaggtcaacggccaggtggtggcggaggccgacgtcggcgccatgctgacggactgagcggatcagctcttctggaccggctcgcgcgtccggcacgtgtagcgcccggtggtcgcctcacgtttgatattccggctaaagaactgacccatggacggtgcgcccatgaggcgttcgacggtgtccgccgccacgccgcaataacggacataggcgccgttgctcgcgacaatcaggtcctgctgcgcgcgatcgtaacagacccgctgaagcaccgtgctgcgggtgatgtcccggcattcaaacgtgacgagatcgacgatccgctgctcgccagtctcgatcgtctctgacacgatcggtgtacccgcgagctgcgctagcaagaggaccagggccctgaccacgacaattgaagctccgcatgaacgtcctgatggaccgggaaggccgcctcatccggcacttgaaacacggcgagatgatacgtcactggacagatcgggcatagtcgcgctaaccaccggaaaagcgagcgacttcaatagataaccagaccttcttgacgagtaagattggcttgatgagcaagattgatcccaccgcacgggtcgcggacggcgccgtgatcggcgagggtaccgagatcggaccctattgcatcatcgggccgaacgtcgcgatcggaaagaactgcaagctgatcggacatgtgcacatcaccgcgcagacgaccatcggtgacgattgcaccatctatccctttgcctcgctcggcacgccgccgcagtcgctcggctatcgtggcgagctgacgcagctccggatcggcgcgggctgcaccatccgcgagtccgtgaccatgaacgccggcactgttgccggcggcggtgtcacgaccgttggcgaccgcggctatttcatgaactgcagtcatgtcggccacgactgtcatgtcggcaacgacgtgatcttcgcgacctcggcgacgctgggcggtcattgcgagatcggcgatttcgtcttcatcggcggcttgtccgcggtgcaccagttcacccgcatcggatcgcaggtcatggtcggcggcgtctgtggggtgcgcgacgacatcattccgttcggtctcgtcaacggtcaatatgcggtgctggaaggcctgaacctgatcggcatgaagcggcgcaagttcacaaagcagcggctcgcgaccgtgcgtgcgttctaccagaagcttttccatggctccggcacattcgccgaacggctggaggcggcgcgtccgctggcgggcgaggaccctgcgatcgccgaaatcctcgacttcatcggcaagggcaagcgcccgctctgtcttcccgctatcgcgaagtgaccctgcgatggccgcgggaatgacatcggcggctccggaagtttcgtcaccggtcgggatcgtggccggcggcggcgcaatgccgtttgcggtcgccgagtcgctcgcggcgcgcggcatcacgccggtgctgtttccgctgcgcggggcctgcgatccggcgcgggtggagcagttccgccatcgctggatttcggtcggccagctcggccgcgcgatgcggctgtttcgccaggaaggctgccgcgacctgatcttcatcggcacattggtgcggccgtcgctggcggagatccggttcgacatcaagacgctgcgcctgctcggcaacgtcatccgcgcctttcgcgggggcgacgaccatctcttgtccggtgtcggccgcatgctcgagcaggatggctttcgcatggtcggcatcaaggatgtcgcgccggatctgctgatgcccgagggctgcatcagtcgcgcctggcccagcgacaccagcaaggccgacatcgaacgcggccgcgcggtgctgaccgcgctcggcccgttcgacatcggccaggctgtcgtggtgatcgacggccacgtggtggccgtcgaggacatagagggcacagacgcgctgctcgctcgcgtcgcgcggctgcgggaggaagggcgcatccgcgctgccaccggacgcggcgtgctggtgaaggcaccgaagagcggccaggatctgcgcttcgacctgccgacgatcggcccgcgcacaatcgagggcgtcgcggccgccggccttgcgggcatcgcggtcagcgccggcaacaccattgccgccgagccgcaggcgatgatcgcgcttgccgacgcaaaatatctcttcgtcatagggctgagcgcgtgatgcagtcgcgtgatcccaagcgcaagatcttcctgatcgcgacggaggaatccggcgaccggctcggcagttccttgatgaaggtactgcgccagcgcctcggcgacggtgtgcagttcgtcggcgttggcggccgcaccatggcccgcgagggccttgcaacgctgtttccgatcgaggagctgtcgatcgtcggctttgccgcggtggtgcagcaattgccgaagatcctgcggctcatccgaaagacggccgacgccgtgaccgatgccgcgcccgacgcgctcgtcatcatcgacagccccgattttacccatcgcgtcgcccgccgcgtgcgctcgcgcagccccgagatcccgatcgtcgattacgtctcgccgcagctctgggcgtggcggccgggacgggcgcggaccatgctcagctacgtcgaccatgtgctgggcctgctgccgttcgagccggaggaataccgcaagctcggcgggccgccctgcagctatgtcggtcatccgctgatcgagcaattggcgtcgctgcggccgaccgcggaggagcagacacgacgcgatggcgagccgccggtgctgctggtgctgccaggcagccggcgcagcgagatccggcatcacctcgatgtgttcggcgcggcactcggccggttgcaggcggaggggcgcgcgttcgagctgatgctgccgaccatgccgcatctcgaacccaccatccgtgaaggcattgccaattggccggtcaagccgcagctcgtgatcggggagaacgagaagcgtgccgccttccggatcgcgcgcgccgcgctggccaaatccgggacggtgactctcgaactcgcgctgtcgggcattccgatggtgaccgcctatcgcgtcggcgctatcgaagctttcatcctgcgccgcgcgatccgcgtctcgtcggtgatccttgccaatctcgtgatcggcaaggacatcattccggagtttctgcaggaggattgcacgccggataagctcgcgccggcgctcgccgaactgctgatggattcgccgcttcgccggcgacaggtggaagcattcgcccagctcgatcagatcatgtcgacgggtaacacatcgcctagcgtgctcgccgccgacatcgtgctggccgcgatgcgaaagggcgtgcgaacgggctcgggcgtgtcctcataagcgtctgcttgaggaaagcgggagcgaacaaacgattgtgtatgcgcgcaacgtacaacatgcgctcaacgggacagcaaccagcgccttcgacacccagtacaacgtgtaagcgtccagtttcagttactgccagctaagacggcgatcaataccactgtcgtctggattgctgcagaagacgccgccagtgggcgaccgcaattggcttaccggcaatctcatacgtacacgctccaccaaggcatggaccggtggcatgaaaatgtctcggccgactggctttggctcgacggcacgctggagccacacgctttgattgacatgctggcccgtcacgtcggccacttgatccgaaagcgctcagccatcccaacgtgttccgctgcgcggaacggcaaagacgaacgctgattgacttgccgagttgtctcatgttctcatttctaaaaagaacggctcagctattcagacgggctggcaagggagagagacatgtcggatcagaacagcaagttcaatcgccgaaacgtgttgatgggttccgtagcaacgcttgcaacgccttcgatcattggaagcgcgcacgcgcaggaaaaggtttcctggaaggtgcagtcgcactggcccaaagcatcgggctcgttcaacgacagtcttgtcgtactgcagaaggagctggaagaacgtaccggcggacgcttcaagatggaattgtacggcgcgggcgaaatcgcgaaggatcgcgagatcttcaacgtagtccgcaagggcgtcgttcagatgggcacgatctcgccggcctatatcctcggcgaggcgcaggcgatgggtttgtactacggagttccgggtacgttgcgcgagacctgggagctgatgcacctgaccaagaatctcggcatcgagaagatggtcaacgatgaactgcgacccaagggcgtgatcctgctcggcgaaaaggcctatccgaccgagatcgtgctgaagaagaagatcacctctgcggcagacctcgggaccctgaaggtgcgttcggccggcacgatgcttgattacctgtcggccgcgggcacctcgccgcaacaggtcgccggccccgagatctaccaggcgatttcgacgggcgtcgtcgatggcgctcactggggcgcggcgatcggcgcgctgtcgatgaagttctgggaggtcgcgccctatcacatgaaaccggcgctcggcgtcaccaacgactgctggatcatcagcaccgctgcgctggacaagttgcctgccgatctccggctccagtttctcgccttgatcgaagagcgctacttccgtcgctcggtcgagtatctgcacaaggaagcgattgcgctgaccaccggcaagacgaagatgaacgttgaggtagttcgctttcccgacgacgtgctcaagaagttcgccgatgcttcgaagggcattctccagaaggagatcgccaagggacctgttgcgagcaagggtggcgaggccctgacgacattaatgaccgatctcggttacgtctgacattaccggccgccggccggcggggcacggcaggcggcacggctgcttcaaaatcgttccgaatcaccgacagcgtgaacaggcggcgctgacttgcggtcgtcagaatacgggtcatagaatgctgaaactcgccaggacggtcacgcacctgaatatctggatcggcaaggtcgcggcatggctgatcgcgccgatgttcctgctgctgatgaccgacgtgatcatgcgctacgtcgtcggcagtgcggctatctggaccgccgaattcgcacagctgatcttcggcgggtacgcggtgattgccggcgggtatctgttggtcgagcgggcccatgtcaacgtcgacatcatctatggcaaattcagccgcgtgaacaaggcggtcgtcgatctcgctacttcattcctgttcttcctcttcctcggggtgctgatctggcaaggcgtcgacatggcctgggattccgcggccaagttcgagagatcgtccagtctctggaatccgcatatctggccggtcaagatcatcatcccagtcgcgggcgtgctgttgctgttgcagggcctcgtccggtttgcctcggacatccgcaccgtcaaggggctggagaacgacccggatacgttcggcaagcaggcgaccgacgaaccctctcattagacgaacggatccattgtgtcagtcgagcttctcacgcttctattcttcggttcgctgctggtcttccttttcatcggcacgccgcttaccttcaccctcggcggcatctcggtcgtcttcctgtacttcacgatggggccggtcgggttctacatcgtcgcgtccaagttctgggactcgatgatgagcttcacgctgatcgcgataccgatgtacgtttatatggcgatgctgctcgagaagtcgggtgtcgcgaacgatctttaccggatgatgcatctctggttcggcggctttcgcggcgggcttgcgatcggcaccgtagcgatctgcgcgatctttgccgcgatgagcgggatcagcggcgccgcagtcgtgacgatgggcaccatagcgctgccgcggatgctggagcgcggctacgacaagcggctcgctgtcggcgcgatcaactgcggcggcggctggggcatcctgatccccccatcgatcctgatggtgctttacgctttgctgaccgaggtatcagtcggccggctgttcgcatccggaatcggtcccggcatcctgctgttcgtgctggtttcgatctatatcggcgttcgcgcctggttgcagccatcgcttgcgcctgcattgccgatccaggagcgcggcgactggcaaacaaagttcgcttcactgaaagccgtgttcttgccgctgttcatcgtgtttctggtgctcggcgccatcttcggcggctttgcaacgccgactgaggctgccgcgctgggcgtgttcggcgcgctgatcgcatccgccgttcatcgcaggctgtcgatggccgtgctgaacgacgcggcgatccaaaccctgcgcctgacggcgctgatcatgtggatcttgttcgccgcgcatgcgttctcgacggcatacacgacgctgggtgccagcgagttgatgaatcacctgatgacgcttgttcccggcggaaaatggggagccctcgcgttcatgttgttcgtgctgctgatcctgggcatggtgcttgacccggtcgggatcatgctgatcacgcttccggtgttcctgccggtggtccaggcctacaattttgatccgatctggttcggcgtgatcttcatcatcatgatggagatcggctatatgacaccacctttcggcttcaatctgttttatctgaagagcgtggcgccgccggaagtcacgatgggtgatatctactggtccgtgattccgtacgtgcttgtgactatggtcggtgtgctgatcctgatcgttttcccggatatcgcgctgtacttcccgaacctgttctttggcgtggcgagatagcagcttaacaggtgaaggacgcggcgcagcattgtgctggctcgcaacacaacttccagccatctaccgcgcggttctacgtttttgcatcgctcgctccgactttgccggcatcatcagccgcgaggatgtgaccggaagtttgcagcctagcgtgacaccaaggcgattgacacggagcggatgtttacgatttcggtgggcaaacatccgttgctacgcctgcccatttcgcaccccaagagaccatcgatcgtagatcaccttgatcgcgacctggatcaatatccgcgacatctccgtcgcgcaacgcgaacccgagacgaattcgagtgcacgccctgggcgagacccgcatcgccccgaaaatactgaccggcgatgcgatggctgtcccgggaggcgaggaacagctccatggtggcaatgtcgtcgggcctcgccgcaccgcggacgccccgacgcgagcgccctttggcaatggcctgcacctttcggataccgcagccggcggcggcgctcggtgatcaccacgcccttcgcaatcacgtggacgcgaatgctgccgggaccgagcagccgggtcaggcgcaatgttccgccaaacgaaagcggcgccatcttgcgatggcgccgcttcgaaacccgtgacggccggcgttagcgcttgtcgatcggaacgtaatcgcgctttgttacgccggtatagagctggcgcggacggccgatcttctgctgcggatcctcgatcatctcgctccactggctgatccagccgacggtgcgtgcgaccgcgaacagcacggtgaacatcgacaccgggaagcccatcgccttcagcgtgatgcctgaatagaagtcgacgttcgggtagagcttccggtcgatgaagtactggtcgctgagcgcgatcttttcgagctccatcgccaccttcagcatcggatcgtcgccatggccggtctccttgagcacggcgtgacacatcttctgcatgatcttggcgcgcggatcgtagttcttgtagacgcggtgaccgaagcccatcaggcggacctcggagctcttgtccttcaccttggcgatgaactcggggatcttgtcgaccgtgccgatctgatagagcatgttcagtgcggcttcgttcgcgccgccatgcgccgggccccagaggcaggcgatgcccgccgcgatgcaggcgaacgggttggcgccggaggagccggcaatacgcactgtcgaggtggatgcgttctgctcgtggtcggcgtgcaggatgaagatcttctccagcgcatcggcgagcacggggctcactttgtaatcctcgcagggcaccgcgaagcacatgttgaggaagttctcggcaaagcccagcgagttcttcggatacacgaagggctggccgacggtgtacttgtaggccatcgccgccagggtcgggatcttcgcgatcatgcgcatggacgcgatcatgcgctgctgcggatcgttgatgtcggtgctgtcgtgatagaacgcggcgagcgcgccgacggccgcaaccatgatcgccatcggatgggcgtcgcggcggaagccctggaagaagcgggccatctgctcgtgcaccatcgtgtgatgggtcacgcgatgatcgaaatccttcttctgcgcggcggtgggcaggttcccgtagagcaggagatagcaggtctcgaggaagtcgccgtgctcggcaagctgctcgatcgggtagccccggtactccaggacgcccgcgtcgccatcgatataggtgatcttggactggcagctcgcggtcgaggtgaagcccgggtcgtaagtgaacaggccggactggccgtaaagcttgccgatatcgacgacatcaggcccgacgctgccgctgaggatcggaagatcgtaactcttgtttccaaccgtcagagtggcggtcttgttgcttggttttgcgtccatcgtaggtccccgatgtgtggtgaaacgggccggagccggaggcccctagggagatcatgggggcaggccggaagttccagaatgtacggggagatgggtatattattgctatgtgcgctgcaagatcgccgcgcgcatggtcgacttacgtcgtagattgatccttaagccggtcgaggctctcctggcgccccaggacatccaaaacctcaaatataccaggcgacgtcgtccgtccggtgagcgccgcccgcaaaggctgggcgaccgcgccgagcttgagaccgttttcctcggcaaaggcgcgcagcgcggcttcggtggtggggccgctccacgtctcgactttctccagcgcggaatgaagccggccgatcagcctccggttatcttgcgtcagcaacgcttgcgccttgggatcgggggtcaagggccggtctgcgaaaatgaaatgggcgccgtcgatcagctcgatcagcgtcttggcgcgctccttcagggccggcatggccttgagaagttgtgcccgtgtcgtctcgtttaacttggccttaatctcgtcgcggctcggcacgacgtggtcgagcacgtcctcgaacatcctcacgagcgattgatcgtcggcgtggcggatgtagtggccgttgaggttctccagcttggcgaaatcgaagcgggcggcggcacggccgacgctggcgagatcgaacgccgcgatcatctcctccgtcgagaagatctcctggtcgccatggctccagccgagccggacgagatagttgcgcagcgctgcgggcaggtaccccatggcgcggtaggcatcgacgccgagcgcgccgtgccgcttcgacagcttggagccatccggcccgtgaatgagcgggatatgggacatgctgggcagcgtccagcccattgcatcatagatctgcttctggcgcgcggcgttgatcagatggtcgtcgccgcggatgacgtgggtgacgcccatgtcgtggtcgtcgaccaccacggcgagcatgtaggtcgggttgccgtcgccgcgcaaaaggacgaggtcgtcgaggttctcgttctgccagaccacgcggccctgaacctggtcctcgatcacggtctcgccggtctgcggcgcgcgcagccggatggtcggcttgacatcgctcggagcggtcgcgggatcgcggtcgcgccacatgccgtcatagaggcgggtacggccttcggcgcgcgccttctcgcgcatggcggcgagctcctcggcggtggcgtagcagcgataggccttgccgtcggccagcagctgctcggcgacctcgcggtggcgggcggcgcgggcgaactggtagatgacatcgccgtcccagccgagctccagccatttgaggccatcgaggatggccgcgatggcagcctccgtggagcgctcccggtcggtgtcctcgatccggagcagcatcttgccgccatgcttcttcgcatagagccagttgaaaagcgccgtgcgggcacccccgatatggagaaagccagtcggcgagggagcgaagcgggtgacgacggaatcggacattcttggcagggcccatgcattggaagcggtggtgtatagcaggcccggagcataactaaagcccgacggcggacggcaaggccttggcgcggcgacgcgaatttggcagaaggaccgctgatttccttacaggattttcgtgatgacagaaccggtggcagctgaggttgggcgcgatttcattcgtgacatcatccaggccgacctcgagcagggcaagtacaaggagatcgtgacccggttcccgccggagccgaacggctacctgcatatcggccacgccaagtcgatcgcactcaacttcggcatcgcccaggagtttccgggccgctgtcacttgcgcttcgacgacaccaacccggtcaaagaggaacaggaatacatcgattccatccaggccgacgtacgctggctcggcttcgattggggcaagaacctgttctatgcctcggactatttcgaccgcctgtacgaatgggcggagcagctgatccgcgacggactcgcctatgtcgacgaccagagtcaggaggagatccgtctctcgcgcggcacgctgaccgagcccggcaagaactcgccgttccgcgaccgcagcgtggaggagaatctcgacctgttccgccgcatgaaggccggcgaattccccaacggtgcgcgcgtgctgcgggccaagatcgacatggccgcgggcaacatcaacctgcgcgaccccgtgctgtaccgcatcctgcatgcgcaccatccgcgcaccggcacgaagtggagcatctatccgagctacgactatgcgcatggccagtccgacgccatcgaaggcatcacgcattcgatctgcacgctggagttcgaggaccaccggccgctctatgaatggttcatcgagaagctgccggtgccgtccaagccgcaccagtatgagttcgcgcggctgaacctgacctacacgctgctgtcgaagcgcgtgctgacccagctggtccgcgacggccatgtcgcgggctgggacgatccgcgcatgccgaccatggcaggcatgcgccgccgcggcgtgccgccggcggccttgcgcgaattcgtcaggcgcatcggcgtcgccaaggccaacagcgtggtggatgtcggcatgctcgagttctgcatccgcgaggagctgaaccgcacggcccagcgccgcatggcggtgttgaggccgctgaaggtcgtaatcgagaattatccggaagggcagaccgaagagctcgaggcgatcaaccatcccgacgacgccagcgccggcacgcgcaagatcactttcggccgcgagctctatatcgagcaggacgacttcatggagaacccgccgaagaagttcttccgcctgtcgccgggcaacgaggtgcggctgcgttatgcctatttcgtcaaatgcaccggcgtgatcaagaacgacaagggcgaggtggtggagctgcgctgcacctacgatcccgccaccaagggcggcaacgcgcccgacggccgcaaggtcaaggccaccatgcactggctgccggccgcgacttcgatgccggcggagatccgcatctacaaccagcttttcgccaatccgaccccagacgcctccaattttgcagccgatctcaatccgaactcgctgcagattctctccgacgcgcgggtggaggcttccgttgccgagagcaattcgaccgagccgatgcagttcgagcgccagggctatttcgtgcgtgacaaggactcgacgcctggcaagccggtgttctcgcgcaccatcggcctgcgtgatacgtttgcgaaggaagtcgccaaaggctgagggagcggtcatgagcagtgaggccggcgagatcgtttccgccatcatctcgaaatggtgcgcaggcttcgcaaagctcgacgcctcggcgctgtcgtcgctgtattcgaagaacgcgttcttcttcggctccaatccgaaactctatcggggcagggacggcgtcgccgactatttcaacggcctgccgcgctggcgcaaaccgagcgccgcgttctcggatgtacaggcggcacagtcgggtcccgacctcatcaacatggctgcgaccatctcattcgatcttgccggcgagcgtgccgatctcatggtcaagatgagctgggtgatcgtccgggaggacggcgactggaagatcgtcaaccaccatgcctcctcgcaggcgccgctgatctgacgcgcctcgccgcacacaggatcctcatcaggtgctggaaacgaacgtgggactggtgcgttgagtgggatccaaacagggatccggccatgcagaacattgcagagcatatggaagtgatcggcgccgacggcgttcatgtcggcaccgtcgatcgcgtcgagggcnnnnnnnnnntcgcatcaagctgaccaagaaggacagtggcgagggcagtcacaagggtcaccatcatttcatcgacaagggcctcgttgccgacgtcgaaggcaacaaggtccgtctgtccgccaaggcgtcggtggccgtgacgatggaagaggaaaagtagggcgctcggccgctcgttcctgatctgtaccgctatctgagcagtcgcaccttccagtagcctcgtcgcccgtcgcgtatcgcaaggtgcagggggaatggcggagcggagccggccagtgcgctcccagggagtcgccgggacgtggccagtcggccgtgtcgcgcccgctggcggcttcgcgccggctgaccttggcctttggcccgccatcgtcgagacgctgcgccgatgggcccgcgccgaggcggggcccggccggttgttgccctgggtgccggtcgccttcgggggcgggattgcactctacttcgccgcggatcacgagcctgtgctgtgggtcgtggcaacgacagcggccgcgctgatgctcggcgcggtgctgctgcggcggagccgcctgttcgcccccgccatcatgatcgcagcggtcgccgccggctttgccgtcgcgacctggaagaccgcgcgcgtcgctcacaccgttttggcaaagccgctctattcggtgtcgctgtcggggttcgttgaagcgcgggacatccgcgagcgcaccgatcgtttcgtgctgcgcgtcaccgcgatggaggcgcagcgcagcgacatcaagctcgagcgcgtgcgtctttcggttcggaagggaacggcaccggaggtcggcagcttcgtgcagctgaaggcccggctgctgccgccgatctcgccggtgcgccccggcagctatgatttctcacgcgacatgttcttccagggcatcggcgcctccggcttcgtgatgggcacgatcacggcgtcgacgccgccggatgccggcggcttgcggctgcgctacgcggctttcatgcagggcctgcgcgatgcgatcgacgggcgcatccgtgccacgctcgaaggcgacaaccgagcgatcgcgacggcgctgctcaccggccggcgtgatgcgatcaccgcgcccgtcaacgacgccatgttcgtctcggggctgggccatgtgctgtcgatctccggctaccacatggcggtcgtcgccggcgtcgtattcttcgcagtgcgcgcgctgctggcgttgatcccgggactggcggccggcttcgcgatcaagaagtggtcggcggcagcggcgctggttgcggctgcgttctacctgctgctttcgggcgcagaggtcgcgacgcagaggtcgttcttcatgacggcggtggtgctgatcgccgtgatggtggaccgccgcgccatcacgttcaggacgcttgcggtggccgcactgatcgtgctcgcggtcgcaccggaggccctggttcatcccagttttcagatgtcatttgccgcaacgctcgggctggtggcgctggtgcagatcggcatgccgaacctgctcgcatcgcccgatcattccgcaacggcgcggatcgcgctgtggggcggccgcgagatcgcgatattgttcctggcctccttgatcgccgggcttgccaccacgccttatgccgccttccacttccaccgcgtgacgccatacggcgtgctcgccaatctcggcgcgatgccggtggtctcggcgctggtgatgccggccgggctgttggggctgctcgcggcgccgttcgggctcgacggcgtgttctggtggctgatggggatcggcatcgactggatggtcgcggtctcgcgctgggtggaggcattgcccggcgcggtcggccgcattcccgcgttcgggatcgcgccgctgatcgcggcgagcctcggggtcatcgtgatgggcctgttgcgcacgcccttgcgctggtccggtgcgctggtgctgtttgccgcgatcatctgggggctgtcggtgcgacagcccgatatcctgatcgccggggacggcgcgagcgtcgccgtgcggggcagggacgggcatctgcatgtgatccgcgcgagcagggatggcttcctgctcaagcaatggctggctgccgacggcgatccccgcgacgccggcagtgcctcgctggccgacggtgtgtcttgcgacgcgtccggctgcgtcacggccttggctgacgggcgcttggtcgcgctttctctccgcatcgacgcgctggcggacgattgcagccgcgccgcgctggtggtgacggcgcggcccgtgccccctgattgcgcggcgatggtcatcgaccggccgcgtctggccagtcagggtgcactggctctgacgcggagcggcgaaggcttctcggttcaggccgtgagggcgcgcagcgcaagccgcccctggttgccggcgggcgccggcgagggagacttcgacggcagcctcgcgccgaagacggcactgccccgcaatcgggacgcaacgccatcggatgccgacttgcaggctgacgatggaggatagacgggaccaggcgaaccgacgggcttccatgaacgcacccataccatctcgccggccgcggccggcgatggcattttgatcctggttctcgacctctcggtcggaacgacggcttcagtcgatcggcaggcgggtgatcgtcgaccgggtcccggcggcgatctgcggcttgtgctcgcgctcgccaattgtctgggtcaccggcagctgcagcacggtcgcgcgctggccttcgaccagctgtgtcaccagcacggacttgccgtccgggaattcgatcgcgtcatgatggcgatcgggaatgtgcggatcgatcttgccgaacttgccgacgcgggagttgacggtgcgcgtccagatccagcggttatcgtaacggacgttgtcggcaaaagcgagctcggtgcccggcagcaggcagactgcgacggagagatcggcttcagacgcgaagccgcgcgttgaggtgccgcggaacgttgtcgtgacgatggtctcgccgacttcggccgggcgcgtcgcgatggcatgcaggctgtagtcacacatcgggtgctcctcatgtgaagatgacccgcacctctttgaggcgcaggcctccaacagggtggaagcacgcaacgctctgcttcgttgtaggcaaatctgcggctgcgtccgcaggccgcgatcacattatctttccccaatccaataggaacaaagctcgcttcggagcattttcggcagccgcatacgattgctctgcagacgatgcggcgatcgtgcaacagccacgcgaccccgatgctgccatcagcgctgctgcgcttccgctcaaagcgaaccgacgcgcggtcgtcgccttgaatcggcggggtgcgatgctgctcgcaagcaagcttgagacatcgcgcgggagaaaaaggggccggataatctgcgcagaaccagaaaaccatccagccggagcgatcctcatccgcgccacaaagctcggacgctggatccgctcagtacttccggtaaagcccgatcagcttgccctgaattttcacgcggttcggcggcaggatgcggacctcgtacgcggcattggcaggctcgagcgcgatcgaggcaccgcggcggcggaagcgcttgagcgtggcctcctcgtcatcgatcagcgccaccacgatgtcaccggtattggcactctcgttgcgctggatcagagccatgtcgccgtcgaggatgccggcctcgaccatcgaatcgccgcgtacctcgagcgcataatgctcgcctgagccgagcatgtcaggcggcacgctgatggtgtggctccgggtctgcaacgcctcgatcggcgtgccggctgcgatgcgccccatcacgggcaccgcaacgggacgctcgccttcgtccgcaggcgggctggacgtggggcgtatcctcccgagattgccctcgatgacgctaggcgtgaagccgcggcggctgccggcagcggcctggagctccggcagcttgatcacctcgatggcacgggcgcggtttggcaggcggcggatgaagccgcgttcctcgagcgccgtgatcaggcgatggatgcctgacttcgagcgcaggtcgagcgcatccttcatctcatcgaaggatggcggcacgccgctttccttcagacgttcgctgatgaaccgcagaagctcgtattgtttgcgcgtcaacatctcgaccaaagtcccccggttgatgtcgttcgattccgagacgatgaatttcggcgataaggccgctacatctcgaaacaaatcatgaacggacactatatgttcgatatgtgttccgcaactgcttaatttacggtgaacggggcggagttcgcggaatgcgtgtggccccgcagctcaggccggaagccgcagcaccacgcagggcgtgccggcttcggccttcggcgcgaacggtgcgcgcacgagaagtagctgtgccgcagcaagattcgcaagcagcgaggagtcctgatggctcacgggaacagcaacgagcgcgccgtcgtcgcgcagctccaggcgtgcgcgcagataatcctcgcgctggtcgttggcagcgagatcgcgacccagcacggcgtgctcgcgctgatgatgaatcatcgagcggcccgagagcgcacgaatcagcggcaccatgaacaggaaggcgcacacgtaagatgatacgggattgccgggcaggccgatcacgcgcatcgcgccgagccggccgtgcatcatcggcttgccgggccgaatcgcaatcttccagaacgccatcgagatgccttcgtccctcagcgcctgctggaccaggtcgtggtcgccgaccgacgctccaccggtggtgatcaggatgtcggcaccgctctcgcgggcgcggcggatgccggcggacgtggactccagcgtatcggcggcaacgccgagatcgatggtctcggcgccctcgctgcgcgcgagcgcgtgcagggcgtagccgttggagtagacgatctggccgggaccgggcgtgctgcccggcgccaccagttcgtcgccggtggcaaggatcgcgaccttcggacggcggcagacggcgagctgcgggtgattcattgccgcggccagcgccagatcgcgctcggtgaggcgggttcccttgcgcagcagcacgtcgccctcgcggaagtcgacgccggcggggcgaatgtgacggccgggaattgcggcctccttgatcgtgatgagcttgccctcggcgatcgtgtcctcctggatcacaaccgcgtcggcgccatcgggaacgacgccgcccgtgaagattcgtacggcttcgccgacgccgacccttccagcgaacggacggcccgctgcgacctcgcccgttaccgtcagcctggaatcgatcgtggccgcatcggccgcccgcactgcatagccgtccatcgccgacatcgcctcaggcggttgcgtgcgccgcgccgcgacgtcgcgcgcgagcacgcgatggtaggccccctcgagggaaaccgtttcttcggccagcggctcggcgccggccagcaccgccgcgagcgcgtcagaaaccggcatcagggccacgggcggaaactcctgctgagcagatcgctaatgcggcgagagttctagcggagtgcgaacgcgaggcaaagcgggaagcaggatgatttatcctgcgtcatcaatgaggctcaactccgcctgggcatggtccggaaggtgagacagaccggcatgaggatggccacggcgagcacgagaagaacgagcgccgcggccaacgtcggtcaactcccgcttggtcggccccagccgtcgttcgaggcgacgtcgggcgctttggggccttgatccttgtctggcagagggtcggcctgggacttcaggtcggcggccttgctgatcagcttggcggaaagttcagaatccgaggtggttctggcgaattcaagcagcagagaagcctgcctggtgagataggttttgcccagcacgtggataagtccaatgtagaagtcccaacggactcatgagtccgttgggtggtattctgttccgggaactccgtataaaaatgcacaaaggcctcgggttcctgagctgcgccaatccagttccgggaaccgtgtcgtgacgcctgcagggggtttcagatacccagggccctcaatgcgttgccgacatcgcgcggcgacgtcacatggacggcggtcaggccgcgcgcccgtgcgccttcgatattctctgccagatcatcgaagaacacaatgcgctccgccggcacgccgatcgccgccacgacgtgatcgaatgcctcggcatccggtttgcgcaggccgatgctggacgacaaatacagttcgcggaaatggccgagcacgctggcatattccttcgagaaatagtccacatgcggccgattggtgttggaaaaggcatagagcggcatcagtttcgccgcgcgcggcatcagctcggcgatgtcaggcatctccccggcgaagatcgcgttccagccttccaggaattgcgcgtccgagatgccgattccgagtgaagcacgcagcgaggcgaaatagtcctcgtcactgatcttcccgatctcgtgcagccggtaggcctcgtcgcgcacatagcgcgcgacgatggcctccggctggcaaccggcatgccctgcccagcaggcgatcgccttggagaagtcgatgtcgagcaccacgcgcccgaggtcgaacagaagcgcatccgcgctgccgggagagagcgatgtcattgcttccttctgacgtcagtattggcaggtcagtagcgatagggctcatggtcgaacagcgggaacgcgctgaacacgctcggcgcgttggtggcggttgccggatgcaggcaggacttgtccacctcggcgaacgaggtggcgcccaacaggccaaggcagcgcagcacctcgtcctcaagcagctccagcatccgtgcgactccggcttcgcctgccgccgccagcgcccagcattgcaaccgcccgatgccgacgaggtccgcgcccgcagcgatcgccttgacgatgtcggtgccgcgaccgaaaccgccgtcgaccatgatcttggcgcggcccttcacggcatcgacgatctcgggcagcacatgcatggcaccgcggccgtggtcgagttggcggccgccatggttggagacgtaaatccagtccacgccatgatcgagtgcgatcagcgcgtcctctgccgtggcgatgcccttcagaatcagtggtatctcgaatttgtccttgatcatcttgaccgtccgccattccaggcccttctggaaatcgccccctgtggcgcgcaggcggctctcgcgaacgtagcgcttggcgatgtcgcgttcacgacggctgtaatgggcggtgtcaacggtcaggcagaaggccgcataggcgttcttctcggcccggctgacgacatcggcgacgacggcatcgtcgccgcggacatagagctgataaagccgtagcgcatcgggcgcggcttcggcggtcttttccagtcctggttcggataccgagctcagcatgtgcgccgcaccgaaagcgccggcggcgcgcgccacgcttgccgcgccatccggatcgaagatctcgagggcaccgacgggagcgagcacgaccggcaagcgcatcctgcggccgaactgatcgaccccgccgtcgaccttgcggacgtcgcgcagcacgcgcgggcggaaggcgatctcgtccagagccatgcggttgcggcgcatcgtggtttcggtctcggcggcgccgacgatgtagtcccaggcattctggttgaggttggcgcgcgctttccggatgaactcgtgcaggttctggaacggctcgttgctggcaccgagctcgacgttccggtccggctggatgcggggcgcttcgttcattgttatcctcccgagaatttgaagccttatcgtcatcgcctatcgcgtccgggcctcccaaaccatcgtaaaatcgcatagctgcgaggcgcggcgggccgaccggtttgcgcttgccgcgcaacaaccgggacgttgccaaaattttagtccagggcgaagggatttcgtcggcatacccgccaacgtggcatcccggccttgaagaaaccggaatggtattgtgagaagcgggctggatcgccatttgtatggcgcctcctcagctccaagagaaccgccaagcaaaaggcaccctcatccatgcggaaatccctgctgttccccctcggcgcactcaccggagcctgcctgacccttctggtagcgagcccgcacggctccgtatgggcggcgcgggcggcggcgggcgcgaatgatgcctacagccagctcaatctgttcggcgcggtgttcgagcgcgtcaaggcgagctatgtggagaagcccgacaatgccaagctgatcgagggtgcgatcaccggcatggtgacttcgctcgatccgcattcgcgctatatgaacgccaaggcctggaccgagatgcaggagaccacctccggcgagttcggcgggctcggcatcgaggtcacgatggaggatggcctcgtcaaggtggtgtcgcccatcgacgacacgccggcgtccaaggccggtctcatgtccggcgacctcatcagcaagatcgacggcgaagccgtgcagggcatgacgctcgagcaggcggtcaacaagatgaagggcccggtcaacaccaagaccaagctgaccatcgtgcgcaagggcgcggacgcgccgcttgaagtcgcgatcacgcgcgagatcatccacgtgcgccccgtgcgcttccgcgtcgagaacggcgacatcggctatatccgcattacctcattcaacgagcagaccaccgatggcctgaagaaggcgatcgcgtcgatctccaagcaggtgtcgccggagaagctcacaggctacgtgctggatctgcgcaacaatcccggcggcctgctcgaccaggccgtgtcggtgtccagcgccttcctgcagcgtggcgaggtcgtgtcgacccgcggccgcagtccggaagaaacccagcgcttcaccgcccaaggcggcgatctcactaagggcaagccgatcgtggtgctgatcaacggcggctcggcctcggcctccgagatcgtcgccggtgcgctgcacgaccacaagcgggcgacgatcatcggcacgcgttctttcggtaagggctccgtgcagaccatcattccgctcggctccggcaacggcgcgctggcgctgacgacggcgcgctactacacgccgtcgggtcgctcgatccaggcccagggcatcgcgcccgacatcgagatcctccaggacgtgccgccggagctgaagggccggatggacaccatggccgaggcccagatgcgcgggcatctctcggccggcgagggcggcgagcagaccgggtcgcaatcctatgttccgccgaaggaggaggacgacaaggccctgcatgcagcgttcgacttcctgcacggcggcacggcgaacgccatcgccgccaagcggccggcgaaagctgcggtgccgaactgatctgatgacctcagacttagatcttgatcgcccgggagtggatgtccgcttccaggcgaattcgttcggggcgctgtctccgcgtcgacgtcagcccctcggtctcgcagaagcctaaccggcttcgcggcggcggctctcgctgccttcgcgccgggcgagccggctgcggtgcagcgcgaacagttccagcatcttgtcggcgggcctggcggcgctgaacagatagccctgcatctccgagcagccgagcgtgcgaagcaggcgctgctgctcctcggtctcgacgccctcggccgtggtagtcatgcgccgggcggccgccaaattgaccacggcctgaacgatgctggcggagccgtcggggcgggcgatatcgtcgacgaaacagcgatcgatcttgatcttgtcgaacgggaagcggtgaagatagctcagcgatgagtagccggtgccgaaatcgtcgagcgcgatgcgcacgccgatggcgcggagctggtgcaggatcgccagcgcggcatcgtcgtcacggatcaggaccgcctcggtgatctcgagctcgagccggctcgccggcaggttcgaggcggcgagcgccgccatgatcttgagcgccagcgtgccgctcttgaactgcaccggagagacgttgaccgcgaggcggatgtcgtcgggccagtttgctgcatcccggcacgcggtcgccagcacccactcgccgatctcgttgatcaggccggtgtcctccgcgatggggatgaattcggcaggcgagacccagccgcgcccggggtggcgccagcgcaccagcgcctcgcagccggtgatgcggtcgtccttcaagccgagacagggttggtagtagacctcgagcccgccttccagacccccttgggcaagggcgtggcgcaggtcgttctcgagctggcggcgctcgcggaccttggcatccatctccggctcgaagaaacgataggtgcggcgtccggcagacttggccgcatacattgccatgtccgcgttcttgaggatctgatcgagcaccgtgccgtgttccggcgcgagcgcaataccgatgctggcatcgctggtgagatggtggcccatgcagtcgaacggcgtgcggatggcttcgaaaacccgcgcgacgagttcgctgacccggtccgatgacgtcacagcgctttgcacaatggcgaactcgtcgccgccgagccgcgccacgaaatcggcggggcccgcacagcggcgaaggttcgtggccaccgatttcaagagctcgtcgcccacgagatggccaagcgcgtcgttaacgcccttgaattcgtcgatgtcgatgtagtgcacggcaatctgctcgccgtcgcggagcgcagccagctctccgcgcagatgctcatggaacatggtgcggttgggcagatccgtcagcgagtcgtagtgggcgagatgggtgatgcgctcctcgatgcggcggcgctccgtgatgtcctcatgggtcgcgacccagccgccgtccgcaagcggttcattgaggatgtggatcgaccggccgtcggcggtgtcgaccaccatggagttgcggacatggatgtccttcagcacgagcgcgacgtaagcgtcgacgtcgccggtgaacgagccggtcgccttgcgatgggcgatgatgtcgtggaagctggagccgggtttcacgatgtcaggcgacagtccgtacatctcgatgtagcgctggttgcagaccacgagccgccgctcggaatcgaacagcaagaggccttgcgtcatgttgttgacggcgtgatcgagccgttgcttttccagcgtcagccgttcgcgggaaaggcggtgctgctcaagcagcttgcgcacgaccgcgatcagcacgcctgcgatggcgagcgcggacgaggcggcgaccgacgtcagaattccgatttgctcgcgccagtccgtcagggccgacgcgcgcgtcgtggtggccatcatcaggatcgggaagtggggcagggcccgcgaggagatcagccggtcctcgccgtcgacgggactcgtaaagcggccggcaaaatgatccagcccgaacaccctctggtgctcgaacgggccggtcttgaagttccgtcccatcaattcgcgggagtgcggatagcgggcgagcagcgtgccgtcccgatgcagcatcgagatggtcgcgccgtcgccgagcacgacggaggcgaagaatttctcgaaattggcgggctcgatgccgcgaccgacgacaccgaggaactcgccaccgggaccgacgattctgcgggctaccagaatggtccaggcaccggagaggcggctatacagcggctcgatcagcacgtcaggcgaaaaggggtcgtacttgaaggtgcggaagtaggcgcggtcggcaacgttcacttttggggctggccatgccgtcgacgaattgatcagattgccctcggcatcgatgacgttgacgcctccgatgtagggcagggcctcgatcttcgaccgcagcattcggtgaacgtcctcgcccgagaggcgcgtacgatactgctctccggtcgtgattccaatcgagcggacatgatcgatgaaggctttctggatgaccccgaaatcctgcaattgctgatcgaaatgatgagcgagcagcagcacggtattctccagctcgcggctggagttgcgcagcgcccgctcccggaagttctgcgccatcaggaccgagccgatggcgatggttgcgatcagaagcgtgccgcccgccaccagccaacggatcggtccgctgcgcacgaagatttggtcaaagagacgacttccgaatttcatcttcatgctggatcattgccgcgcacacgtcaggatcaattcatgaccctgaagacatccgttggtttacggggacggtgtggaggtaaagttaggaagcgcggttaacgaagcgtgaacgattgcgcgcaaaggcgatccagtgccggcacgagggctgagcactccagggcgagcgtgcttcaggcgcgataatggccggacttgccgccgagcttctcgacgagatggatgccctcgatgcgtacgccgcgctcgaccgccttgatcatgtcgtagatggtgaggcacgcgaccgagacggccgtgagcgcctccatctcgacgccggtcgggccggtcaccttcacgctggcgcgaacgaggcagcccggcaatttgacgtcaggctcgatctcgaccgtcaccttcgacaacgcaagcggatggcagagcgggatcagctcagaggtgcgcttggcggccatgatgccggcgatgcgcgcggtgccgagcacgtcccccttcttggcgttgccggatacgatcaggtcgagcgttgctttggtcatgacgacgcgcccttccgcgaccgagcgccttgcggtcgcgggcttgtccgagacgtcgaccatccgggcctcgccggaggcgccgatatgggtgagggcgggaccggccccggattcagccggcttcctcttgattggctttgtattggctggcttgcgcgccatttcagcgcgtgcccgtcgcgtgcgccgcggtcttgcgcgcgagcagcgcgtgcgtcgcggcagtgacgtcggcctggcgcatcaggctttcaccgaccaggaacgtcgacatgccgacgcgctcgaggcgggtgagatcttcgggcgtgaagataccgctctcgccgaccatcagccgttcctgagggatcagcggtgccagcagctcgctggtcgcaagcgtagtctcgaaggtgcgcaaattgcggttgttgacgccgatcatcggggatcgcagcttcagcgcccgttcgagctcggcgcgatcgtggatttcgatcagcacgtccatgccataggcgatggcggcatcttcgatgtccttcgcggcggcatcgtcgagcgccgccatgatgatcaggatgcagtcggcgccgtgggcgcgggcctcgaccacctggtaggtgtcgaacatgaagtccttgcgcagcaccggcagcgaggtcgccgcgcgcgccgccaccatgaagtcgagatgcccctggaaggagggtgtgtcggtcagcaccgaaaggcaggctgcgccgccggcctcgtaggctctcgcgagtgccggcgggtcgaaatcagcgcgaatgagacctttggaaggcgaagctttcttgatctcggcgatcagcgcgaaatcgccatgcgcgtgcttggccttgatcgcccgcacgaagccgcgtggcgcggcttgcgccttcgccttcgcctcgaggtccgagagcggctgtgcgcacttggcggcagcgatctcgtcgcgcttgtaggtttcgatcttggtcaggatgtccgacatgcgcattcagctgttggagactgccaccaggtgcttcagcttcgcgttggccgcgccnnnnnnnnnnagcattgatcagagcgacgtcgcggtaggggctcggcttgccgtcgagcacgctttgcagcgcgaccgcattggcatcggcgtcaccgcccttaagcgcgccggcctcgcaacgcgagagcccggcctcctcgggggtcacctcgaaattccggatctcgccattgtggagcgcggacacgaaggtggggccggtgagggtgatctcgtcgagaccgtccgagccgtgcaccacccatgcagattccgagccgaggttcttcagcacctgtgccagcggttgcacccattgcctggagaacacgccaaccatctgccgcttcacgccggccgggttggagagagggccgagcaaattgaagatcgtgcgcgtggcaagctcgacccgggtcggaccgacgttcttcatggcgggatggtgggcgggggcgaacatgaagccgatgccgcattcgcgcacgcagcgcccgacctgctcaggcttcaggtcgatcttgacgccgagcgaggccagcacgtcggcggcccccgagcgcgacgacagcgcgcggttgccgtgcttggccaccggcacgccggcgcccgagacgatgaaggcggcgcaggtcgagacgttgaccgagcccgagccgtcgccgccggtgccgacgatgtcgaccgcttcgggcggggccgtcacggtcagcatcttggagcgcatcgccgcgacggcaccggtgatctcgtcaacggtctcgccgcgcacccgcagcgccatcaacaggccgcccatctgcgagggtgtggcctcgccgctcatcatggcatcgaaggcggaagcggcttcgtcgcgcgacaggctggcaccggtcgcgacttttccaatgatcgatttcaggtcgtccatcgcgtgctttcaactcactggttcgcgccggtcacctgcgcgaaggcggcctgattgatggtggtcccgatgtcggcttcgagcttgttgatgtaggaggcgacctgttcctcggtctgggcccggtcgaggctctccttcagcttcttgaccgcatcggaggcgacgtcgaccgcgggttcgacgatgtcggtgacgcggaagacaatcacctcgctgccaccgctcacggcggtctgtccgacgccatccttggcggtgcggaaagcggccgcgacgaccgtgccgggcacgccggctggagaatcgtcgcgcttgaatccggtcgcggtctcgaccttggcgccgatcgcggcggcctcatccgcgagcttgccgcccgcttcgagcttctgcaccatctcggtcgccttcgtcttcagcttggctgcgatctggtcctggcgccagcgcgcctcgacttggtctcggacctcgtcgagattgcggtctcgcgagggcgtgatggcgagcacgtcgtaccagacatagccgcccttgtaggagatcgcatcgctgtcgacgccgacatcggtgttgaaggcctgcgatacgacgtcgaggccctgcgggatgttggcgaccggctggccgtccggggcgcggccggagcggtcgacggcgtcgatggtcgccgcggtgaggccgagcttctgcgccgcgtcgatcacgctggagccgccgccacgctcgtcttccatcttgtcgcggagatcggcgaccttgacgcgcgcacgctcggtcgcgatctcacgtttgatgtcgccggcaaggctggcgtagtcggcctccttgcccggctcgatcttgtcgaccttgacgatcgcgacgccgagaccgctctgaatcggctggctgatctcgccgacgggaagcgcgaaggcggcgtctccgacggcaggcgtgagcgaagacttggtcacgagcccgaggtcgatgtcggaggcgctcagcccgcgttccttgccgagatcctcgaacgacgtcccgctgacgaggcgctcgcgtgcggcttgcgcttcggcgacgttcggaaacacgatctgctgaatctggcgcttctccggcgtgccgagccggtccttgcgctgctcgaacaccttcttggcatcctcgtccgacacctcggtccatttgccgatgtcctccggcgagaccacgacgaaggcgatcttgcggtattcgggcgcccggaattggaccttatgatccccgaaataggcggcgagcgcctcgggcgagggcgggtcgatggtcccggcctgagccgcgtcgagccggacgaattcgatcgagcgttgttcgttctggtagcgcgtcagcatgtcgatcatggtcttcggcggcttgatgccggcaccgatggtgccggtgatctgccggcgcagcgacaccttgcgctgctcggcaacgtagcgctgctcggtgtagccgaaattgcggatcacggcctgaaagcggttcgcatcgaagtttccgccgacgcccttgaagttgggatcgttcatgatgacgtggcggatctgctcgtccgactggccgagcccgagcctgcgcgcctcttcgtcgagggcggcttcggcgatggtctgctggagcacctggcgatcgatgccgaaggcacgcgcctggtcgggcgtcagcggacggccgaactggcggctgatctgctgtagccggtcggtatagatctggcggaactcgttgagggagatctcggtgctgccgaccttggccaccgtggactgcccgaagcccttgaaaatgtcggcgatgccccaaatgccgaaactgatgatcaacacgcccatcaccatggccataatggtcttgccgagccagtttgatgaggccttgcgcattcctcgaagcatttggtccaacttgtttggtcaggaggggaacggagcgcgtcttaatgcagattccgcaaaagcgcgtcaccaaattgatcaatcatcataaagtggcggctttccccccgcaacctcgcctcgggcgccgcttcgagcctgcggttaaaagcctctaggtctggaactgccgcggcagctctgctagcgcatgcgcaaaccctcatcctgctggaaatgacatgaccgacgccatccgaccgctgatcgccggcaactggaaaatgaacggcctcaaggcccaggctgccgaattcgacgccatgctcagcggcgcggcagacgtggccggcaaggccgatctcctggtctgcccgccggcgaccctgatcgccaccttcgctgacaaggcgcgcggcaagaaggttgcggtcggagcccaggattgccaccccaaggcctccggcgcccataccggcgatgtcgccgccgaaatgctggtggacgcgggtgcaaacgccatcatcgttggccattccgagcgccgcgccgatcatggcgagagcgacgctctcgtcaggcagaaggcggaagccgcctggcgggccggggcggcggcgatcgtctgcatcggcgagacgcaggcccagcgcgacgccgggcagacgctggacatcctgcgtggccagctcggcggctcgctgccggacggctcgatcgccgcgaatctgatcgtcgcctatgagccggtctgggcgatcggcaccggcctgacccccacggcccaggatgtcgagcagattcatggctttatccgggaactcctgacctccaggttcaaggacgaggggaccaagatgcggattctctacggcggctcggtcaaaccgtcgaatgcggccgagctgatggcggtgaagaacgtcaacggcgccctggtcggcggcgcgagcctgaaagcggccgatttccttgccattgccaagggctgcccttagctaaacccaaaccattggtcggaccgatcggggggtggcaatagccctcccgatcgtgtaacaccgcgcaacttcaggacaaccccgcgaagcgcgatcggccgccgtcaggcgccgcccgcttgtgacggaaggatatcatgcagaccgttgtcatcgtcatccacctcatgatcgtcgccgtcatgattggcgccgtcctgctgcagaagtcggaaggcggcggcctcggcatgggcggaggcgccggcttcatgtcgagccgcggtacggcgaaccttctgacgcggaccactgccatcctggcggtgggcttcttcatcaccagcctgttcctctcctggtacgctggttacaaccgggcgccgtcgtcgatcatcggccagccgtcgcagacccagccggccggcggatcgccgatcgcgccgcccacctcgggcggcatcctggattcgctgaagaaggccgacgagcagcagcagaaccaggcgccgtcaggtccgcaggtgccgcgttcgcaataaagcaggggggccatgcagggtggctgctaccgtcctgcatcaacaatccccatcaaggcactgtcaccactcttagttctggctcacccacaggcccgcaaaatctttggggcggaatacgaatcgctttggcgaatcgaatgtaggggattagaggttaagtcccatggcgcggtacatattcatcaccggcggcgtggtttcttcgctcggcaagggtctggcttcagcggcactgggtgccctgctgcaggcccggggctacaaggtccgcctccgcaagctcgatccctatctcaacctcgatcccggaacgatgtcgccgtatcagcacggcgaagtgttcgtgaccgatgacggcgcggagaccgatctcgacctcggtcactacgagcgcttcaccggccggccagcgaccaaggccgacaacatcaccacggggcgcatctaccaggacatcatctccaaggagcgtcgcggcgattatctcggcgcaaccattcaggtggttccgcacgtcaccaacgccatcaaggaattcgtcctcgaaggcaatgacgagttcgacttcgtgctggtcgagatcggcggaaccgtcggcgacatcgagggactgccgttcttcgaggcgatccgccagctcaagaacgagctgccgcgcgaccatgccgtctatatccatctgacgctgctgccttacattccgagcgccggcgaattgaagaccaagccgacgcagcactcggtgaaggagctgcgctcgatcggcatccagccggacatcctgctctgccgcaccgaccgcgagatcccgaaggaagagcggcgcaagctcgggctgttctgcaacgtgcgcgaaagcgccgtgatcgaggcccgcgacgtcgacaacatctatgccgttcccgaggcctaccacgacgccgggctcgacgacgaggtgctcgccgccttcggcattgcctcgcggatcccgccggagctgcgcagctggcgggagatcaacgagcgcatccgcaatcccgagggcaacgttaccatcgccatcgtcggcaaatacaccggcatgaaggatgcctataagtcgctgatcgaagcgctctcgcatggcggcatcgccaacaaggtgaaggtcaatctcgactggatcgagagcgagatcttcgagaaagaggatccggcgccgttcctcgagcacgtcaatggcatcctggtgccgggcggcttcggccagcgcggcgcggagggcaagatcaaggcggcgcagttcgcgcgggagcgcgacgtgccgtatttcggcatctgcttcggtatgcagatggcggtgatcgaggccgcacgaaacctcgtcggaatcgaggatgccaactccaccgagttcggcccaaccaaggagccgctggtcggcctgatgacggaatggctgcgcggcaacgagctggagaaacgctcgcaggccggcgacctcggcgggacgatgcggctcggcgcgtatccggcggcgctcaatcgcggcagccgggtgtcgcaggtctatggcggcgccaccgagatttccgagcggcaccgccaccgctatgaggtcaacaccgcctacaaggatcgtctcgagcagcacggcttgaaattttcgggtctgtcgccggacggcgtgctgcctgagatcgtcgagtacgaggatcatccctggttcatcggcgtccagttccatcccgagctgaagtcgcggccgttcgagccgcacccgctgttcgcctcgttcatcgaggcggcggcgaagcagagtcggctggtgtaacgcttctccgacctttgacgaccgcgcggattgttgcgacaactccctgcgcaagaacaacagagcagggagtgaacttcgatgatctacgaaatgcgcgtctatcgctgcgtgcccggccggctgccggcgctcctgaagcgattcgaagccgtcacgctcaagctctgggaaaagcacggcatcaagcaggccggcttcttcacgacgctgatcggtgagtcaaaccaggagctgacctatttcctggcctgggactcgctcgccgagcgcgagaagaagtggggcgcgttcatgaccgatccggattggctcgaggcgcgggcaaagtcggaagcggacggccagatcgtcggcaacatcgtcagccagattctggcgccgaccgccttctcggccgtgaggtaagcgcagcccacggcagcggtgagccctggcgcaaccctgttattcgtacggcccgggcggaagagggttgatccgaccctcatcacggctatggtcgcgccgaaacgagggatctgccttgagctcttcgacgtcagcggcgccggtcgtcaccattggcacggtcaagttcggcaatgatctgccgatctcgatcattgccggaccctgccagctcgaaagccgtgagcacgcgctggaggtggcctccgccctgaaggagatcgccgcgcggctgaagataggtctcgtctacaagacctccttcgacaaggccaaccgcaccagcgcgtccgccgcgcgcgggcttggccttgcgcagtcgctgccgatcttcgcggagatccgatcctcgcttggcctgccggtgctgaccgacgtgcatgaagccgcgcaatgcgccgaggtggcgcaagcggtggacatcctgcagatcccggccttcctgtgccggcagaccgatctcctgcttgccgcggccgcgaccggcaaggtcgtcaacgtcaagaaggggcagttcctggcgccctgggacatggccaatgtcgtgggcaagatcacgggcggcgacaatcccaacgtgctcgtcaccgaacgcggtgtctccttcggctacaacacgctggtctccgacatgcgcgcgctgccgatcctggcacgcaccaccggcgcgccggtcatcttcgacgccacccattcggtgcagcagccgggcgggaagggggcctcgtcgggtggcgaacgggagttcgtcccggtgcttgcgcgcgcggccgttgccgtcggcgttgccggtgtcttcatcgagacccatcccgaccccgaccgggcgccctctgacgggcccaacatggtgccgctgcgcgagttcgaggggctgatcgccaggctgatggcgttcgacgcgctggcgaagaacccgcgctaatgcagcaaggcgagacgcggtcgcacgatcagggcttgccggcagcgctctacgtcatatcaggcgcgagcttcgccgcggcactctcggctcgcgcgctcgatccggtgctgccgcacgtcgccgaggattttggcgtcagcatcgccaccgctgcgggcttcgccgcggtgttcgctttcaccttctcgatcatccagccgatcatcggcgccgccgccgacctgttcggcaagacgcggctgatgatcggctgcctcgcgctgcttggcctcgccaacatcctgggtgcgttctcgacctcgttttcggtcctgtttgcgacccgcatcctcgccggcatcggttcaggcggggtttttccggtggcgctgagtctcaccagcgatctcgtcggtcccgacaagcgccaggtcgcgatcagccgcacgctggcgggcgcgatgaccggcaatctgctcggcgcctcggcttccggcctgatcggggattttctcggctggcgcggcgtgctggcggtgctcggtgcgatcgtgatcgtggcgtcgatcgcggttgccgccggctttcacggcgccaaggtcaagcatccgccgaagacgagcctgtcggcattgagggccggctatcgtaccatcttcaccaacccgaacgcctatgtctgctactcggcggtgttcatcgaaggctgctgcgtgctgggcctgtttccctacattgcctcgttcctgttcgatctcggccagacctcgctgtcgatcgccggtatcgtcatcgcgggctttgcggtcggcggcctgttctacacgctgacggtgtcgcgcctgctgccgcggctcggcgtgaagggcatgatgatcgcaggcatgacgctggttgcttcgcagctcatcgccgtcgccttcggcccgcgctgggaggtgcaggcgttgaacctcatcgtgatgggatggggcttctacatcgcacacggctgtctgcaggtgttcgccagcgagctttcggtcgaggcgcgcgccaccgcgctgtcgctgcattcgttcttcttcttcatggggcagactgtggggccgctcgcctatggatttggactccagcatgccggcaagatgccgaccctgttcacgagcgcgttgatcatggcggtactgggcttgttctgcgcgcggcttctcaagcagcgtgccccggcggatgcgcgctagataagccgtgggtgcgaaatcacgggcgcgggaaaaaagactctagccccgcccgcgatagggcgcgacgccctgctccggcacccacaggcctttcggtatgcggccggtctgccagaacacgtcgatcgggatgccgccgcgcggataccaatagcccccgatgcgcagccatttcggcttgatctcgctggcgatgcgcttgccgatcatgacggtgcagtcctcgtggaaggcgccgtggttgcggaagctcgcgatgtagagcttgagcgatttcgactccagcagccaggcccccggcgcgtagtcgatcatcagatgcgcgaagtccggctggcccgtgaccgggcagagcgaggtgaattccgggacggtgaagcgcaccagataatcggtgccgctttgcggattgggcacgcggtcgagctgggccttgtccggcgcatccggccatgccacggcgtggccgagctgcagggcagccgggtccaggcgcggggtcttcgatttgctgggctttttcgacatgagggccgcctccgagcggccctcttagccaatcatccggcggccgtcacccggccttttccgcttcgatgcattgcggtagaagcaccgccaaccgcccccctttgtgttcccgaaaagaggccctcatgaccgccatcatcgacatcatcggacgcgaaattctcgacagccggggcaatcccaccgtcgaggtcgatgtcgcgctggaggacggcgcgctcggtcgcgctgcggtgccgtcgggagcctccaccggcgcccatgaggccgtggaactgcgcgacggcgacaaggcgcgctatctcggcaagggtgtgaccaaggcggtcggcgccgtcaacggcgagatcttcgaggcgctgagcggtctcgacgtcgagcagcaggcccagatcgatcagatcatgatcgacctcgacggcacgccaaacaagagccggctgggcgccaacgccatcctcggcgtctcgctcgcctgcgccaaggcggccgcgaactcgctcgacatgcccctctatcgctatgtcggcggcacctcggcgcggctcctgccggtgccgatgatgaacatcatcaatggcggcgtgcatgccgacaacccgatcgacttccaggagttcatgatcctgccggtcggagcatcctcgtttgccgagggtctgcgctatggtgctgaagtcttccacaccctgaagtcggagctcaagaaggccggccacaacaccaatgtcggcgacgagggcggctttgccccgaacctgccgtcggcggacgccgcgctcgacttcgtcatgaacgcgatcggcaaggccggcttcaaggcggggaccgacatcatgctcggcctcgactgcgcctcgaccgagttcttcaaggacggaaagtatgtctatgaaggcgagggcaagagccgctcgatctccgaccaggccaagtatcttgcagacctggtcgcgcgctatcctatcgtgaccatcgaggacggcatgtcggaagacgacatggagggctggaaggagctcaccgacctcatcggcaagaagtgccagctggtcggcgacgatctgttcgtcaccaacgtcaagcgccttgccgagggcatcaaggccggccgcgccaactcgatcctgatcaaggtcaaccagatcggcacgctgaccgagacgctcgctgccgtcgagatggcccacaaggccggctacacctcggtgatgtcgcaccgctccggcgagaccgaggattccaccattgccgacctcgcggtcgccaccaattgcggccagatcaagaccggctcccttgcacgttccgaccgcaccgccaaatacaaccagctcctgcgcatcgagcagcagctcggcaagcaggcactctatggcggcaaggcggcactgaaggcgctggcataagccagcgcttcacggaaacaaccacaggggaggatcgacatgagcgacggcaccacgggactggaattgcgttcgctgctgaagaagagcggcgagctggaattgttcctcgtgaatgtcccgaccccggagccggccgacgatgaagttgtggttcgcgtcgaggcgacgccaatcaacccctccgatctcggcctcctgatcggcccggccgacatgtccgccgccaaggcgtccggcaccaaggagatgccggtcatcaccgccaggatgccggagggagcgatgcggatgatggcggcgaggttcgatcagtcgctaccggtcggcaacgagggcgcgggcacggtgatccggaccggctcgtcggacgcggccaaagcgctgatgggcaagacggtgtcgatgatcggcggcgcgatgtacacgcagtaccgcgtgctcaaggtccgcgacgtcatggagctgccggcgggcaccacggccgccgacggtgcctcctggttcgtcaatccgctgaccgcgctgggcatgaccgagacgatgcggcgggagaaccacaaggcgctcgtgcacacggccgccgcctccaatctcggccagatgctcaacaagatctgcatcagggacggcattggtctcgtcaacatcgtcaggagcaaggagcaggccgacatcctgcacaagatcggtgccaaatacgtcgtggattccagcgcaccgagcttcatggacgatctcaccaacgcgctggtcgagaccggcgcgacgatcgccttcgacgccatcggcggcggcaagctggcgggccagatcctcacggccatggagatcgctgccaacaagacggcgaaggaatacagccgctacggctccaacgtgtacaagcaggtctacatctatggcagcctcgacccgcgcccgaccgagctgaaccgttccttcggcctgagctggggcgtcggcggctggctgctcaccccgttcctccagaagatcggtcctgccgagatcggccgcctgcgccagcgcgtggcgtccgagctcaagacgaccttcgccagccactacaccaaggtggtctcgctccccgaggcgctcgatctcgccaacatcgcggtgtacgccaaacgcgccaccggcgaaaaattcctcatcaacccaaataaataatcgtggcgtgcgacggcacgtcaccaagggaaggtcttgccttctgagcgaagcgggcgattattccgccgccatttgaagcggaacagccgctggacgctcagaagggacattttcatgatcgatctcaatcgacgtcacctgctcgcaggcgctgccgccatgggcgcagctgccgctaccgggctccggcccatcgccgcgaatgccgcagcgccgcaggtggggacgcaggcgcccggcttctatcgctacaaggtcggcagcttcgagtgcacttcgatcaacgatggcgcgcgaaccttcccgatgccggacaagttcgtcgccaacatttcgaaggaagaggcgctggcggcgggtgaggcggcctacatgccaaagggcatggtcacggtgccgttcaatccgcagctcatcaacaccggctccaagcttgtgctgatcgataccggcaacggcatcgcgaatttcgaagcgagcaaaggcgcggtcggtcgcacgctgcaaaaccttcaggctgccggcgtcgaccccaagaacgtcgacgttgtgctgctgtcgcacatgcacggcgaccacatcaacgggattcgcctggccgatggcgcgctggcctttccgaatgcggagatcatggtgcctggcaaggagtgggagttctggaccagcgaggacaacgccgccaaggccgagtccaaccccgcgttgaagaacaactttgccaacgtgaagaagaccttcgccggtctcgagtccaaggtcacgaggtacgactggggcaaggaggtcgcgccgggcatcacctcgatcgccacgccgggccatacgcccggccacacctcgttcgcggttgcttctggcgatgccaaggtactgatccagtccgacgtcaccaacattccggagttcttcctgcgcaatccggactggcacgtgatgttcgacatggatgccgcgatggcgcaggcgatgcgccacaagttctacgatatggcggccgcggagaaggcgaccgtgatcggcttccacttcactttcccttcgatcggtcacgtcgcgaaagacggcgccaagtatcgcttgatcccgtcagcgtggaatccgacgatctgagccggagctgcagggttgccgtgacatcaggccgccacttggcggcctgattgttttgagaggatcaatgtcggcctcccatgacaggcgactttcgcgaaacgtagcgtttccaaatcggaccggttcatgcacttgcatccatcggtccggttcgcttaagtccccacccggcactttcgctcaagccttcaaggacacccaatggcctacaacatcgtcaccatcgccggcagcctgcgcaaggagagcttctcgctcaagatcgccaatgcgctcgccaagctcgcgcctggctcgctcaggctcgaggtgatcacgccggcgggcatctcgttcttcaaccaggatctcgagggcacgccgcccgcggactgggtcgccttccgcgaaaagctccaggcgtcgaacggcatcctgttcgtcacgcccgaatacaaccgctcgatcccgggcgtcctcaagaatgccatcgatgtcgcatcgcggccgtatggtaagagctcgctcctcggcaaaccggtcggcatcatctccaactcgcctgggctgctcggcggcgtcagcgcggccaagcatctgcagaacgtgctgccgggcatttccggtcccgtcctccagcagccggaaatctacctcagcggagtcggcgacgctttcgacgcagacggcaacctgaccaaggactcgctcaaggcggtgctgcagcagtacatcgacgcgttcgctgcgcacgtggcgaagcaccaaggctgaggccagataaccccgcggccacaccccaggtcctcgtcctgaggagaccgcgaagcggtcgtctcgaaggatggccgcggggacagtcgggcctgcatggttcgagacggcgcttcgcgcctcctcaccatgagggtctggtggggcggggagccgcttgcaattagcgctctcttaaccaacctgtcccatcttcccgggatggtctcgcgcgcccgcctgaaatcgatcctgaccggacttgccctctatgcgatggcggcggccatcgtcggctatttcggcgtcaatgcctataccggcaaatacggcctcaacgcccgccaggagctcgatcaggagatcatcgcgctgaccagcgaattggcccagctcaagcgtgagcgcgccaggagtgaacatcgggtatcgctgctgcggtccgagaagatcgaccccgacatgctggatgagcgggcgcgctaccagctcgattatgtcaatccgcgcgatctcgttcggatcatcccggcgaattagccattcgcagctcttcgaaagctgctgccgaaatccgatgtacctgtctgagttccggcgaaagtcgtaagccgggaaccgggtgactgtcttgacggcagcgccgcaacggccccatggctttgtcgcggtgctccaagttgacgcagatcaaacaggccgcgccggcacgctctaggctttcatccggaggaacagtgatgaatgggtcaacgccccggcatcacgcggcccgtatcgaggccgccatcgcgtcaggccaggcggctcgttccgcgctcgtggcgtcctggcgccgttcctccagattgcatcgtctcgatcccggcggccgcaccgcaccgatgcggctgaccgaagccgaactgcgcgaggcgcgcgagcgcatcgcgcctcttctggccgcggcgcaaggcgcaatggaccggctttatcaggccgtcggcgccgcggggtgctgcgtgttgctcgccgaccgggagggcgtgccggtcgatcgccgcggcatggtggcggacgacgcgacctttcagtcctggggcctctggaccggtgcgctctggagcgaggagcacgagggcaccaacggcatcggtacctgcctcgtcgagcagcgtccgctgaccatcgatcgcgatcagcatttctttgcccgcaacacacttttgagctgcaccgctgttccgatctacgaccacgatgcggcgcttgcgggcgtgctcgacgtatcctcctgccgcgcagatcgcaccgacgcctttgccggcctgatagcgcttgcgacgggcgaggcggccaagcgtatcgaggccgacctgtttcgaaaggccttcgcccatgcccgcatcgtgctgacgcaagctgccgacgggagttgcagcggtctcatcgccgtcgatgcggacgatctcgtgatcggcgcgacccgctctgcccgggtggcgctcggattggcgctcggccgggcattgcagccggtgccggccgccgaccttctcggcgacgattccgcgagcgatcatctcgccggcggtcagcgcgcggtgttgcagcgggcattgctccgcgccggcggcaatgtctcggcagccgccaaggccctcggcatcagccgagccacgctgcaccggaagctcaagcggttcgggttgaacgcgcattgagccgcgcaatttgcgcactcgcaacgacgacggtgtggaagctgcgtgcacgcaatcccgcactgcctcgcccgcgactgtcgcagaactgcgacaggtcggccgcgccatcgctttcccacgggctgacaggaaacacctcccgcgacatcgtccgcgcaagtcgcgccaacgcgacgaattgcgcaaacagcaaacatcgggagtgatcaatgaacaaggtggaattcctcagcgtcaccaaggttccctttgccgaacggtacgacaatttcatcggcggcaagttcgtggcgccgacctccggcaaatatttcgacaatgcttcgcctgtgaccggtcagatcgtctgcaagatcgctcggtccgacgcgcaggatgtggaggcggcgctcgatgcggcgcatgccgccaaggtggggtggggccgtaccagcgtcgccgagcgcgccgcgatcctgaatcggatcgccgaccgcatggaagacaatctcgagcgccttgcgattgccgagacctgggacaacggcaagccgatccgcgagacccgcgccgccgacctcccgctcgcgatcgatcacttccgttacttcgccggcgtcgtccgcgcccaggaaggctcgatcagcgagatcgaccacgacaccatcgcctatcatttccacgagccgctcggcgttgtcggccagatcatcccctggaacttcccgctgctgatggcctgctggaagctcgccccggcgctcgctgccggcaattgtgtcgtgctcaaacctgccgagcagaccccggcctcgatcatggtctgggccgagatcatcgccgacatcctgccgccgggcgtcctcaacatcgtcaacggctttggcctggaagcgggcaagccgctggcgtcgagcccgcgcatcgccaagatcgccttcaccggcgagaccacgaccggccggctgatcatgcagtacgccagccagaacctcattccggtcacgctggagctcggcggcaagtcgccgaacatcttcttcaaggacgtcatcgccgaagacgacgacttcttcgacaaggcgatcgaaggatttgtgatgttcgcgctgaaccagggcgaggtctgcacctgtccgagccgcgcgcttgtccacgcggacatctatgaccgcttcatggagcgggcgttgaagcgggtcgccgcgatcaagcagggcgatccccgcgatcccacgaccatgatcggcgcccaggcctctggcgagcagctgtccaagatcctctcctacatcgacatcggcaggcaggaaggcgccaaggtgctcgccggtggtcaacgtgccgaactgacgggtgatctcgccggcggcttctatatccagccgaccgtgttcgaggggcacaacaagatgcggattttccaggaggagatttttggcccggtcgtctcggtcacgaccttcaagtctgacgaggaagcgctcgcgatcgccaacgatacgctctacggcttaggtgccggtgtctggagccgcgatgccaatcgctgctaccgtttcggccgggagatccaggccggccgtgtctggaccaactgctatcatgcctatcccgcgcatgcggcgttcggcggatacaagcagtcgggcgtcggccgcgagacccacaagatgatgctcgatcactatcaacagaccaagaacctcctggtcagctacagcccgaagaagctcggcttcttctgaacgaatagttcgagagggcggcgccgttccggcgccgttctctgaaacgcggccatgtggccaatcgttgttgatccgctcacgattcgcgcgcgatcgcttgcatagatttgttgcccgatccgcgccaaagattttgcaatatttcgatcaggttgcagtgcggcataatgaaaggcgtggcatgccgccgcggtgcttccgcacgcggttgacttgggttagagagggcgaaagttttctctgacccggaattcctatggccgcacccaagaaagccgccgcaagcactccacaggacaagactgacggcggttcgcctccggaattcaccagggagcaggagctcaaggcgttccgcgacatgctcctgatccggcggttcgaggaaaaggccgggcagctctacggcatgggcgcgatcggcggcttctgccatctctatatcggccaggaggccgtggtggtcggcatgcagatggccctgaaacagggcgatcaggtcatcaccggctatcgcgatcacggtcacatgcttgccaccggcatggacgccaacggcgtcatggccgagctcacgggccgccgcggcggctattccaagggcaagggcggctccatgcacatgttcagcaaggagaagcatttctacggcggccacggcatcgtcggcgcccaggtctcgctcggcaccgggcttgccttcgccaatcactatcgcggcaacgacaatatcagcgtcacctatttcggcgacggcgcggccaaccagggccaggtctatgagagcttcaacatggcggagctctggaagctgccggtgatctacgtcatcgagaacaaccgctacgccatgggcacctccgtctcgcgcgcctcggcgcagcaggatttttccaagcgcggcgtgtccttcaacatccccggcaagcaaatcgacggcatggacgtgcgcgccgtcaaggcggcgggcgaggaggctgcggcctggtgccgcgcgggcaagggcccgttcatcctggagatgcaaacctaccgctatcgcggtcactcgatgtccgaccccgcaaaatatcgcacgcgcgaggaggtcgagaaggtccgccacgatcaggacccgatcgagcaggtgcgcaatcgcctcctcgcagcgaaggtcagcgagcaggatctcaaggcgatcgacgccgaggtgcgtgacgtcgtcaacgccgccgccgatttcgcccagcatgatcccgagccggatgcagccgagctctggaccgacgtttaccgctgaacgcgcgcaagctttcctttggagtcgatatgccaattcaagtgctgatgcccgcgctgtcgcccacgatggagaagggcaacctcgccaagtggctgaagaaagagggcgagacgatcaagtcgggcgatgtgatcgccgagatcgaaacggacaaggcgacgatggaagtcgaggcgaccgatgagggcacgctcggcaagatcctgatccctgagggcaccgccgacgtcgccgtcaacacgccgatcgccaccatcctggccgacggcgaaagcgcggctgatcttgccaaggcgcctgcgcccgccaagcaggagaaggccgccgagtccgcgccgccggctgctgccaagccggagatgccgcagtcgaaggcgccgaccggcgtgccgcagcaggccgtcgccgagcccgatccggaggtgcctgccggcaccgagatggtgacgcagaccatccgcgaagccttgcgtgacgccatggccgaggagatgcgccgggacgccgacgtcttcgtgatgggcgaagaggtggccgaatatcagggcgcctacaaggtgacgcagggcttgctccaggagttcggcgccaagcgcgtgatcgacactccgattaccgagcacggctttgcaggcgtcggcgtcggtgccgcgatggccggcctgaagccgatcgtcgagttcatgaccttcaacttcgccatgcaggcgatcgaccagatcatcaactcggcggccaagacgctctatatgtccggcggccagatgggctgctcgatcgtgttccgcggtcccaacggtgcggctgcgcgcgtcgccgcccagcacagccaggattactcggcctggtactcgcacgttccgggcctcaaggtcgtcgcgccgtattcggccgccgacgccaagggtctgctcaaggccgcgatccgcgatcccaatccggtgatcttcctcgagaacgaggtgctctacggtcacaccggcgaagtgcccaagctggatgatttcatcatcccgatcggcaaggcgcgcatcgtgcggtcgggcagccacgtcaccattatttcctggtcgaatggcatgacctatgcgctcaaggccgccgatgagctcgccaaggacggcatcgaggccgaggtgatcgatttgcgcacgctgcggccgatggacaccgagaccatcatcaactccgtcaagaagaccggtcgcgcggtcacggtggaagaaggctgggcccagagtggcgtcggcgccgagatcgccgcgcgcatcatggagaacgccttcgattacctggacgcgccggtgacccgcgtctccggcaaggacgtgcccatgccctatgccgcaaacctggagaagcttgctctgccctcggcggcggaagtcgtcgaggccgccaaagccgtctgttacaggtagaccatggcgggcccgaaggagcagccactgccgcccgatgtcatgacccgcgacgacgcggtcgagatcctgcgcgtgttcgtgctggacggcgggctgtcgatggcgttccagcgcgccttcgaggagcccgacatgtggggcctcctgctggtcgatctcgcccgtcacgccgcgcgcgcctatgcgcgcgagagcgaatataccgaggaggacgcgctgaaccggatcctcgagatgttccaggccgagatcgagcgtcccaccgacacgggcacgacgacgccgcgcggcaaggggcactgacgaatggctatcgaatcctatcactacgatttcatgctggaagcgatccgcgaggcggaagcttcgatcgcgcagggcggtctgccgatcggtgccgtgctgacgcgcgacaacaagatcatcgcgcgcggccacaacaatcgcgtgcaggagaacaatcccattctgcacggcgagatgagctgcctgcgcgaagcgggcgcgatctcgttccacgacaccgtcatgtacaccacgctgtcgccatgctcgatgtgcgccggcgcgctcgcgctgttcaaggtcaggctggtcgtgatcggggaatccgtcaccttcgagggatccaaggacatcctcgacaagttcgggatcccctggatcgacctcgccgatgaccgctccatcaccatgatgaagaattggcgttccatcgctgccaatgagcgcctgtggcagggcgacatcggcaactaaacctggtctggtcgtcttcgctgtcggaggcgacgttttgagaagttcttcgtgaggtcagcatgcccatcaacatcctgatgcccgctctgtcgccgacgatggagaagggcaacctcgccaagtggctgaagaaggaaggcgacaaggtcaaatccggcgacgtcatcgccgagatcgagaccgataaggcgaccatggaggtcgaggccatcgacgagggcaccattgcgaagatcctggtgcccgagggaacgcaggatgttccggtcaacgatgtgattgccgtgctcgcgggcgaaggcgaggacgtgaaggctgcgggtagcgccaagcccagcgcgtcggccgcgcccccgaaagctgctgaaaagacggcagacaagcccgctgtgcctcctgctgctgcgcctgctcctgcgccggcggcgcccagggcggctccgagcgccgcgacagctgcgccgcaggctgcggctccggccgcacaggccaatggccacggcggtcgcgtgttctcgtcgcccctggcgcgacgccttgcgaaggaagcaggcatcgatgttgcgatgatcgccggttctggtccacacggccgcgtcgtcgcccgcgacgtcgagcaggccaagtccggcaagggcctgaaagcaccggctgcagcgccgtcaggcgcgccctcgatcgcgccgaccatgtcggacaagcagatcctgtcgctgttcgagcccggctcctacgacatcatcccgcatgacggcatgcgccgcacgattgcgcagcgcctgaccgcatcgatccagaacgtcccgcacttctatctcaccatcgactgcgacatcggcaagctgctcgccgcgcgcgaggagatcaacgccgccgcgccgaaggacaaggagaagaagccgctctacaagatctccgtcaacgacttcgtcatcaaggcgatggcggtcgcgctgcagaagatcccgaactgcaacgtcagctggaccgaaagcggcatggtcaagcaccaccattccgacgtcggtgttgccgtggcgatgccgggcggcctgatcactccgatcatccgcaaggcggagaccaagacgctctcgaccatctccaacgagatgaaggatttcgccgcgcgcgcacgttcccgcaagttgaagcccgaggaataccagggtggcacaacggccgtctccaatctcggcatgtacggcatcaatcacttcacggccgtgatcaatccgccgcatgcgacgatccttgccgtcggcaccagcgaggagcgccccgtggtgcgcggcggcaagatcgagatcgcgcacatgatgagcgtgaccttgtcctgcgatcaccgcgccatcgacggcgccctcggcgccgagctgatcggcgcattcaagcagctgatcgaaaatcccgtcatgatgatggtctgacgcggcggcagagggggtgatcttgcatgcccggacgcgctggccatggatatcgctgctgctcggcgctggcgtcgcgctcaacccggtcgggctcgattttcttcagtccgccttcctgtcgggagagcagctgtcgcggaacatcgctcaacccatcgtgttgagcgcgctggccattcttgtccttattgggaccatcgaatggctggtcaggtttgttgtcgtcaagcgccgcgcccgcggcgcctcttgagttgaacgggagccgccatggccgatacatccttcgacgtcatcatcatcggctcaggtcccggcggctacgttgctgcgatccgtgccgcgcagctcggcctcaagaccgcaatcgtcgaaaaatcctatctgggcggcatctgcctgaactggggctgcatcccgaccaaggcgctgctgcgttcggcggagatctaccactacatgcagcatgccggggattacggcctctcggcggaaaaggtctcgttcgatccgaaggcggtggtgcagcgctcgcgcggcgtctccaagcgcctcaatgagggcgtcggcttcctgatgaagaagaacaaggtgagcgtaatctggggcgccgccatgatcgacgcgccgggcaagatcaccgtgaagaagtccgacgtcgaggggccgaagggcgcgttgggcgagggtgcctatcaggccaagcacatcatcgtcgcgacaggtgcgcggccgcgcgtgctgcccgggcttgagcccgacaagaagctgatctggacctatttcgaggcgatggtgccggagcgcatgccgaagtcgctgctggtggtcggctccggcgcgatcggcatcgagttcgcctcgttcttccataccatgggctctgacgtcactgtggtcgaggtgctgccgcagatcctgcccgttgaggatgccgagatcgcaggtcttgcgcgcaagcggctcgagaagcagggcatcaagatcatgacctcgaccaaagtgaccaagctggagaagaaggccgatagcgtcgtcgccaccatcgatgacggcaagggcaagcccgttacctccgagttcgagcgagtgatctcggcggtcggcgtcgccgggaacatcgagaacctcggtctcgaaaagctcggcgtgaagaccgaccgcggcatcatcgtgatcgacggccacggcaggaccaacgtccccggcatctatgccattggcgacgtcgcgggccccccgatgctcgcgcacaaggccgaacatgaaggcgtgatctgtgtcgaggccatcaagggcctcaacccgcatcccatggacaagaacatgatcccgggctgcacctactgccatccacaggtcgcatcggtgggcctcaccgaagccaaggccaaggagagcggccgcgagacccgcgtcggccgctttcccttcgtcggcaacggcaaggccatcgcgctcggcgaggaccagggcctggtcaaggtcatcttcgacaagaagaccggccagctgctcggcgcccacatggtcggcgccgaggtcaccgagctgatccagggttacgtcgtcgccatgaatctggagacgacggaagaagagctgatgcacacggtgttcccgcatccgacgctctcggagatgatgaaggaagccgtgctggatgcgtatggaagggtgttgaatgtttgacggcgagcacgccgcccgccgtcgtcattgcgagcgaagcgaagcaattgcttcgtcgcaagagctccttgcaatgacgagaggaaatagctgcttcaataagcaagaagaaagagcccacggatgaaagacaacgacaacctgaccatcgaacgcccgaccttcgtcacccatctcgaatgcgcgatggaaggcgatcactacgccgccgaccaggtccacaacctctccaaggccggcaagccgctgctcgtgcgctacgacctcgccggcgtgaagcaggcgctgaccaaggatgcgctcagccagcgtcccggcgacatgtggcgctaccgtgagctgctgccggtgcgcaaatgcagggacatcgtctcgctcggcgaggtgaccacaccgctgatccggctgccgaagctcggcgcaaagctgggcggcggcgagatcatcgtcaaggacgaggggcggctgccgaccggctcattcaaggcacgcggcctcgtcatggcggtgtcgatgggcaaggcgctcggcatcaagcacatggcgatgccgaccaacggtaatgccggcgcggcgctggcggcctatgcgacgaactgcggcatcaagacaacgatcttctgtccggccgacacgccggaagtgaacgtcagcgagatcgagctgcagggcgcgaccgtctaccgcgtcaacggctatatcgacgattgcggcaagatcgttggcgagggcaaggcaaaggtcggctggttcgacacctcgacgctgaaggagccgtaccgcatcgaagggaagaagacgatgggtctcgagctcgccgagcagctcggctgggacgtgcctgacgtgatcttctatccgaccggcggcggtaccggcctgatcggcatgtggaaggcgttcgacgagctcgagaagatcggcttcatcggaagcaagcgcccgcgcatggttgcggtgcaggcctccggctgcgcgccgatggtgcgcgcttacgaggctggcacggagcacgccacacgatgggaagacgcccagaccattgcgtcgggtatccgcgtgccgcaggcaatcggcgatttcctgatcttgcgtgctgtgcgcgaaagcaagggcttcgcgatcgccgtcgacgatgacaagatctcctctgcgctgaacgaggttgcgcgtgaggaggggctgttgttgtgccctgagggcgccgcgacctacgccgcctacaagcagagcctcgccgacggccgcgtctcgaagggtgaccgcgtgatgctgttcaactgcgcgactggcctgaagtacccgctgccgccggtcacccgcgcgctcgaccgccacaagccgatcgattacgcgcagttctagcggcgcgataggctacgaatgatccctcttcccgtacgcgggcagagggccaaaaacaaagatttcgctggggagagaacaatgacgaaggccgtctgggctgcgctgattgctattctcgttgtgaccggcgccgcgcgcgccgatgactatcccacccgtcccatcaccatcatcgtgcctttcgcggccggcgggccgtccgatgccatggcgcgggtgcttgccgagcgcatgagagtgccgctcggccagcccgtggtgatcgagaacgtcaccggtgcaggcggctcgatcggcgtcggccgcgccgtgcagtcgccgccggacggctacaccatttccttcggccatctcggcacccacgtcgccaacggtgccgtctacaagctcaagttcgatctcgtcgccgacctcgagcccgtggtgctgctgccgagcaatccgatgatcctggtcaccaagaattcggtgcccgcgacctcgctgaaggagctgttggcgtggttgaaatcgcggccgtcgcccccgaccgcaggcaccgccggcgccggctccggcagccacatcgccggcgtctatctcgagaacgtttccggcatcaagctgcaatacgtgccgtatcgcggcaccgcgccggcgctgaacgatctcatcgccggacagatcgacctgatggtcgaccagacctccaactccatcggtcaggtccgcgccggcaccattcgtgcctacgccatcaccgacgacaagcgcctggcatcggcgccggagatcccgacggcggacgaggccggcttgaagggcttcaacatgacgctgtggtcggggatgtgggttccgaagggcacgccgaaggaaatcgtggccaagctcaacgccgcggccgtcgaggcgctgaacgatcccgccgtgaggaagcagctcgaaagccagggcctggagatgacaccgaaggatcaactcacgcccgaagcgctaggcatgcgtcagaaggccgagatcgccaaatggtggccgatgatcaaggccgcgaacatcaaggtggactgatcgcaggtgcgtagggtggatcagccaagcgtagttctccaccttctttgccgccggggaagaggtggatcacgccttcggtcaatccaccctatgaacccaacctagtccgcgtccgtagatgccaccggagttgccgcggccgcgtccttggtcaccacccgctggtcgctcttgccggcgaccatgctgctgccctcgaaccttgcgcggtagaccagcacgttctcgatcacgcgctggacgtagttgcgcgtttccgacagcgggatgcgctcgacccagtcgaccggatcgacgttggggtcccggggatcgccgcgcttctgcacccattcgcgcacgcggccgcggccggcattgtaaccggcgaaggtcatgatctggttgccgcgatattccgagagcagcgcgctgagctcggcggcgcccatctgcgtgttgtagacgggatcggagaccatcttgtcccagtcgtatttaaggccgaagcgttttgcggtgtcgcgcgcggcttccggtgtcacctgcatcagcccgaccgcattggcgtgcgacttgtctcgctgctcgaaagagctttcggtccgcgccaccgaatagatcacgctcgtctcgatcgcgggcgcgacctgcttgtgctcgggaatgccgatggtcgggaacgcataatgatcgagcgcgagcccgcgcgccagcgccgtctttccgacctcgagcatcacgcgcgcatggttgtgccggccggcgagctcgccgagtgcttcgagcgccgcgacgtcggtgctctccttggcgaaatcccgagcgtagtagaacaccatgtcgcgctcgccgagggcgtagagcatgtcggcggcgcgcacgcgctcgtccgcgacgtgtgtatcggcggcggccagcaggggtgcgggcggtcgcaattcgatgccttcgaggccgagcttggcgcgggcgagctggccgnnnnnnnnnngcggtgtgatagcgcgccgccgcccgatagctcatgcgcgcatctgccatcgcccccatggcttctgccgcgcggccgcgccagtaatgtgcccgcgacagcgcgatcggattggtcgacccggcgtcgatcgatgcaaaatgcgccatcgccgtcttgggatcgtggagatagcgtagtgcgatccagccgcacatgaagtgatagtcgacgcgatagacttccttttcgggcaccgcggccgtgtgcaccacctcgtaggcggtcctggccttgccctggtcgagcagcttgcgcgccagcatgcggcgctcgcgccaccaggcatcggtgtcctgcgcggccatcatgtcgggcttggcagcgaggatcacctcggccgcgtcgtcgatgcggtcgttctgaagatgccattgcgctcggcacagcacgtagccgagatcgtgccgctcgccggccggaacctcctcgagataatccttggccttgctcgctttgccggtgacggcggcgcaggccttcacgatcgcgagcgcgtcctcgccgagccgtttggccgcgcgcctcgcgcctgcgtaatccttggcgccgaggcgcttgtccatgcgcgcgcggtgatcgtcggcggacagaaggtcgcggaacgtcgcgtaggaatcctcctcgctgcgctcggacaattcctcagtgcgccaggcctcgcgtacgagccgcgccgccctgtcggtctcgcccccggcgagcagtacgcgagcgagcgcaaacttgcccttggcgctgattggccggtccaacgtgaatttgtgcacggtggcggcgtcgctcttctcctgccacagccgcgcctcggcgcgccggcgcagaagcgtgcggctcggccagtctggattggcggcgaggaaggctgcgtagcgcttgaaactcgccgtgctgtcggaatgacgcagcatgaaccagtcggcgagcttctgtccggcagggtccgcgatacggtcccgcgccgcgctggcgtcatcggtcctgcccttgcgcgcgagatcgatggcgtccttcagtgcagcgaggtcgccggtcagcggcggcagtaccggcttgcccgggggctcgtcggccgtcttctttggcttccgtttcgcctcggagtgcttgccgcgccttgccttgccggcagaggcatggccgtgcttgccggctttggcctcatgcgtcttcttcggcgcggacggtttgtggctgctcttggccgagagctcggcgggaacgaaggccatcgcggccacggcaacgacgcacctgagcgagcgtaggcactggttcattggatggtccccctgcgaaaccactacaaaccaaggtccgcgatggcatgcggcttgagaatcaaagcaccggacggcgcgacatcatcgtgtcgcattcctcacgctgtcgcaacaatgcggcaaaatgcggttgtgataagcggaacttgcgcaagggcgaaaaggtcgcgctttaacctttgttaacgatgaggactccctcgacggcagacccgacctggggcgactgcagggcgcagattacgcgtgttccagtggccagtcaggtgtatggagttccatcgttccttccttcagcctttgcctgcgcacctatgccgattttcaaccagtcgatccggcgcaagatcgtcggtatcgccctcggattgatcgtcctgatgctgttcacgtcgatcctgtcgatggcgatgtcgagccaggtcggcgtcctcctggacgagctcaccaatcgatacatcccggcctatagccatctggcgcgcgccaacagccgctcgctggagcgggggctggcgctacggcggatggtcatgacccggatggaggcgccctcggatgaggaggcctacgcggcgcgccttcgcgacttcgaggcgtcggaccgcaagatcgaggaggaggcggaggccgcgcgcaaactgatcaacgcgatcatcgatgatcccaggacgtattccgacaacgccgcactggggcggatcgatagccgcatcgagaccgccgtcagcgagctgcgccgcgacctgagcgaggaccataccaagctcatcaagcaggtcgaggcgaagcagatgtccgaggcccgcggcacgctggagcacatcgacgtgctgcgcgatcagttcaaccggaagatcgacacgatccgcgccgacatgctgacgcaggtcttcttctcgacgtcacaagtgatcggccgccagcaccaggccatcatcgtttcgggtgtcgtgacattgctcgcggcgatcgtcggatttgccttcgcgctgttggtgtcaagcggcatcactcgcccggtgcggctgctgctggccggcacccgcgaggtcgaggcaggccggttcgacaagcccatcaccgtctccacgcaggacgagatcggcgagctcgccgcggccttcaaccgcatgatcgagcagctcaggcacaacgagcgcatccgcgagacgttcggccgctacatcgaccccaaggtggtgcagggcctgatcgaccggccggaggtcgcgatcgacggcgagcgccgggtgatgaccatcatgttctgcgacatgagcggcttcacctcgatgagcgaaggcatgacgccgcgcggcctcgtcaaggtaatgaatcactatttcactgtgatgtccggcccgatcaggagcaatcgcggagtcatcgacaagtatatcggcgacgccatcatggcgtattgggggccgcccttcatcgaggaggatgaggcggcgctgcttgccgcgcttgctgcgatcgagatggccgaccaggtgcctgcgctccaaaagcaattgcccgatttgcttggcatccgcgccatgccggcactgtgcgacctgcgcatcggcattgccaccggtgaggttctcaccggcagcatcggctccgagctcatgatgagttttaccgtcatgggcgacgccgtgaacctcgcttcgcggctggaggtcgtcaacaaagtctacggcacccgcatcctgatcgcgcagggcacggcggatgccatcggcgcgcgccttgaactgcgcgagatcgaccgtctggcggtggcgggccagagcgcgccccaggcgatcttcgaagtgatgggcagggccggcgcactcaccgatgcgcaggcgggtctgcgcacgcactatgccgaaggcctcgctgcctatcgtgcccggcgcttcgacgacgcccgtgcggccttcaacgcggcgctcgaggcgatccccggtgacgggccctcgcgcacgatgctcggccgcatcgcccagttcgcagccaatccgcccgatgccggttgggacggcgcttggcggctggaccagaaatagtctgccgcgaaaaaattgatgctacccgataacgatgttcgctgtgacctatttcccgggattaggtttgttgcccctgaggcgtctgacggggatacgccgatgacacatcttacggacaggctggaacggttcgagacgctcaccgccgaatgcgagctgatcgccaagcttgcgaccgacagcagcaagcgcgagttttatctgaaactcggggagcagtatcgccagctggcgctcgacatccggcgggcgatcgccaccacggctgcggcctgaggccggcagcaatccgttcttaacatttggcgcgcatcctcaaggcaagcgagctgccgctgaccggtgatggctcgtggtggtaaggccggggttcgttgcattgcagcgtgtctcgtgagtgtcatttgtcatgcttgacagggcaaccccatgcgcctcgttgccgtgatcattatcgcgctcatgacggtggcctgcgatcaggagcaggacatcaccggctcgacgacgccagcctgtccgatgcgaaactacagctacaatccacgcgacttgagccagtgcgtcaatgcctgcagagcgtgcgaccgcgggaccacggtcacctgcacgacctcctgcaccctcaaaggggcgcgctgaaccgtttggagagccgcgagttcgcgattccggcctgaggtcacaggggctggtgcctaggcaccggaacgattcacctggatcaatcattgatagaggcgggcagacgcggagctcaatggaatgggtatgctcgatcccggccgatttctggtgtcgtgctcgcactgcgatgcttggccgatggcggccaacgtcaagcggtcgagttggtcggcgtctccaaacgaggtccgctttgtctgcacgcgctgccggcgcgaggaaacagcgatcgtatccgcctccggcgagttgatgcccatcaagcgcgtcgatgatccgccacgcgacgtcgctgtcgcctgggcccgggcccagcgtttacgggggcggacctgaatcgtcgatgccgagcaatcgtcgcgtagcagctgccgatcgattgactcccggcttctgcgccccgtagattggctgccgacggttctcctttcggagatcaaaagggaatgtggtgcgaggtcttcccaacgccgggatcttctcaacgccacggctgcccccgcaactgtaagcggtgaatctctcgtcctatgccactgggaatctcggtcctgggaaggcgatgcagaggtgacgacccgcgagccaggagacctgccgtcagccgtggtcacacgcgaagatgtcggtcggggagtacggacatcagcttcaccggagcaatcgatcgctccgccgtaaagcctcgttcgctgtgacgtgccactgacgtcttccgaggctagaattgtgtcctgtttcgtcactgccgccaggcgctgctgcgccggcatcgttgcggccttttcctttcattcgctcaatctctccatcgccaacgccgagcagcttgccgccgagcaactgccgccggtcgaggtgaccaactctgacgatcagaaccgtacgcgtgcgagggtaaccggcgaaggcgatagggggcggcgccgggcgacgccgaccggggcgccggcggggaccaactcggccggcccgggcagtgaggccgacaacgatggcggcatcgtcggcgcggccacgaccgtcgtcacggccgcggacgtcgcgcacgcgcccacgcagaatctggccgaaatcatcgcggcacaagtgccaggtgcccagatcacaacgttctatggtggcccgatcggtgccaagaccagcgtcgacctgcgcggcttcggctccttcgctacggcgaatacgctggtgctggtcaacggacggcggctgaatgatatcgacatggcgcaggtggatctcgccaccatcccactcaatgccatcgagcgcatcgagatcacgcgcggcaattccggagcggtgctctacggggacaatgcggtcggcggtgtcatcaacatcgtcaccaagaacggcgtcggcggcccaccggcgaccgcgcgcatcgaggccggtttcggctcgttcaacacccggcttggcaacgtctcgaccgcgctcacttctggtccctggtcgacctcgttctacggcaatgccgccaggtccgatggctaccgagacaacaatcgttacgtccaggagaacggcgtcggcaatttgaactacacgacgcctggcctgaccgcctttctgaccgtcaccggcgacaatcaggcgctgcggctgccgggtggccgcctcgtcgatccttcgatcggcctcgacgagctcgcgacgaaccgtcgaggcaccagcacgccattcaactacgccaaccagcagggctttggcgcgacggcgggattcacgaagaccctggtgaacggcgtcgatcttatcgttgacggcggcatgcgtgacaagaagcagcagagcgcgtttttctcgagcccgacgccggtcccagctttattcacgtcgacctatgtcgatgctgaactcgcgacatggtcgatcacgccgcgtctcagcgtgaagagcctgctgggcggaatgccgtcgcagctgttgaccggagtcgactattacgatgcgagctttcggcagaaccgcggggcaggtcagggtctcgctgcctggcacaattacgatctcagacagcgcacggttgccgggtatgtccagcacacattgggtgtaacgcctacaaccgacgtctcctatggcgcgcgggtgcagagcatccatctcacggcccgtgacaatttcgacccggcggctccgttcaatgccgatatcggcgcgcttccgctgcggagcgatgaaactcagtatgcgctgcacctcggtgccgagcatcgcgtcagcgacaccgtcgcgctgtttggccgcgctgcgcgcgccttccgcacccctgacgttgacgagcgggtatcgtcgggtccttcattcgatccgttcttcaacccgctgccgcaaacgttccagctcaagacccagacctcgcaggacatcgagggcgggctgcgcatcagagggggtggcttgcagatgcagagcagtctctacctgatggacctcaccaacgagatccatttcaatccggtcctgttctataacaccaatctcgatccgacccgccgttacggctcggagaccagtatctcctatcgcatcagcgacgccctgcttttgcgttccggcatggcctacacacgagctgtcttccgcgaaggcatctgggcgggcaacgacgtgccgctggtctcgcgttacaccgccagtgcaggcgttacctggaacatctggcagaactatctggtgctcgatgccaccgcacgcttctggagcgagcgccgcatggacaacgatcaggcgggaacgcagaagccaattccggccaatggcacgatcgacctcaaggtcagtggtcaatatgagcgctacttctggtcgttcagcgtcaacaatgtgttgaacgcgctctattacgactacgccatcgcaagcaccttcacggacggacgcttcaacgcctacccgctgcccggtcgcagttacctgctcaaggccggtgcgacgttttgatcccacggggctgtcatgtgcccgcaaatcaatctagaattggacaagaaggagatcactcatggttttcagtattttctcatccgacactgaccgtttccgcctccatccggtggcgccgcgtcttgcgcctatgttcggctttgcgctgttgacggtttcatgcgcgctcgcaagcttggcgttcgcctgcgcgacgcccttcgcagcgttcgccgtcttggcggccgcgatgctgccgctgcgtccggcgcttctcgtcgtgaccggcgcctggctcgtgaaccagaccatcggcttcggcgtgctgcattatccggtcgatggcaacggcatcgcctggggctttgtgatcggcgcggcggcgctgttgtccacggcggcagcgtcggccgtgctgcgcacactgccgcagggccgtgcggccctgatgctcgcgattgcgctgtttgcggcctatgcgacctacgagcttgcgctcttcgccgcgacgccgttcctgggtggagaggccgccttcacggcggacatcgtggcacgcctcgggctgaccagcgcggtctggcttgccggcctcgtcgcggtctgcgaggtcgtccgcctggtcgatccgttcagccgcaagagtgcgatgtcggcctgagcggtcgtttcctggcccgtagggagcgaaccgcagttcggggcggttcgcccggcatcttgagcttgcccggaatacgccggcgctccaccggggccgcggcgtgcctgtgtcgccctctgtcaa

SEQ ID NO: 239 - DNA, 49402 bp, Bradyrhizobium colbertium
  misc_feature (32694)..(32703): n is a, c, g, or t
  misc_feature (37938)..(37947): n is a, c, g, or t
accggcatgatgcgcaagatcgaagtcgtcagacagacggcttcggttcgataggaggcgaacatgacagggacctctcgccttgcgaggctcgcgatttgaattcttgcaagcgtttgcctgggtaccgctcgaggccagactgcgccgccctatgtcgaggaaacgcaatggtggaatctgcgcaggccagggccagggaacttccccgatcagcaggccttcagcgccctgcgcttcgacaagctcgaatgggtcggccctgagatgagcaggagcgcgcgctgggacatggagactttcgtcggaaccgactacgacaaactgttcttcaagtcggaaggcctctacgacggaaagaccaggaccaccgaggaaggccaactgcaagtgctctactcgcgactgatcagctattacttcgacgctcagttcggcgtccggcaggacttctcgaagaagtcgcatcgaacctatgcggtgatcggcatcgaagggctcgcacccggcttcatcgaaatcgacgccgccgcgtacgtcagtcagaaaggggaagtttcggcccaggtgacggcattccacgacctgctgatcacgaatcggctgatcctgcaaccgcgcatcgacgtcaagtttcagatgcagtcggtacccgacctggagctcggtgccggcctcaccgatttcgagctaggtgcgcgtttgcgctacgagttcacgcgcaactttgcgccctatgtcggtgtgaattgggatcgcaaggtcggccagacggcgaccatcgccaagaataacagggagtccgtatctgccgtatcctttgtcgcgggtgcgcggctgttttggtagcatcggtgagcgcatcttgttcgaccacccgatcggccccctatcgagatcagcagtcgcagctcgattcggcagagctttgcactcgatcgcggcgagggcttgtttcgaaaccttcaacgaagagctccggtggcggacgccgtgatggatgggcgtgccgcagcgctcgcaagcaatcggagcgggctgatttgttgagccacagtttgaggaacgccgaattggccctggcgccgccccacgggacagcgcgggaacttgttgagcatcatcggtcggcacccaataaatgacaacgatctcgcaatcggtcgtatccgagaatatcgaagccgcaccaagcatcgcacgcaacgccgcggtcgaccgcgcgcgcacattcttgatgctggtcgtgctcctgcatcacgccattattccgtatacttatttcggccataccgaccccgaggggtggatcggcttcgacatgatggtgctcgccaatgacagcttcttcatggcgatgttcttctttctatcggggctgtttgtctggcccagcctggctcacaagaagccgggggtctttttgtgcgatcgtttgctccggctaggacttcccttcgcaatcgctactctcaccatcattccgctcgcctattacgcgatcgaactgcggcagtcgccgaacaccaatcttgccgtgttctggtggaagatggtcacggtgggtccgtggccgagcggacccgtctggtttgtctgggttttgttggcgctagatcttaccgccttccttttctatcgattcacgcctctcctcctcgatccaatcaaccggatctcgctaagcagccactcgcggccggccatattcttcctgttcctgcttctcgccaccgcgctcctgtacgttccggcacgggtctatttcggcgcgggtcgttggttcgagttcggccccttttcgctacaggcgagccgcgtactgctctatccgacgtacttcttcgtcggcgcgggcgtgggtatggcgaatttcgatcgcggcctgctcggtacggatggacatctagccaaaagccgctggcattgggtggtcgtcgccctgctttcctattgcctgctgtggatgctgatttacgtcaagcgcgagatgctcggcaatccggtatggctgccgaactggtatgaagcgagctacggattgttctttgtcgccttcagcgcggccactatgcttgccattctcggctattttctgaggttcaaccgatctggcttcaccctgctcgatactatccgaacagatggctacggcatgtttctagtgcactatccgatcgcgctctggattcaatactggctgtatgatttcgacgcacccgcctttaccaaagcgctgataacgttcgtgctcaccgttctgttcagctggggcgcggcggcggcattgcgtgctatcccgggcgctgcgcgggtactgtagccatcccgctttcgatgcctggccgccctggtcggaagggactttggcccgagcctcgaagcgcggcgccccgccgtgtcgcaatgttagcgtttcttcgtcgccgttgatctcgatggaagagcttgcccggcgtttcgccgatcgatgaggctggcgctacacgaagcgagttgctcgggtacgcggtcgctgtcatgctgatttcacctatccgggcgctaatcgcctttggtgccgcctcacactcgcaagaccacggtaggtggggcggcgatgctgcagcttacgcggtggtttagacagaaccgcattgaagggcattcttgaatccgttcggtgggcgccgattgccagtcccgaaagtcattgacaaaccgttttctgacgacgcgcccgcgcgacgaaatggatcatcatgagatcgataagctccttgtcgatcggacaggcgagccgaaacatcggcagtgggacgcaagcgtcaagagctggtcagttcgagggaaataccgcccctggggccacggatccggcgggaaggccggcgctgcgcaaattgcccgcgtttgcctgaaaggaagaggcttgatgccaccggagaggtagcgatgtcgaaggtaaggtgcgagattatacgctctcgctcggcaggctcggcgcggattatcgcacaggcgatctcgagcacgataaataagggcggcgaccgttctcacggacgcttcgccgcacaatttgaatcgcccgcgcgacgttccgcttttccgatggatattcctacatgcgacgcggtttataccggatgccgtttgcgatctggagctctcgaacgtagcgcacaatcgccgcaacctgatcctcacgggcctgcggttgcggcggcatattgccgtaacgccagtgatgttgccttacgccaaacttggccgctgcaaagaaggcgtgatcggcgtggtgtcccggattgtagatgtcgtgaacgagcggaggcccggtatccgtgcccgaggcacggataccatgacaaatcgcacaattcgcttcgtacagaaccttgcccgtcgcggccaacgacgacagttccggctcagcgacctccgcggagagcgatcgcggtgcgggtccagaggagaatgtcatccagaacagagccgctgccgcgaacactgccacagcgcccaggaagaatcggccgtagccgccaccggtcgggtacttgcttttgttcgagtccgccatgaacttctccacctacgggtccagaaaatcgacgagccatcggcttgcagcgcaattcgtcggcgatcgccggcggctggctcgcgatcatgaaaccgcgatgaccggacgcgccggtgccgtacctggcagcttacgcgccgctatgagactggctcgcggggcgcaggcggctcgatcgcaaccgagaaatttcgtccgatccactctccggtattccatcggatcgtgaattccagctgctgcccggccttcagcccggccgtatcgagcctcgccgcgaagaagccgagacccgtgtccttggccggcacttcatccaccaggcgccagccatctatcccgacgcgaatggccgcctcgtccctcgatgcgacgaccagttccgccccctcgcggatgcttccgatctgggcgtgcggccaccagaatgcgctgcgggcgagaggtcgaatgccctgataccgattccagaccaagtgcggccggtcgaacggctggcctagtgcgcgcgacatcaggagcttgacgaactcggcatgcgcccaggccaagggcatcgccgagccggtcggtcgccccggagcaagacgacgttggggaatgggggcggcatcccagacctgctcgggaatcatgccgccgggactggcgcacgacgccatggtacgcaggaaaggcagagcgtcgcggccggcggtcaattcgatatgtccccgctcaccggtcagcaacggccagggtcgtccgcaaccggtcccgtcgtagggaccaccgttctcgtgttcaccgtagccatcctcgttgtaacgtcgccataccgctccagccggagtttccaccttcaacagacgatcgatcacggcaatcgtggactggatcagcgggtcccgcggccggcgcaagccgaaccggaccaactggagaaagtcggtgctgacctgctctcgggcggcgagttggagaccatcggcccgattgcggatcgcgacgggttggtccatggcagcttggcccgatcgtagcacgctgggaggcgccgttcggatgtaatggcttgcagcgccggcccggcgaccgatttccgtggctcgcgcggaggtccaccgttcgacgttttcgttccagaaatcggcgagctccagtgcccaatcggccgccttcatgttcagaaaggcgctgccggagacgagggccgcgatgcagaccgcaagcgtgaacggattgatacccgcgttttcctcccaccggtcctggtcggtggcgggcccttgacgcgctacgaaggcaagggcccggcccaccatgtccgcgacttcggtgcccgccaatgcgtttcgttcggcaagcgcggcagccagaagtaccggaagggcggcctcatcgagctggacgccgcgccagaacgagcgcccgtccagccattggttctgattccagtgtccatcggcgttctgcgtggcgatcaggtaacgaagcgtgtcgcgcgcctcggcttcgccgccgatcgcaagcaatgcggtggcgcattggacgaggtcccgcggccacaccagaaagtagccgccgcgctcttccccgcagtccccccacggcacgctgaggctcgccaccatggctcccgggtaagtcttgtccagatggctgcgcagcacggctttcgacaccgcgagctggttgcggagatcggccggcacggcaagcacgcagtcgcaacgttcgtcgcagcaccgatgccacctcgcccaatcggacaattgcccgtccagcagccgatcgaatggctgcatcagactggacagcgcaagcgtggcggcggcttccacattgctgccgaagccgagcgccagcacgcagcgtctgccgagttcggccataagagcgacattaccaggtccggccgacggatatgaccacgtcattgcgccgttgcgcgcaaaatcctgccaaccgtcgctgaagccaacgtaaccggcgctcgcgcgcagcaccgcatccttttgggcctgatcgacggcgacgagtgcgagggaaaacggcgcccgatcggcccaaagcacggttcgttcgttgtgcttcgcgatgccggctcggttgttgtttccgctcgccccgaggtgcggggcaagtagggcatatacctgcatttccggcgcgctgctctccagcacgacctcgacaagccagcacgtcccggcgcggatcgggcgagatcctcagggtgagacgatatcggtcgtgcggatggacgatctcataggccggcgttccggatgcgagcgaccgaagcgagtacttgccgcagcgcttcacctccgaccagaagcctttgccgtcggacacgacgaaaccgaggtccctgatctgcgggagatcgacgcgcggccagtacacctcgttcagaatgccgtagccgatcgtgaaccaaagacgcgccggccccaacgaacagcctaccgcgtccttcgcgctgctggtccaggtaggtgcgatgcccggcacccccggagcatcgtttagctcggacatgttcgattggtcctcttgccggtctgcggcaaacaaggcctcggtctgggcgaaccgtgtcatcagcttcatggtcgctcacctgctccacgtcgcggcatgccgacttctgtccgattgtcccgcaagagacctcatggccacgagccccccgccggcgccggttggcgcgtcaggaagggccccttcctcgggcttcgccgcatcggcactccaaaaaactatcctcacgacaaatcacgcatttgtcttcgaggcgatctttcagggcctgacgggcgcggaacagtcgcactgtgagattattgaccgtcacaccgagatcggctgcgaccgtttccctcggctcgcccgcaaggtctattcgccgaatgacctcggcgtgttccgtcttcagaaaaggcagatgagcatacaaacattcgcagaccgcattctcaaaatcggcgtcttgatccgcggcaacgcggtcgctcagttcggcgggcagcgggacttccctcgtcttgttcttcgtggtctgacgatggaaatcggcgaccgtcgtggccagaaccttgctgagccacccgcggaccgaatccgcatctcgaatgtcggaagaacgctcaagagccctcaatacgaacgcctgcaatacctcttccgcgtccgacggcgagctgaagcgcttctgcagataattccgtagacgctcgtagcttcctacgatcgccgcccgaaccgcgccgtcagaagccgcggatggccgtactgcgcgcatccttgccggactggctcccatattccgcgacgacctcatgacgcttgtctcgacactatgctgacgggttgctcttcggctcgcggcggggcgcctctcgcgagagcgccccgccgacgctctacctcgacttctgaatcttggtgatcgtgattccgcccgtctgccgctcggcctcgaactgaaccttgtctcccaccttgacctgcttgagcatggagggatcggagacccggaacaccatggtcatctcctcctcgtccatgttcaggttcttgatgggaccgtgcttgagcgtgatcttgccggcgctttcgtcgaccttctttacttccccggcagcgaggttcccttgggcgaaggcgacgctcggagcgacggcgagtgcgatggcgaacagcgcggatttgacagcagacttcatcattttgatttcctcattgattttgcggcttacttcacgacgaccttcccgaccatgccaccctcacggtgacccgggataagacacgcatattcaaactcgccggccgtatcgaacttccagaggatttcccccgtcttcttcggtgccagccgcttgccgttcggatcgtcgtgctccatgtcgggattcttcttcatcgcctcggcgtgcttgagattctcagccgtggtcgcgaggataaattcgtggtccagctcgccgttgttgcgaagcacgaacttgacctgctcgcccttcttcacgtcgactttttccggaacgaacaccattttgccgtcggtctcgttcatcgtgacctgaacgactcgggcgggcttctttggatctcccggttcacccgcggaatacgtctcatccttgttgtggtgccctccttgatggtggccaggatcagcccatgtcacggtcgaaagggaccaagccatcgcggcagcggcgagcgcgctggtgtagttcatctcgtatcttcctttcctcgattgcagtctcacgatcatgctcccttcatcttcatgcctttcattcccttagttcccttcgctcccttgcgctcccccgcattcggctgagtgtcctggcgcggcggctccgcagcaggtgtttcgatctcataagcaaccgttcccttcggaaacctgtaaggccccggatcgctgtaatcgtcgcgacctagtccctcgcggatcttcatcacggtgaacatgccgcccatttcgatcgggccgaattgccccgagcccgtcatcatcggcagcgtgttgtccggcagcggcatctccatttcgcccatcgccatgccggtcgaacccatcgccatcgagtccggcgccagccgcttcaccgccttggcgatgtccttcttcgagaccccgatcaaggttctgaggtcgtgccccatcgcattcatcgtgtgatgcgatttgtgacagtgaaacgcccagtcacccggattgtcggccaacacgtcgaaggcacggatcgctccgaccggaacgtcgatcgtagtctctggccactgcgcgctctccggcacccagccgccgtccgtgccgctgaccgaaaagctatgcccgtggagatggatcgggtgattggtcatcgtcagattgccgatccgcacgcggacgcggtcgcccagtcttacgggcagcggatcgatgccgggaaagacgcgcgcgttccaggaccacatgttgaagttggtcatctccgtgaccttcggcaggtaggtccccggatccatgtcataactgctcatcacgaagacaaagtcgcgatcgacgggacgaaagccggggtccttgggatgcaccacgaacattcccatcattcccatcgccatctggaccatttcgtccgcgtgggggtggtacatgaaggtgccgctgtgcttgacttggaattcgtagacgaaggtcttgcccggattgatgtgaggctgcgtcaggccaccgacgccgtccatgccgctaggcaggatcatgccgtgccagtggacggtggtgtactccggcagcttgttggtgacgaagatgcgcaccttgtcaccttcgaccgcctcgatcgtggggcccggcgtttgtccgttgtagccccacaggtgggccttcatgccttcggcgaattcgcgcaccacgggttcggcaaccagatggaattccttccaatcgccgttcatgcgccaaggcagggaccagccgttgagagtgaccaccggccgatattcgggtccgctgctcgggtgcagcggcggctgggtggccaccttgtccatggtaggcgcttcgggaatgcccgcggcctgaacccgtccagaaacgaggctggcgctcgcaagcgcggtcgcggtaccgagaaaacttcgtcgagacaacatttccatctccttatccgccgctcgccaatgagttggtcggtgaacggctctcctgttgactatcggcacggcctccgccgttgactgccgtctgcagctccgactgcgccagccagaaatcgcgtctggcgtcgatcgacgcgcgctgggccgcaatccgcagcttcgcttccgccagcaacgcgaacacgtcgatctgcatgctgccgtagcgcagttgagcttcatccgagatgatgttgcgcagcggcacgacctcacgctggtagtgaccggcgatatcgtagctcgagcgatagacgcgatatgcgtcgcgcgcctccgagcgcacgttgacggccttttccgtcagcctgttgaaggcaatgttgtagctttccgtcgcctgacggacgcggacctcgcccccgtcgaatatcgggacctgaaactgaaggtcgaagccgcgttcgcggaacggcgggctttcggggtctttggtctttcgatagatccccgcgagatcgagcaaggtgacgaagcgggtcgcctcggtcaggttcagagccttcgccagaacttccagctcgatgcgggctatctgaagatcgatgcggtggctgacggcctccacttcgatgttgggcagcgacttcggggcgcgcggcagagacggcagcgctttgggaagcttgaagtcgagccggccatcccatacgccgagcagtcttgcgaggcgctcccgcaaggacgttgcctgctgccgcacggacgcgagatcggccgtgatctccgcgtagaagacctgctcgcgcgcctgatcgagtttgttcatcgaaccgctgtggccgagcttttccgcgagctgagcgatcgtctcggccgtggtcttcgtctccgtcagaagtacgaccagctcgttggcgccgaccgcctggtagtacgcccgtctcacgtcggcagcgaggcgcagcgtctccaaggctgcccgcagctgggcttcgcgaaatcgtcgtcgcgcgatgtcggaacgaaagggaagcgttgccagtgcaaggatgtcgccgacgacctgacgttcgagttcgtatccgccgtttccggagatccgggaaatggaaaaggtcgggttcggaggcaggctctgctcgatcgcgtccgcttcagccaacgcgagttcgctgtaggcggcctgaagtccacggttgttcagcagcgcgatctgcaccgcggtgtcgaccgtcagggttcggcgcaggagctgggcgatcagcgtattggccagatcgtcatcgtcggccgatcggatcgcgatcacatctttccttatggtgttcgccgcgacgtccgcgacgccggacatcccggcatcgggagagaaggcggcacaaccgccgagcaggaccgagaccgacagcgcaaggatgcctgttctcgaagcggtcgtgagcgaaatcgtgtttcgagccgtgagcgtcatgtccatcccctaccgctcgttcttcggcgtgggcgccacgcgctgattctgttcgcgccatccggccggcgagatcgggcgcaggctgacgtagggggcgaccgtgggcctgtatccgacccgccggacctttactcccggatctgcgggatcggcacccaccaaaggcacggtcgtcgaacagccggcaagaaacgggccgaccagaacaatcagaatcgtgcgccggatgaccgcgcgtctggatcccgttctcgtgaatgcattgaatgcggcggcgtcgttcgccgccatttgcgccagcatgtaaatcccctgaaaagcaccgacgtacgagtactcgcgccccaagccggagcgcggcagcccatcaattcacgtgctttccttggcatcgccgtgactgtgcttatgcccgtcatggctatgctggtggtcgtggctgtgctgatgcttctgggcgtgctcatgagccggcagggtttcgtgggcgcgctgagccactacttcggcgaggccggccggaaacggcgcggcgatggacggcgtcaacgacccgagcagatacgtgatggcgacgagccacccccaccatctgcgcgcaggctttctgaagccaatcatcccatttaccgccattccgaagactaaaatatagccactgttgggcacgacgccaatagaagaaacgcccggtcaactacccttttgggcgctcaacgagcccgctttgccttccgtcgcggaaccaccatcggcttggcgtcggggccggccccaggatacgcgtatgaagggggcaggatttcgatcgcctgccctgggctacttcgagcctcgttaggccagtagcgccggtcggagatggtcacgcccgcctgggcgtcgaacgtggagattgaggcgagcaccgggaccagaagacataggagtcttgtcctcgtcgacatgcctcgcctcaagctctcagcgcagcgggtgctcatgttcaattttatcataggagcgaacgggctcgtcattgttgatcgaggtcaaacgtgtgccgcgggccgcaggtgcccccggcatccggcctgttatcgtcgccgctgatcacactgccacgcagggcgccttcatcgggcgacgctgccgacagttcgctgcgatcaagcatgtggccggccgccgacgagctcgcgccagggttttcgggacttccagaggcaggcttgggaagcttgggagcaaactgccggttcgtaaacaggtagtagccgtcccgggcgaaagccgtcatcgcggactttccccgcagacacggctgacgcgcgttcctgcccttcaagatgcgcacgaagcgccaacccgggctcagcagcagatttggaatcggattgtaggtcggcacgaccgcgtagaactcgcgcgcgaatgtgcttgcaaggagcacataggccggctcgtttgcgcggttgcgccggctcggacatcccgggttcttgctgcccatcatcgttttcagccgacttcgtcggagccgatgaactccatgtaggtgcggcgtccgtgcgggccgaacaaaacgaccgaatacttctgaggtttgccgctcatgcccggagatccctggggcatcccgggcactgcgatgcccgcggcctcgggtcgttcagcaagcagcctgtttatcgcggccacaggcacatgcccttccacgacgtagcctacgatttcagccgtatgacaggcagccaggtccgaggggacgcccagacggttgcggatcgcgttcagaccgctcgtttcttcaaccttgacggagaaccccgcctcgtcgaggtgcttcgcccaagcgccgcagcagccgcagctggggtccttgtggaccaagacggccgcggccgcgcggagcggaaggggcgccagcgcgatccctagaatgcaaccgcaaaccatccggcgtgaaagtcgaagcttcgcagacgaatttggcgtcatgtccctatccctcaatggtgtttgaaccaaccgatatcctttatgtcgttgaaagaatcggtgcggtgacaaagaaagcactggtttacacgcgcatggtgttgccccgtgatcatctggtccatcatcacgaagtggtgcatgtagtggctcggcggcgcctggtggcattgcgcacattccttggaggtgggcgaaggatggaggaacttcgcaattctccatgtatcgattgcgtgacagctcgcgcattcgcgcccgaacagtccgcggtgcggttctcgattgctgtgacagctgacacagtcgaggctggccttctccgcttcgtcggaattcggtacgcgcaggaatttcttcagatcggcgaccatctgtcccgtgattgcgcgcgcagacgtgtttgcttcatgtggaaacgccccaatgcgcaatagcgcggcgtgatccatcctcgtcggccgcacgccgcccgcatgctcgagatggcagccgcggcactccttgctcgtcgcgtggaatgccgtcgcttgcttcccgagatccgcagcggccgtcgtgtgacaggcgacacaggccgcggcttcaacgcctttggtcggcgtatgacaactttcgcatttattggataggaaggcatgcttctccgagagcggcccgggaagcactgcgtccgtccaacccgagacagccatagaaccatccctgtacaatccggcggataccgccgccacgcccgcgatggcaagcgtcgcgaagatcgcgtagatgagcgcccgaacgctcacgtgagccaccgaagcccgtaatagacctcgcctgcgatatggagcgccaacagcgcgtacatcgcgatcgccgcaagcacgtggaatccgatccactgcgtgaagaccttcttgacggcctcttgggatccgatcgcatactcgagatccgaaatgccctcgacgagctgcaggatcggcacttcctgcagcgctgaagcactcgtgggaggatcgtcgtcagcggatgcttcgcgcgcggacaggatgagcgcggtccggtcgtaggtagaccgcaacgttgcaaggcgagactgccgctcccgtatttcggcggcggtctgcggcaagtagtaccgccccacgaatccggtgacgacaacaaccagcaggctggctacgagcgcgattccaagcgggctttgatatttgtgtccggtatgcaggagcgcgagaaacgatgccgcaatgccggcgtagacgtgaaaaccaagtagcgcgcgcatcgagacgacgctggtgacgatggtcttgaagtttcggccgtacttcgcgagtggatagacgaggaggagaagcatcaggccggcggccgacgcgccgagagcaaatccagcgaggcttccggcgaacctctcatcggaatgaagcaagaatgccggaatcagcaacagcaggctggcgaggacgacatcgacgatcagccgctctctgtcacccatctcaggcctcgacgaccaggtttccgatggatttcgcctggcaagccaggatcatgcccttggctctgtcctcctcggtgagcgcatcctggacttccatcgtgacgctgccttccagcaggtgcgtcttgcagatgccgcagatgcccgcgcggcaggaatagtcgatcggcacgccgacagactcggcgacttcgagcacgctcttgtccggaggcaactgcgcgaccttgcctgatctggcgaagcggacggacgccgtggccggaccgatggctgcggcgccaccgttctcggatttcgtgctctcggtgacggtcctgccgggaggcggaacggccccgagcgcggggccgaacgcctcagtcttgatctgttcggacgggactccaagctcgccgagggtcttcttgatcgcctgcatcattccgggagggccgcacagatgcacacggcgtcgggccagatcggggacggcccgcgtcaggaaatcggccgtgatctggccctcgcttcccatccacgacgtgccggccgcgcgcgccatagtggctgcgacgtggagattgttcatccgccgctgcaggtattccaggtcgtccctgaagatgaactgttcggtcgtctgcgcaccgtacaccaggtggacttggcccggccaagcgatgtcgaacagataccttatcgcagccatcaacggcgtgataccgacccccccgccgatcaacacgacgctgtcggcctcctttccactgaaagtgaaggcgccggagggagccatcacgtcgagcaggtctccttctttgatcttgtcgtgcatgtagtcggagaagactccgccgtcctcgcgcttgatggtggtctcgacgtaagccgtctgggcggcggatgacgcgatagtgtaggatcgcctgacggtcttcccgtcgatctgggcggagtaggtcagaaactggccgggaagaaacgtgaaaggaatcgagccgccttccggatcccggagacgaaacgtcttcacgctcggagtttccttgaagattgcgcagaccttgagtttgcctttccagagctgccccggcgtcgtcgaaccgccggttgcgcgcatcgtcgaaaccgtcgcagttccttccggagagtcgctgcgcgtaaacgatggcttgaccgcagggccatcgctcgacccgccctgccgctgaaacgccggcgaggcaaccggtggcgtcggtgcgagcgccggcgcctttgtcagcctatcgaccagagcgttggctcggcgcattcgcgccacatagaccgcaagcatccccgacgagaaggccgcgagcagtcccatcgttacgacatgaaaccaggaaatgcccaggactccctcggcagtgaaggtcgccggcggcggcaggagattcatctgcgccttgaaccaattttgcgcgatctgctgcggagattttccttcgctcaacgaacgcagcacggtcacgccgctttgcacctgatcgagagacccgcgaattcgaccggaagcctgatcggcggcggcgatgtcgcctcccgccatggcatggcgcaggtccgcttccgcggcagaaagaccatcgattccggagttgatgcgggcacgggcctcggattcaaggtcgcgccgccgctcagcggagagggcgggcatttccatcaacgatggatagaactccttgcgtgggcggcccatcatctcgcccataatcccggtttcgcccatcatgcccggattggagccgctcgacgaaggtgccggcgagccgccacttggagctgccggactgttcgattgaggagcgctcgcgcctccggagccgggagcgccgggatgatgcgccgagtgattgtcctcggcctgcgccaaccgcaaatcggccggccatccgaactccgcatcgagacgcttggggctatcgcgatcccgtagctgctctgccgagagctgcgcggttgcagcgatggaggcccctgcgagaaatagggtgcagaggcccgccacccaaagaccaccgcgatttcgaaacaccagctcgaatatcgacatggcctctgccttcacgaagaggtcgtcagaacgtcgcgattaaaggcagcaggatggcatcagccgtctgcttctgcccgtcgctaagggtcccgtacaaccgagcgaatgcagagcgcgccgatttgatcgcttccaagcgctcacccaaatgatgctcgtagcggtcaaggcgctcggggccggccgctttgtcatccatcaccagcagcttgcgcgcttccagcaggtgctgacggctggagcgcagcgcgtccgccagaacgttccaatcggccgtctgcttgtcggtgatctgcaactcggtcttgaggaacgcgatgcgcccctccagtcgctcggtgacgtcggcggggccgctcgcgcttgcaccggcaccggaacccatgccgttcatctgctgattcatgcggccatgcattcgctccatcatttgcatcatcggcatcatgttggagtcgcgcggctgacagccggcgccctgacagtcctgcatctgacccggcatgggcatcttcatcttgtcgtccatgcgaccgccgccagtgctctgcgactggctgccgggctgccccatgttccccatgttgttcgcggtgccgctggacgaatcgggtttcttcttcatctcgtccatcatggcaagctgcgcgcgttccgccgccacaagcttgcccgccggcgacccagcagccaggcccaggacggcaaccgccgttatcgcaacgaacctcttgatattatccatggcctatctcctatcgtgacgctgatggatgcccccagcttgcctgccaactcaggaccggatcaagctgagccagatcaacagcgcaagtcgagccagacggcagattgggcgcaccaattaatatctgtggagagtccgctgaaaaattacagtggtctcgcgccgccagtttcgctaccagcttcctcttccgacagcggtgaggcatgaggcaggcccaatgcaagcttccacctgcacgcaatgcgtgccgcaagaaaccaatcgtgacggtcgtgctgacggcggcttcgaagaggcacgcgaccgcctcctgaacccggcaacggatcagggcgcattatgggcatacagtcgcgatttttgggaacgttcgatcctcttctgggacacgcttcgacaacgagccgacgatctgatcgagcatgagcgccgggggctgccgcctctcctggacttccgcttcgagacgattctcgacgcgcgccagttcgagcgtccggtcaattacgtcttgctgcgcatcctacccgagcacgaatctgccagcggtccaggcagcgagaagaagccgccgatattgatcctggacccgcgggcgggacatgggccgggcatcggcggattcaagcaggactccgaagtgggcatcgccctcgccaacggcaatccggtctatttcgtctcgttttttccgcaaccttgtcatggacaaaccctcgccgatgtgttgcacgcgctccggcgcttcgtggaagccgtagcccaccgccacccagatcgaccgcctatcctttacggcaattgtcaggccggttgggcggtcaccctgctttcggcggattgcagtggcctcgtcggtccggcggtactcaacgggtcgcccctctcctattggtcgggagaagcagggatcaaccccatgcgcctcgccgccgggttcaacgggggagcctggcttgtacacctcgtgtccgatctcagcgacggccggttcgatggcgcctggctcgcccagaacttcgagaatctcaagcccgaggcacagtgggagaaatacgccgatctgttcacgcatatcgatcgggaacgcgaacgctttctggacttcgagcgctggtgggggagcttcttcttcctcagccgtgaggaaatcctggcgatcgtcgagaacctgttcatcggcaatcagctcgagggcggccgcttccgaatctgtgaacactgcttcgccgaccttcgccgcatcagcaacccgctcgtgatatttgcctcctacggcgacaacatcacgccgccgcaccaggcgctcggctggattcccgtcgtgtacaagaccacggaacagctgatccaggctggccaacgcatcgtctatttgacgaacccccacgtaggccatttgggaattttcgtctctgctaagattgcccaacgcgagcaccgggccattcttgccagcctctcggaaatcgaagggctggcaccgggcctatacgagatgaagatcgaagaggcagactcttcgggcgcgtccaatctgccttttgcggttcggttcgaatcccgacgtgtcgaagagctcaaattcctgccgccggatcctgctttcgagcgaattagggatttttcggaggcggctgaagccatctacaggaccttgttcagtcccttcgtccaggccacctcgaatcccttgacggcggaagcagccaaatggtttcacccgatgcggatgagccgttatctgctctcgtcatccttttcgccgtggctccgcggactcccggaacttgccagctcgatccgcgatacccatgtcccgcttgcaggagacaatccgtaccttggcgccgaacggacgttcatcggcctgaccgcctcgctgatcgaggcgacccgaataaatcgcgacgccgcgctggaacgcatgttcgagttcctgtacggccgtacgtcctctcgcggggtctgatcgcccgtttagagttcggcgcgatcagcctcgtcggcaagcgacgtgcgccgctgccaaggcaaccggccctcgatttcaatctgaagcgagaagctcaagaaggtgcggatcacgataataagggcaaggattcccagtcgatcgaatgacggcactatcgcgaccataccgatgatatcggcggcaatcaggaactccaacccgagcaaaatgcctcgaccgaggttcgcccgataagagcgaaatgcatcggcaaatcccccgtgccgcaattcgcgaagcgaccagacggttgcggctaccacgccgcagacgatcaccaccacaccgagcagttcgatggccgacgcggtccagtgaagtccgtgcagaatcgcgccttgcgtttgctcgttgaagatccgctccgaggttatcatccgcgtccaccatacgctcccccacccgacggacgatcttggtccgtcggctagatttgcggctcgccacctgcgcctgccggcgtcgatctatttcccccggaagacaaactcttgtcgagctgcttcgaccaagtgcgatagtaagcgatgatcgtcaggatgcacaggccggcggcgccgaccaggagctggaccaaaatccccttcgaaccgaattccagcacaaaatggaccacgaaagaaagaaagagacccacgcaaaagaccggcaacgattgctggccgcacctgatcagcggcttgaagatgggccactgcaatccgggccagtcgatgggaatgagagcgacgacgatgaataccaggctggccaaatggatcactcggtaaggcgcgagattggtcttgtcgttggggatgaacatttcatcgatcgaatcgggaatgagctgtcgtagctccggaatccgctccgccagggtgatcacgagagcaaacagcaagacgccggcactaagcgcatagagaatccgaaaacggagcagccttcgactggcctcggcgcccccgagcgcgagccaggctccaagaacgaagagcaactgccaggcatagggattgaagtaccacactcccgcaggataggattggaagttccagccgtagtggcgagcggccaggtatagcccgatcgatccgaccacgacggcgttgcgccatcgcagcatgaaccaaagtacgatcgggaatgccgccatcaacacgatgtagagtggcaggacgtcgagattgagcggcttgaatttcagcgccaatccctgcgaaagcgtctcgacgggaaaattcataaggtgcgcgacgttgaattgatccataagatgcggatcatcgaacctgtgcgaaaggtaatgcaccgaagtgaggtaaaacaagaaaagcagcaaatgggcggcatagagttgccacactcggcgtaacagcctcgtcgctccgactacaaagccgcgatccatcataatcttaccgaatacgagggtcgcggtgtatccggagatcaacacgaacaggtcggctccatcgctgaagccgtagttccgggtggtgaaccaggcgagcgccgagtccgggatgtgacccaggaagatcagccagttcgccagtccgcgaaatagatcgaggcggagatcgcgctgagacttcggcagcacagatctcacggtgatcgtgtcccaaagccgctctcgtacgaagatcgctatcttcagcgtccggccggtcccgcggccagtcgtttcgtgaggcaagcctgctccccttcattcctgatgatgggtttccgcgccaccggcaggggtgacgaaagttcgtatcttacggctcgttgtcatacgggcaaccatcaggcttcgcactcgataaggaacgcggtgggcgcgcgaaccgcgttgggtgaggaagcgcagggcctcgggaaagcgaacggctagatatgcatatgccaagtacttgatgatcttcccggcaagaatggcgacgaagacgtcagcggtctgcagtcgatagattccagctaccgcgagcatcggcactttgggaacgggcagcggcaaggccatcattgcgaatatggcgaggataccgtatttcgacagccaatccgtcgcctgcgaccaagcttgcgagtccgcaagctcggggtaacgcgcaagcaatatgctccagccgaaatggtgaaaggtgaggtacaggccgagggacgcggtcgcgcttccgacggccgccatcaaggcgatcatcgtccatcggcgtcggcaggccagggacgccacgactaccaaccactccacgggaacgctcatcgtcagcgtggaaaggaaggcgatcgctccaaccaacggcggaaacgagctgcgctcggcctgaccgaggactatctcgaagaatttgtgcgtcgtggcgtgaccgatcattggctctccgttgcccgccattcgcagccgttctcactgtcgttctgtcttgaaagcctcagtcgacccgccgagatcgatcggtgtaggttcgccattttctggttcgaaactcgcccaatggtcgacctgcaccggccttcaaggcgcatcatcgtcttatgatcgtcgaggcgatgatagcagttcgatccatcttcgaactctgttgccgcttgagggaagtctccctgtggcgacaacagagtgtgcccgacagtccggggctattctgatctgtcgggcaaccgttcccttggtagactacttggagccagtcgacggcgcagcggaaggattcgcgccggtggtcccggtagaatctctcgacggagctgagccgtcctgcttcattcccgaccccatccgaccatggtcgccttccattccttttcggtgcatttggtcccccatcttgcccatcccatcccgcatcatctcgtggcccatgccggacctcggctgagtggacggattctgttgcggggcattctgctgattctgattgtccggcgtctgctgctgggcagacgcagccccggacacgcccaagatcgctgcgagcgcgatagctgccgcaagccttccttgactgatgaacttcatcgtgatctccaattcgtgatttttggcggccagtttcggcactggtgtcgggacgctatggccgctcgccgagctcacattgaccaatgtcaaatggaagccgtgcggccaagcaatctttttgcgtcagttcggtgtaatagatcgaggcgcccgtcgtcactaattggtagctgttagttttccagctttcaacagcgggggacctcgatagcaactgcagccggcattgaaagaagggccgatcgcccaggccgttgaccatcggattgtggcggagtcggttggagccgagcgcgcctctcccgcatgtgccaaaaccgaaggcctcgaccggctcctgttagctctgccttctcgcccattccacgacgtcaacgttcattggtggctgcaagccgaaagtaggcgctccttccagaaacgaccggacctggcgaagacgttgtatccgacccatcggtgtcgcttcatgcggtcgagcaggcgaagatcgtcgagcctgacgaacctccggacggcaggatcgaacaccatcagcgaaagcgagttctcttccatgagatagcgcgacacggaatgcttcctatcggagccaggcacggtttcgagcttctcgtgacttgtccccgcgcctcgccggctgcacctgcgatcgcggcgtgacggcaacggaagcgattcccattaagctcagcattccgattcagacgttcacgttcaagccacccacctcgatcgcaagcgcgtgttgcgcgccgaagggcttgctcgaggcgaggaccgaccagtatccgaagtttgcgcagcaatcgacgaactcatacctctcatcgcgcccgcagtgcgggagagcgttgatctcttcttcgtagtcgtagctgcggttgaggagcctactccagtaggcatcgcagaacggcatagcgaatgtcgcgtcctcatttcaggcgcgcgacgatttcgcggtgcgcgttgaccgaaccgattaggcgacagcccaagccgtaaccgcggtggccgaaggatcctactctgttagttgttggtgacccgaactgactcaaaaataaatctaatgagcctgtaagaaatccgaggctcgcgcgtcgcgaatcgctgcccccaatttgtgcattgcagactgcttcgatgggagcgaatcttgatctggctcaactgttccgctcgaggttcagcttgattgtttctgaatcagacatctggtttgattgccattgaaagaacttcgtcgaaacaggagaaagaaaatgaacgcccgcaagttgtttttggccgcaaccattgcctccttcgttacgctgccggcaatcgcgcagaccgccccttccccgagcgatggcggacatcactattcaggtggaccaagggccgagccgcaccacatgggaaagaaagagagtacggccccgaagaagaagtcctccggcggcagccatcactatggcggcggacccaagtccgatttgccgcatcatatcgggcctaagaaggatcaatgatcggagcgcggtgatccacgaactggcttgtgggatcactgcttcgttcaaccgagtctcctgagttcgttcaggcaggatgcaggtccatcccgttccttcgcgatgcgagtctgcagcgcccgggcggctcgcggctcgccatgagtaacgaacgtcctcctcggcgctgccccggcgctcttgagccattcgattgtttcgtcggcatccgcgtgtgcagaaagggcatcgatgttgcgaacctcggcggcgaccgggacatcctcgccgtggatccggatcgtccttgcacctgatatcatcgccgcccctcgcgtcccctcggcctgatagcctgcaagaccgtactcttctgatccgacgcgaagcgtttcagatgatggagcacccggccgccggtcgccattccgctcgcggaaataatgaccttcggaactgggctgtcgctcaggcgcttcgaatcctcgacggaacggatataagtcgcgacagcgcacgttctcttgcattcctcgtgcgacaacttttgatcggacctgaatttgcagaagatttcgctcgcatcgacggccatcggactgtcgaggaagatcggcacgttgcgcaggccaccggccaatttgatgcgtgcgaagtagtaaagcagcgcctgaacgcggccaaccgcaaacgccggaatgaccaccgtgccgccgcgtttcgccgtcgtgccgacgatctcctcgatcgtacgttgaggatcgatcttcgggtgcgagcggtcgccataggtcgattcgacgacgaggtaatcggtttttgccaacggctcgggctgcagcatgatcggatcgtcgtgccgaccaaggtcgccggaaaatgcgatcgaggttcgctcccacccgatctcaatccaggaagcccccaggatgtggccggcgcgtcggagcaccagatttgcgccgcccggcaggctgtggtcatcgtgaaaagatgttggcttcagcagacgcagggccgcttcggcatcctttaccgtgtagagcggaagagcaggcttatgtttggagaagccgcgcttgttggcaaatcgcgcatcctgctcctgcagatgcccagagtcgcgcagcagcacctcgcatagggcggctgtcgcttcggaacagatgatcgctccggcgaatccctgcttcaccagaaggggaagcccgccggaatgatcgagatgggcgtgggttaggacgacagcggagatgccggccggctggaccgggaatctctcccaattcatctagcgaagagaccgaccgccttgaaagagaccgcaatcgatgagaatccgatgggacggggattcgagaagatatttggagcccgtaaccgtccccgcccccccaagaaagacaacttcaaactcattcagtccctctgaattgcggaccagaccgttcgctccgctggcgagtggccgaacggagatcggaagatcggaggcttcggcaaccggtcaagcagaagctagatttcggttgcgctttattgatctagtgagacagtgtagttggcagaaggaatagtaaaggcgatatattttgatgcggaagttgtaatggacgacaccccacagacgtccaaggagacctttcgtccctcgaacatcgagcaactggactcgcccgcctacactttagctgccctcgatcaaggctttctgcttggcgattccatgcgtggggtacgattcctgctggagtacgcaaaggccgaggaatgcctgagatcgtggggcgtccgatccactatcgtcgttttcgggtcggcacgagttcgggaggatgggcctgaatcgcactcccgatggtatcgggaagcacgcgcgttcgcgcgcttggcctccgaacgcggtggcgccctgacttcgaacggcggccttcgagacaacgtcatcgcgaccggcggtggcccgggaatcatggaagctgcaaaccgaggagccggcgacgcgggagcgccttccatcggcttcaacatcacgcttccggaggagcaacaaccaaacccttactccacgccagcgctgacctttcaattccactatttcgcaatgcggaaaatgcacttggccatgcgcgccaatgcgctcgttgcgttcccgggaggcttcgggactttcgacgagttgttcgaaatcctgacgctgcggcagacgaagaaggcgccggccattccgatcgttctgtttgacgaacaatactggcggtctgccgtcaacttcgaggcgctgatcgacagcggcacgatcgatcgatccgactgcgatctcttccggttcgcggaaacgtcggaagatatttggtccgaactactttcgtgcggtctcggcgcacccggtctctcctgtccggcctcgcaattcagccgcactacgtcctcgaacgcgagttagacctctcactctatccgcaacatgtctgaatgagcgtgacagacgtccgcttgccgttatcgcgctcggcgctggtgcttcgaaccggccggctcggccgccttcggagaaacgacggcttctcggacgaacatgacaatgctcaccccccaaacgagggcgatgccgagcagaacccacttgaaatcggaatggatcatgaagttgacggcggccatcaacccgatcgaagcccgccggcgaccccggcgccgaccgcagctacagcgcgatggtctcggaaggacgtcaacgccagggtgagcgcgagcattcccgtagccgtcacgtagccgcccatcacgcggaagacatgggtgggccatgatgtcagtctgggcccgatcaactgcaattcgatcgaagtaaggctcatgtaccggatgtcgtccggcagcaggggaggccgaaggaggaggaagtagacgccgaccccgatcaacaggataccggaggccgccaacagcatcgaggacagacgccagcgatacgatgcgtcgcgcatcgtggcagccggatcaaccgtgacgataggtgcggccggtcgagccctgcccgagaattcggctcaggcgcggtatgaagcctgggacttccgcagcgtatttcgtataggcctcgccgaactccgactcggcgtccaactcctcgtttctcgcgagcttcacgtacatgatcgtcagcaccggaaacattgcgagcgtgagaattgtcggccactgcaacaggaagccgaacatgacgaggatgaagccgacatattgcggatggcgcacatagctgtagggaccggccgtggcgagactgcgcgtctgctgcgcgtcgtacaacaccttccaggcggcggagatcagaatgaacccggcggcgatgaagatgaagctcaggatgtggaacggtccggcgtgcggattggccttccaaccgaacaccatctcgagcagatgaccggcgtcgtgcgagaaccagtccacgtcaggaaaccgcgactgcagccagcccgagaggaagtaaatggtgagcgggaagccgtacatctccacgaatagcgccaccagaaacgcactgaatgcgccgaacgaacgccagtcccgggaggtctgcggcttgaagaagctgtatgcgaacaggatgaagaccgcggagttgacgatgacaaggctccagaggccgtaagcgggcgtagaatcatgcatcacacgctccttggatcgttctgttgattgtcggcgtgatgatgcctgtgtccgtgatgcatgaacaaatgcatcagcgggcaggcgaggattgggagccagacaagcaatccgagcacgtgcgctctatgctcagtgaacagcagggcacctgcgatgatcagaaatccgatcagaaccagcccggcacgcgatttgagcgacaaaccctcaggcgcatgtccttggtgaccggaacgatcttgcaccgacatcgtgaactcctgctacccaatagtaagtaaacaacttgccgaaaccttcttcttgatcgagatcaagcagatcggaccggaaacgcccgcaaacaaggcgcttgcggcgaccgctgcctaagcacgttgctcgatgcgctcgccgactgacagggcgtcgacttggtctagttctgtatcatcggggacttcgggcctccctgatatctccaaacccgcctgctcgaatcaacaggtggcgcgaagtagtggcccggtgtcgcgggaaccgagccgaacgcagagctccagccaccttgtgggttcgacatcacttgcgcgccccgcctggcctcgtttggccaataccgccgatccgaaatcgtggcccctgcaaaggcactcgccgacactgcaaccaacggcagcaccagcaacatagttctgaaggtctgcttgaacatgacccggctcctgctcacttgaaggaaggatttgaggccctctcatcgatgagttcggaagaaatcgccgttcggttacagggctcacgccgacgtgaaaacggttcagtcacgctaccaacgcagcaacctggggcccagcatcgcccctgccagggtgcagagcacaatcgtcccgccgtaccagattgcgacaaatggcaaggaatcgtcggtgcaatgaagcgcgtaacccatggcgctgatgccgcccgaaacaagacccgcaaaggcacctgtccggacgagattggtcggcgccgccgttcgcaccgccgcgataacgacggtgaaaggtacgatcgcgatgatcgggatcgagataatgcactctagccactcgtcacccatgaccatcttggcccaatgcgtactgggcgccagcccgaggctgattgcggcaagcaacaagatgcctgcgaatgggaggacggcccaccccgaagaggacctacgttctccgcccggccgcgccaggcgcatcaggtaggccgatgccaacacgacgattccgaccgcgaacacaatcttcaggagcacggaaacgacggcgtgaccggtcgtcagatcggaccgggtacccaggccgaccaatatgccgcccaacgtcagaaccgttgcggccgcaagggcgaggcccactgtccgaccgaccgatcggcgatcgaccggctcgacgtgggcactgagtgccgcgatcaaatcatccgtcttcatgatctcgcttcccgggcaatcagcgcggccagggtttttagcccgcggtgaatattcaccttaatcccggattccgaaagtccgcaccgctgcgccgcttcggcgatgctcaacccgtcgagtttcacggcttccatggaacatttgacgtttggcggcagccgtcgcaagagccgcccgacgtcgtaggaactctccgcaccgacatgttcgtccgatgccatggcctcgtcagcctcatccagaggcacatcggccaacgacgcgcgggtccgacgcagaaagtcgatcaatttgtggcgcgcgatcgcatggacccatggtgtcagcaggtcggtggcgtcgtaggtatgtctcttgatgtgaatggccaagaccgcttcctgaactaggtcttcggcctccgacgcgctacggccagtgcttgcgagttttcttttgtagtacgcacgtaatcgcctgctcagcgcttcaagcaatgcccgatgcgaagccgcatcgccgtccaggcttgcgagcatgagtttcttcagatccgcttccgaggtcgtcatgttcgcggtcccgactacctctctcgatcagggaagatctcgatgaacttattgtcctgcaggcgtccgcaaaccatgccaggcatcccggacttggtagtagtggacctctggcagatagtcgggcgtgttcaacccgagcgtcttcacgtcgaggcgccctacggcgccgaggagcgtgtaggatgcgatcacgcggtcgcgctgagcgaggatcagccgagctcgggcattggtcagatcctgcagggcgttgagtacgtcgaccgtcgtgcgctgtcctgcctgcgcctcccgctgcacccccaatagtgccacgttcgcggcacgcacctcggattctgcggcagtgaccgcgacttttgctccttcattggcgacccaagcgccggttgccgcagtgcgcgtctgattgcgcacctgctccaggactagccggctttgcgaagtgacctccttggcctggcgggtctgggcggcggccatgcctgcatcgtagaggggaacgccgacctggcccaaaaccgaagtctgatccatgcgcgaagtcgcgagggtaggatcattctgcacggcgcggctgacgctggcctgcacggaaacggtcggaagcagcccgctttccgccactgcgatcgaagattgggcgacatccacatcgaactgcgcggcaaggacggccgggttctcttgacgcgccacattcgtcgcatccgcaagagtaggcggcgagaaccggtccgccggcgtcgccgccacgagctgcgcgggaggcccgcccaccacttgggtgtaggtcgccttgctcacggcaagggccacttctgcggcgttgaggtcggcaaggccgcagttcaggcgcgcttcggcctgggccgcgtcggtgggcgtgacgtcgccggcattgagacgactgcgagtgttggagagcgtctgccgtaggaaggcgatattggcgcgctgcgcgtcgaccagcgctccattggcaagtacgttcatgtacacggtgacggcattgagcagggtcccctgccctacgttgcgcagggcttcgcggccggacctgacctgcgcctccgccacccggacattgttggcggtcttgaagccgttgaacagcgtctgggtcaccgtgagcccaacggtccacggctttagcgtgaccgtctggacgacgttgtccggcaacaggttgcgaacctgctgcaggccggcgctcaggcttgccacaatctgcgggcgatagcccgacaacgcctgcggcacgttttcgtcggtcgcccgttggcgcgcccgtgccgcgctcagctgcggatttgactgataggctttcactatggcttccacgagggtctccgccctggcgggcgctccgccgtgaagcaaacaacaccgacccgaacatgggtccggcccacctcccgacgatcgaaccagaagcatcgactctcggtccgtacttagccatctcttcctcgtccttcgcgaagcgtcgcacacggatgtgctcacagctggcccctcttccggctcattgggccggctccataatgcgcggcctctttgcaggcgcttcttgatgtgcgggagactgtggatcgcggtcgcctcgatgggacgtcgaaggcaaccggaagcccttgatcagtccgaagatcgccggaatgacgatgagcgtcagcagcgtggaggagaccattccgccgatcatcggcacagcgatgcgctgcatgatttcggatccggtacccgaactccacatgatgggcaggaggccggccatgatggcaaccaccgtcatcatcttgggccggacccgctcgacggcgccttgcatgatggcgtcgtaaagatcgcttcgcgtcagcgcgcgaccttccgcctttatccgctcgctcgtttccgccaacgcgtggtcgagatagatcagcatcaccacgccggtctcggcggcgacgccggcgagtgcgatgaaccctaccgcgacggcgaccgacatgttgaagccgagccaccacatcatccagaggccgccgaccagcgcgaagggcagcgagagcatgacgatcaaggtctccgtaatcgacctgaagttcaggtagagcagcaggaagatgatcgtgagcgtgaccggtaccacgatcttcagacgcgcagcggcgcgctgcaggtactcgtactggccgctccagacgacatagtaacccgccggaaactgtatgctctcgctgaccgctcgctgtgcgtcggcgacgtagctcccgatgtccctgtcccggatgtcgacatagatgtaggtcgcgagctgtccgttctcggtacggatcgaagtcggcccgcgggcgggttcgaccttcgccacttcgccaagcggaacggcgccgccggccggcatcggcaccaggatatcgctcgtgatggccttgggattgtcccggagatcgcgcgggtagcgcatgttcaccgtgaaccgctgccggccctcgacggtcgtggtgaccgtctgacctcccaatgcggccgcgatggtgtcctggacgtcctggatcaggacgccgtaacgggcgagcgcctcccggtccggagcgatctcgagatagtacccgccgatgccccgctcggcataggccgatgatgtaccggggactgtcttgatgacccgttcgatctgctttgccaaccgatcgatctccacgagatccgtgcccatgaccttgatgccgatcggcgtgcggatgcctgtcgacagcatgtcgatgcgtgccttgatcggcatggtccaagcattggagacgcccggaaattgcagcgccttgtccatctccgcgatcaaagtgtcgatcgtcattccgggacgccattgcgctttcggcttgaggttgacgaccgtttcgaacatttcggtcggggccggatcggtggcggtcgcggcccgccccgccttgccgtagacggaagcgacctccgggaaggatttgataatgcgatcctgcatctgcatcagttccgccgccttggtcaccgagatgccgggcagggtcgtgggcatatagagcagcgtgccctcgttcagcgtcggcatgaactcggttccaagctgtcgggccggccagatcgtgaccgcgaggaccgtcacggaggcgaggatgactagggtctttgcgcgcagcacccccttgatgacggggcgatatacccagatcaggaagcgattaatgaaattcttgtgttcgggaacgatcttcccgcgcacgaagaccaccatcagcgccgggaccaacgtcaccgaaagcagagctgcggcggccatcgcgaaggtcttcgtgtacgccagcgggctgaacagccgcccctcctgcgattccagcgtgaagatcggcatgaacgaaacggtgatgatcaagaggctgaagaacaatgcggggcccacttcggaggccgcctcgatcaggatttgaacgcgcgattgccccggcttcgcccgctccaggtgcttgtgcgcgttctcgatcatgacgnnnnnnnnnncccctcgccgttcaattcggcgataccccgtctttcgtccgggccgagctcgactcgcgcgacgtcacgcagcaacacgggcgtgccgttgttcgtcttcagcacgatgttgccgagatcgttgatgctcttgatgtagcccctgccccggatcacgtactcgaactccgcgagttcgaccgtccggccgccgacgtccgcgttcgatgcgcggatggcgtcccggatcttctgcatgctgattccgcggtcgcgcatgcgctgcgggtcaaggaccacgttgtactgtttgacgaaaccgccgatgctcgcgacctcggccactccttcggccttggccagcgcgaatctcagattccagtcctggatcgtgcgcgtgtccgccagattcaattccttcgagatgacggcgtattggtagacccagccgacgcccgtggcatccggcccgatgctcggcgtgacgcccgccggcaacctggacgtcgcgctattcaggaattccatgacgcgcgagcgggcccagtagatgtcggttccgtcttcgaagatcacgtacacgaaggacacgccgaagaacgagaaaccgcgcaccaccttggatttcggcacggtcagcatggccgtcgtcaagggatatgtaacttggtcctcgatcacctgcggcgcctggccgggatattccgtgtagacgatgacctgcgtgtcggagagatccggaatcgcatcgagtggcagatgcactagtgcgtagaggccagcggcggccgcaaaaccggtgccgaacagcaccagcagtagattgcgtgcggaccaggcgatgatgcgagcgatcatttgtgctctcccgtcgagtgggcggcgccggtgacggaaggattgggcgcagcctccgcgaagcctttgagcgccgccttcaggttgctttcggcatcgatcaagaaattggccgcggtgaccaccgcctcgccatccgcaaggccctcccgcacctcgatgtaaccgccgccgcgccggccaagcttgacttcgcgcggctcgtagcgtccttcgcccttgtcgacgagaacggcctgccggctgccagtgtcgagcaccgaactgtcagggaccgccaattcggatttggagtccgcggtgtcgatgtctgcatcgacgtacatatccggcagcagcgccacatccgggttggcgagttcgattcggacacgcgccgtccgagtttcgcggttaacctgcggatagacgacggcgatcctgccgctgaaggtgcgagtcggatagctgcgggcgcgaaccgtgaccggctgacccactgcgatgttgccaagatcgcgttcggcgacgtcgaccagggcccagaccaccgagatatcggcaatccggaacagtacgtcgcccggattggctctcatgccttcgatggcgttgcgttcaagcacgattccgtcgcgcggcgccgaccattgcacggtgacgggcgcgacgtgggacttctccatgtccgcgatgacctgctcgggaacgtcgagattgatcagccgctgccgcgagccgcggccgtaggcctcaatcccgccggtggtcttggaagtgatcgtcgagaaatactccgcggcggcggacgccacagccgaactgtagatctgcatcagcggctggcctgccttcacgcgcgtaccggtggtcacgtcggcgaccttctgcacgaagcttacggcgcgcattgcgatgaccgagacgcggcgttcatccagttggatcgtaccgggcgacttgaccaagatccggatcgaacggcgctcgacgggctcggacttcacgcccgtcctctggatcttgccgggcgagagcttgaccgacccgtcctcctgatcgtccccttcgtagacgggaacgtagtccatccccatcgggtccttcttggggaccggcgaggtatccggcaggcccatcggattgcgatagtacaggatcctgcgggaggaatccgcctgttgccgcttcggcttcgcggactcggtcgagggctcgtcctcatcgtagaccggcaggtaatcgcgtccctgctgatcctttttcggaacggccgaccagaggggggccccagcggggtcgcggtagtacagcggtgtcttgtccgcggccgcggcagcgtcggtcaagcgggcgtgaacgggccagaaagatcgttccaccgaccagtagccggtcagtccgattccggcgccgagcgcgatgattgtaagcaagcgcgaggtgttcatggtgtgcaccagggcgcgccctacagcgcgcatatatgggtttgagaatgccgggcgttccctgagaacgcccgcaggctcacttgttagccttgacgatgaccttgccgttgatggtctcagactcgccctggacctttgcggagagcgtgacctgatagcgacccgccatcggaagatccgtcttgaaggcgtacacgccggactcgctggacggcagcggagccaccggggattccatttcggccattccgtcgggcgccatgtccacgcgcgtcctgaagatcacggcgtcggagaccggtttcccggtcgtcttgttggtcaagcggaccgcgacggtgacgtcgtcgcccttcttcatctccgcattgacgggctcgaacacgtagtcgcctgcccccgccgacgcagccgtggcgacgagagtgacgacgacggtcagtgcggcagcactgctgaatttggaagtcatgattttctcctcgatgggtctgtctcgaccgcggctccgaaggagcacacacggcagtcgtcatcgcgcgcgggcacgtgctacgcgcgtcgaaccgggtgagatcagacccgaggaggtcggaagggagggctcgctccgcgcacgggaacgaactggtccgcagggatggcgactttgctctcggctgcgggcacgaagcggaagccgatgcttcggacgtcgcccagcgcgacgaatccgcccgcgcagcagaaacccatgctgcagttatggccggcggcgtgaaagggggcgccgttcatgtcgtccgggcaacagtccatcgacatgtcggccgaggtgcccatctgcattccggactgcgcatcgtcggccatcacgccgaagccggccgcggacgcgccgaccggcaacaacgccaaggaggcggcgatcgcgaatgccagaatggtacggacgagccgcatcgcgctttgtctacctatacttgtcccgcttaccgcaccggtccggcgcggtagcagtttccttccataacatagtcctgctccgagcggcgtctttgatcctcgtcaagcattcgtgaccgccttcttcacctgtccgcccgcccgaccacttccatcagttccgcgatcttgcgccgctggtcggccttatccccgctacgaatagcgtgttccacgcaatgggccacgtgatccttgaggatttcttcctcgacgcggcggagcgcgactctgaccgccgaaatctgcgtgacgatgtcgatgcagtaccggtcctcgtccaccatcttcgcgagtccgcggacttggccttcgatgcggttcaggcgtttctgagaggaagccttgatgtcggtcctcatgggccgtatatacccccctagggtaccttccgcaagagatggagcacataatgtctaaggatgccccaaattccgaaaaggcgcgcggaagctgctgcgaacactctcactccacctcgcgcgagccccacgttcaccatgaccatggctccgggcacggcaccgcggtcgaccccgtctgcggaatgaccgtggatccggcgacggcctcccataaggtcgagcatggcggccggaccttctatttctgctctgatcgttgcaggaccaaattcgcggaagcgccggcaaaatacgttcacggcaaggtgcagcatgaaccccgagccgacgtacccgaaggtacggtctacacctgtccaatgcatccgcagatccggcagatcgggcctggcaattgtccgatatgcggcatggcgctcgaaccggaattcgcaacagcggacgcgggaccaaatcccgagttggtcgatatgacccgccgattttgggtgggtctcgcgctctccgtcccggtcgtgatcctcgagatgggcgctcacttggtcggagctcatcgctggattgatcaggcgttctcgaactggatccagctggctcttgcgacacccgtggtgctttgggccggctggccgttcttcgtccgcggttggcagtcggtgctgacgcgcaatctgaacatgttcaccctgatcgcgatgggtaccggcgtcgcctggatctacagcgtcgtcgcgacggttctgccagccgcgtttccttccactttccgcggccacgacggcgcggtcgcggtctacttcgaggcggctgccgtcatcacggtcctggtgcttctggggcaggtgctcgaattgcgcgcgcgcgaggcgacctccggggcgatcaaggcactgctggatctcgcgccgaaaaccgcgcgacgcatccgtgcggacggcgccgacgaggaggtgcagatcgcggtgctgcagccgcaggaccgcctgcgcgtccgtcccggcgaaaaagtacccgtggacggcgagatcatcgagggtcgctcgacgagtcgatggtcaccggagagtccatgccggtcagtaaggaggtcggcagcaaggtcatcgcaggcaccctgaaccggtccggcggcttcgtcatgcgtgccgagaaggtcggtagcgacacgatgctgtcccagatcgtgcaaatggtcgcgcaggcgcagcggtcccgcgctcccatccagcgcctcgccgaccaggtcgcggggtggttcgttccggcggtcatcgtggtcgcgatcgcagctttcgccgcctgggctgtttacgggcccgagccgcgcttcgctttcgggctggtggcggcggtcagcgttctcatcatcgcctgcccgtgcgcgctcggcctcgcgacgccgatgtcgatcatggtgggcgtcggacgcggagcacatgcgggcgtgctcatcaagaacgccgaggcgcttgagcgcatggagagagtcgatacgctcgtagtcgacaagaccggcacactgacggaaggcaagcccaaggtcgtcgcggtagtcccgacgaacgggtactcggagtcggacgtgcttcggctcgccgccagcgtcgagcgcgccnnnnnnnnnnattggcggatgcgatcgttaatgcagccagggagcgcgatatactgactaccgacgtgcaggacttcgactcgccggtcggcaagggcgcgctcggaaccgtcgagggcaagaaggtgctcctcgggaacgcgacgttcctgagctcggaaggcgtcgatacgtcctccctcgaatccgaagccgaacgtcagcggggcgaaggcgcgaccgtcatcaacatggcggtcgacggcacgctcgtcggcatcttggccatcgccgacccggtgaagcagtccacgcccgaggcgctgcgcgagctcgccgccgaaggggtcagggtgatcatgctgacgggcgacaaccgtacgacggcccgggccgtcgctcggaggcttggtatcgcggacgtcgaagccgaggttctgcccgaccagaagagtgcggtcgtcgcgaagctacacgagcaaggtcgaatagtcgcgatggctggcgatggcgtcaatgacgcgccggcgttggcggccgccgaagtcggtatcgcgatggggaccggaacggacgtagcgatggagagtgccggtgtgacgctactcaagggggatctcacgggtatcgtacgggcgcggcgactgtcgcgcgcaacgatgcgcaacatccgccagaacttgttctttgccttcgcctacaacgcggccggcattccgatcgccgccgggctgctctacccgaccttcggcttgttgctgtcgccgatcgtcgccgcggccgcaatggcgctgtcgtccgtcagcgtggtcggcaacgcgctgcggctacgaacagtgcggtctgacgcgcgcgaaatcgccggccatcgtcgctggccatcggaattcgcgtcaaggcgacgatgtgatcgacgaatcggcagcccgcttcgcgtttccatcggggacgccgtgcgcgagcaacctggactccgaaaggcttccaagaagctcgaccttggcgtcgttgagcgctccgcaggctgcctgtacggctttgacggcttcgagttgatcgccgaggtgcacgtaccagacttcctgtgcgtgcttcccatcgcggacttcgggccaggtcacgaggatcgtgtagccggccgccgctatctcgaaatcgcgaatgtcgggtccggattgctctgacgacatctgctgttctccccaaagcaacaatcgtttgtaaagctggaccacccccagaggttcctgagctcccacacggctcttgccgctgcagccctccggtccgcgcggtgtcgctacctatagagctttggctgtgcgcgtcgcacctgccggagggtcaatagatcggctatccggattatcgtgttggaaacgtggtgatccagcggtcgtgcaactcggattgtcgtctggtattctctgacgtggcgcagccgccttctcccgcttcgtgtgctcgaggatctagttatgccaaagccggttcaaattgacgccgacctgtacgcacgcgcggccgcagcggcatcgcgcgaaggaaaacaggttgagacttacataaatgagctaatccgattgcagatcacagatgtggagagaatgcaccagattgttagggcgctcgatgagatagcaatcgaagacgatgccaagggggcgtgattctcggcggaaatctacacggttaaacggatcaggctcgtgagcactccaacacgacagtccggatagccaatagatcttcggcggttgcgagaacctgatgccgtggcagtagccgcgccggacgccgtgacgtcgtacacacgcgccgttcagagcaggcgcgcgatcgcctgaatgcccttcattcctgtcccgaaccgggcgatcgcttccttgttgcactccagttcaccgtaaggcaagaaacgcaccttgaggtccgctacgcgactgaaggcggggtcgacgaagctggctgcgcacctcgtcctccctgccgtccggagcgaccagaaacagtccgcccgtcgcgtgcaaatcgctgctcagcgcgagatcgagcatacgaacgatgccggagtagatcgacgtcgtgtgctcgacctcgaaagccgcggcaacacaatcgctcgcggagtctatccaaaggacgtcgatgagccggatcgattctgcgccggcggcgttttcgatggatgagggtagacggtcgaggcagccggccgccaacatcgcaccgttatacgggcgtcctcgatcgttcgaagcgatccagatccgatagccgagcgccaagcccaagtcgcggagccaagcttggacttccgtatgggtaagatcgttctcgcgcgcggcagcgatgggaccttcgagccgtttcgcggtctctcgcgccttcgagagctcggatagccacgcgtctcttgcggtgtcgccactgccgacgggaggcgcactgaagcgtccggtaccgacatcgaacagaaatcctgcgattgcgccgagatcgttggagaggagatcgcgatagctgcggttcagctccaggatgccccgtcgcatcccaagatactgatcccagcgaccgagtttcaccttggcgcccgtgatcgcattgaagccgttgacgatcgctgtattgaacggcggcatcagggtcgggtgcaggaagtacaggagattggcgacagcgggcccgagacccttgatggacaggcgatcgatggactcgattccttcgaccagctcctgctcggtgctgcagcaggaacagtgatgcaggagtctgccgaacgctcgctgattctcgggattctcgtaaatgtcggggatccgaagcttcggcttccacaggaaggcgtgatcggcacctttgaagatctgcctctgctccgcgatcgatcccacgatcgtttcgagggaagagcccttgtagacgttgccgaacgttcctgcttcgatctcctcgactacctgagcaatgccgcgacgaatggaccggaaattcttgagccgctcgtcccacaagaaccatgtgcgataggtcgatcctgagtcctcgcgccatcgttcaatcaacacgcgcagcagatcagtcaaactcagcctcccctcatcatgtgcatttcccgcccagattttggcacacgtcaacgcgccgtgcgacggctggggtcgcgaatattacagccaggcaccggaatctcactctgccagatcgtcatcaaaccggaacaaaggccccgcgcgactgttgcgtgacaaacaaccggttggagcggccgtgattgccctgccttacgactatttcctgattgcgtggtttgcaatcgcgctgatctcgacggcctatgtggcctatgaccagttcgctggcaatcctgagccgaccgtgatgaagtgggctttcatcctggtcacgctgtacatgggaccagtgggtctcctgctctacgtgcttgccgacaaagagccgcggcctggagagcacgagcggttcacctccccactttggaagcagggggtcggcagcaccatccactgcgtcgccggagacgctaccggcatcatcctggctgcggcgacgaccgccctgcttgggttaccgatgtggatcgatctcgtcgtagaatacctagcgggattctcgtttggtctcctaatattccagtccctcttcatgatgcgcatgatgggcggctcgtattggcagaacgtcaagatgagcttcatgccggaattcatcagcatgaacgccatgatggccggaatggccccgacaatgagcctcctgatgatggggcgtgacatgcgggcgatggacccccttgaactggtgttctggggcgtgatgtcgttgggggtgatggtcggattcaccgcggcctatccgttcaacgtgtggatggtcggtgccggcatcaaacacggactgatgacggaaaggcgcaccggaagctcgcaagccagcgagcacgacaaaaaggggcagcggcacgcgagccatggcggcggtaatggacacggtggcgggcacgggatgaagagccaggcgacggggcctcagcttgctgccatggctggcgtcacgggttttatactcatgaccggcatgatctggcctggcttttacgtcaatctgcggctcagtgcgcgggacgtcgagggagcgatcatgccgccaggcatgatcaatacgttcgatcttccgggcgccgcgatgcgggaaatggcagcggtgaagccgcgacaggttagctatgtagcgccgattaccgcacgcggcgaccaagtgctgcagccgcgcgtcgaaggtggcgtgaaggttttcgagatcgaagtgtccgcaatccgctggaatatactaccagacgtgagcgttgacgcttacgcatacaatcgtcaaattcccggtccgcgcctggtattgaccgaaggcgatcatgtcaggatcaactttcacaacgccctgcccgagagcacgaccgttcattggcacggattgatcgtgcccaacgagatggatggcccggcaaaggtgacgcaacagccgattccgcccggtggttcctacacctacgagtatacggtcggacagcacgggacgtacttctaccacagccatgaccatcccgaccgtcagcaggcgctgggcctatacggcgcgctgatcatcgcgccgaaggatccggcggcggaattgaacgccgatctcgactacacgattcagctccaggaatggctgaaacgcgagtggcttacctatcccgcgatgctgatggagggcgccctccccaattacttcaccatcaacgggaaagccttccccgcgacagacgtcgtgccgatgaaggtgtggcaggccataaagctgtggttcattgggacccacaacaatttcgttcatccgatgcacgtgcacggcgggcctttcgaggtcgtcgcggtggacggcatcactctcgccgaacgcgcacgctatcaggcggatacagtcaacgtgggcccgggacaaagatacgacgtgatctggaccgctcgcaaacccgggaaatggctggtgcattgccatattccacaccacacggccaacaacaacgtcgagcaagacggcggaggcggactgatgttggtcctgaacgttcaatgatcagcggtagaatcggcttgtcttagcggatgagctctccccgaccacacatcgacgacggatcgaatccgttaggcgcggcaaacgatttcgctccagccggttagcgattcgagcccccgtcgaactgctgaagttcgccgagatcgctcaattgccgacctccctgttctcaagccagcgtcgttgacgccgaggggcgcttgccaccgctgcagcaagcgccgaagcgcgcgtcaaccagggctcttcttccgtaccccttcgcccgacgtctcgcttggaaacatgaactctatgcctgccttctcgaaggcgtccctgatcgctttcagggccttcctgcggcgaagatccttcagagagaaatcggtctccccctccagcttcgaaatcgtcctttgtttcaggccggcccgttcggccacctcggcctgatcgagacccagcaggcctcttgccgcgcggatgagcgcaggcgtcagcatctcgtccgtctccgttgtcatccgcccgattcgccccttcagttccagttaaggttaacacagagatcgggctacggcagcacgaatgttgttgccagttcgggcttttatgctatggtagcacgaattcaacggagctatcgatgcactacgcaagttacatgggaagcgacgcatggcggcggaatcccgcgcgcctgaaggcgctgtccgacgccgatggacactgccgcctgtgccacgctgacggaagtctggaagttcatcactcgacctacaagcgtctcggacgcgaacgcgacaatgatctgatcgcgctgtgctccgactgccatcgcgacgtgacgagcatcctgcgcgagcgtcgttatgcggcggtcaagccgaagcgcgcggacgtcgagcgccttcacgacgcccgcattctcctcggcgatccgaccgcgggaggctactgatgcagcgcgagaccatccgtttccgcatcgtcggcaccaaacgcctgctgatgcactgcgggcgtctggcggatccgctcgatccgatcacgcaggatctggcgcggctcacctcgaagaggccgaagacgatcgccgaccacaagatgatcagcaaggtggagtggttcggaagcctctggctgcatgacggagcgccttgccttccggccgaagcgctcctggcgtgcgcgatcggcggtgcgaaggtgctgaagcgcggcccccaggccgccgccggcctcgcgatcgaggaggatgccgtcctcgtctacgacggccccaccgacgtcgacgagctttgggagaacggcgacttcctcttccgctgcggagtgaaggtcggagcgaacgcgaagaccatgcgcacccgcccgtgcttcaaggattggtccgccgaattcacggcgagctaccttccctccgtcatcgaccgcgagcacgtgatccaggcgctcgcgcaggcgggtgtgcggcgcggcctgggcgactggcggccgcagaacggcacgttcgaagtgaagcagatagaatagcgagctcccgtgctggggcgtggtccggtgaggcatggcacggcccggtctggcgaggtgaggtaggggtgaaacgacggcgctggtcgtcgtttccaggccgtggagacgtcggctgaaccgacgtctccacaatctccaacagatgaagcttcggccgcgcgacagcttccgcgcgacggcggagcattgtcgttacgaggcagaaagagatgaagacccacaagaccaagaaggctcccgtcggacgcggtcgccggcgatgcgagccgccaccgattggacccctgttgtggtggcgcaccattcgcgcggaccacttcaacgtggccgccgccggggccctgcgcgcttccatcgcaaacgtgttcatcccgggtgagccgacgtggcgcgacgccgccgacggcgacgaagccgccgcggttggcctagcgcttcgactccacaagggcacgagcccggtcacgtacgatctcgtcatgacggcgctcgccgcctgcgccgccgaggatggcgcggccgcgtgccttgccatggcgcacatgctgcgcggattcccgggtgccgggcgggcagaggcgcgaatcgcaacgagctggctcgtgcgcagcttcatgaagaccacgtcctccgaagaagagacggggagcggtcgatgatcgcgcaaatcatgtccgacctgcacctcggccccggttcggaagctcccccgccgctcgtcgacggcgtcgagctcgtcgtggttgccggcgacacctgcgaagggctggtcaaagccgtcgagtcgctccgagccgcataccccgacgtggacatcgcgatggtggcgggaaatcacgagttttacggccgtgtcttcaaagaggagctcgaagccgggcggaagcgtgcccaagagctcggagtgcatctgctggaaaacgacaccgcgactttcggtcgtctccgcatcgtcggtgcgacgctctggaccgactaccggttgttcggtccggacctgcagcaggcggcgatgcgcgccgcctacgatcagatgcgcgaccacaaaaggatccgctggaaccgcgagccgtggcaacgattccgcccgcaggaagcgctgtccttgcacgcgcgcacgcggaatttcttagaggccgaattggcgcgacgtcatgatggtccgacgatgctgctcgcccaccatggaacgacttgggaggccctcgatccgatcaacgagcgctccctcctcgcggccgcgtacgtttccgacctccggttgacagcgagcgccgatttcgtcgtcaccgggcacactcaccggcccatgaattttcggcgagagcgtacgcacttcatctccaatccgcgcggctaccgcgacgaaggcgtgcggttcgacccttctctcgttatcgagatcctgccgtgacccagccgatctacacagctctcgagagctttcccgatcatccaccttccggaagccgagcttctggcgatcgtcgccagcgcgccgtcgaggccgacgacgtaccgacgtccgccatgggcgccctggaactggagacctaccggaagtgctggctcgcctcgtcccgcttccgccgccacaacacggaagtcgccgccgaacgcgaacgtgagcgcgcgatcggcttggcagaaaaggaagcccgcgccgcgatcgagaaggcgatgcgaacaggcaagggtttcccgcgctctgcgtcgaggagcgggcattcgtcatcgtctcgaagctcgatcgaggacgtcgacgacgatcaggacgagtccctgcggcgaatctccgacgccgagcgctatcctcccaacgggggcttggtagcggcgcgtctcttgttctcccggatattcgaccgccggcccgcgctgcttgatgcgctacgcagcggcgctcccgccatcctcatcgacgtcggcgacgccctgatgctcgatcgcgtcgcaatggtctggcggagcatcctcttcgaaagcacgacacggttcatggatctcgctcgggaccccgtgaagcgtcgcgaggatctggatgccttgtacctggtcgtcaaagagcctccgaaaagcacatccaaaatctccctcgacacgacggcgctgtcgatgctggcgttcgcgctcccgctcatcgcaatctcgcccctggcccggtcgcatcttcccgaagccgtgaacgcggcggccaccgatcgcatcgactttcctccgctggatgcaacaacgatcgtgcgaacgatccgcatcgtcacgggcaagacttgcccgcaagcgatcgcggatggaaccttgacccatacgtccatcgccgacctcgatatcgcggtgcgcttcgaccgcactccgcaggaatgcctggcagaacttcgtcgcctgaacgtggcgaagatcgcgaagaagaaatcgcgcgaactgacgctttcccaactgcacggcctcggcgaagcacgcgaatgggcggaagaggccatctcggatatcgaggcctggaaacgcggcgaaatttcctggagcgccgttccgtccggcgtggcgctcaacggacccgccggctgcggtaaaaccaccttcgccgccgtttttgcggcgtccgccggactgaacttcgtcagtgccactttggccaagtggcagtccagcggcgaggcgcatctcggtcatctcttgcgcgcgatgcgtcaggatttcgaagccgctcgtgcgcgggccccctcgtgcctcttcatcgacgagatcgacagcttcccggaccgggccggggtcacccattcgcatcgcgactatgtcatcgaggtcgtaaatgcgctccttgcggagatcgacggaatcgccggtcgagagggcgtcgtgatcatgggcgcgagcaacgacatcggacgttgcgatccggctctcctgcgcgcgggtcgcctggagcgaatcgtccagatcggtcttccggatatccccgaattggaaaagatgttccgggtacgtctgggcgcggatctcgtcgacgaggatattttgcccatcgccgaactcgccgccgggatgacgggagccgacgtcgagcgtgtggtcaaggacgcgcgccgcgcagcgcgcagggatggtggtcgctcgcttgttttcgacgatctgcagaaggcgttggtcgaagacgacgaccggccccatgagctgcgttggcgcacctgtgtccacgaagcagcgcacatcctggtcgacgtcatccatttcggtcctcagaacgtgttcgccagggtcgccaagatgcaagggcgcttcggcatgtccgcgcgccgcaacaacggctattcgagcggcacgactgaggagtatcggaagcggctcgaggtaattcttgccggacgcaccgctgagcagttgatctgcggttcggcctcgcacggtgccggcggagtgcccggctcggacctggacagcgccaccggcctcgcatgcgcgatggtgggaagctttggcttggccggcccgaccccactcacctatctaggaccggcacgcgatgccggcacgttcctcgccttcgccgaaatccggacagcggtgaaccacgaactatccgaggcggctcgttcgtgtgccctcctattgaaggagaatcgttccgtgctcgaggcgatcgcccggcgattggcggcacacgggcgcatcgatggtgctcaggtcgcgacgttgctcgccgaggcacgccgcgacggccttccctcagggcggggcggcgcggagccgtgagtgcaacacagatgacggtagctgccgctcgaatccccgcggacgcggccgatcccgaacgcttggccgaactcctggagtcgaccggcgattatcgcgttctgcgtcgaatgcggccgccctcgtttccagccccgaacggctgccctacgaagcgcgcgatcttcgtcgacgtcgagacgaccggtctcgacaaggtgaaggattcggtcatcgagctcgccatgctgccgttcgattatactatcgacgggaccatcgtgggcgtcggggagccattcagctccctgcaggatccggggtttccccttccggcggagattacggcccttaccggaatcacggacgaaatggtgcacggcgccagtatcgatccgagcgaggtgactgccttcgcaaaccaggcggtcctggccatttcccacaatgcaggcttcgatcgcccgttttgcgaacgcgaatggcccgtgtttgcggcgaagccatgggcctgttcgcttcacgaggtcgattggtccgcggaaggcttctcaggcaagaagctgtcccaaatcgcgaccggctatggatttttcttcgacgcccaccgcgccctcgacgattgtcgcgccggtgtcgatatcctggctcggcgtctccctcggagcggtcgaacagggctggccgccttgctggaatcagcgcgtgcagcccgatggcgagtgtgggcggagggcgcgccgtatacgtctcgcgacattctgaaagcgcgccgctaccgctggagttcgggcgacgacggtggccgtcgagcgtggtatctggaagtcggggaagacacgcttgaaggggaactagagtacctccgtcgcgaaatctatggccgtgaggccgtggagatcgctcgccaccggtttactgcctttgaccggtattcgatccgcgggtgaatgcattacttagatctcgtggcgctatccagatcggagacaacaaatttcgcaggaagacataacccagactgttgctcgatgattagtgcagcgcgttcataacggtctggttgcaggttcgagtcctgccgagcccac

SEQ ID NO: 240 - DNA, 1904 bp, Bradyrhizobium colbertium
agcggcatgcggtcaacatcacggggcgcagcaacgaggctttgctgatcaacggccagctgccgggtcccgttcttcgcttcaaagaaggcgagaacgtggtgatcaacgtcaccaatcgtctcgacgagaatgcctccattcactggcatggcttgattgtgccgccgggaatggacggagtgccgggcatttcaccagggtacggcgacggcataccgcccggccagaccttcacctaccgcttcaagctcaagcaatccgggacctattggtaccacagccactcgtccggcgagcaggagcaactgggtatctatggcccaatgattgtagagccacgcgcagcggatcctttccgttacgaccgcgactacattatcatgctctcggattggagtgatgaagccaagagtatcattaataatctcaaggcggatgccagttggtataatttcaacaggcgcaccttgatcagtctggtccaggaactgagcaaggcaccatccgaagaagcgcgccgcgccatcatcaacgatcgcattgcctggtcgttaatgcggatggaccctacagatatctcggacgtgtccgcttatacattcctcgtcaacgggcagacgccagaacagaactttaccgctctgttcagaccgggcgagcgcattcgattgcgcttcatcaacggctcggcgatgacctatttcgatgttcgcattcccggactgaagatgaaggtggtccaggcggatggcaacaatgttcagccggtggtggtcgacgaatttcgcttcggcaacgccgagacctacgatgtgatcgtgcaacctacggaggaccgagcctacacgatcgtcgcagagccgatggaccgcacgggctttgcgcgcgcgaccttggcgccgcggccgggaatggtgggcgaactgcccgcgcaccggttacgacctctcgcctcgatggcggagatgggcatgaacctcgggccgaagggcggcgaccgtggcaccccgcatccggagcaggatatgccaggtcatgtcgtgcccgaagatccggtcgccatggcaatcggcatgggcgacatggggggaatgtcggatcggggcggtaccggcgatatgtccggaatgcagcctggcggcgccggggcgaagcggggaatgtccggcatgtccatgggtccgaaggactccaagcagagcacgaaacccgccaagcgcggcaagccctcgggcatgccggggatgaagcacgaaagcatgccgggaatgagcaacgctgcgccggaccggtcggatgctctggcgcagatgaaggatatgccaggtcattcctccatgtcgggaatgggcggcggagaccggaagggtcaggttgcgccggccgacagcggagttcaacaggggccgcaggcctatgtcctgcgtggcggagaggacatggagagtgtcggcgtcaaggttggacatggagcgcccgacccattcctcaacgacacgggcgcacctccggggacgaaggttctatcctatcgggacctcaaggccctcaatccctacccgtataagccctacgatcggatcatcgagatgcggctgaccggcaacatgcagagatacttctggtcgatcaacggcagaaaattcagcgaagcggagcccatcgtactccggtacggagaacgcgcccgattccgcctcatcaacgagacgatgatgaaccatccgatgcacatccacggcacttggcttttgccagatgtcggaaacggcgcccgcaacccgaagaagcacaccgtcaacgtgaagccaggagctacggttgacgtggacgttcccgcggatgctgaaggaccatgggcattccattgtcaccagctctatcacatggaaaccggcatg

SEQ ID NO: 241 - DNA, 5380 bp, Bradyrhizobium colbertium
ggaagcagccggtccatcccattagcggacgtcggcttcgcgattggcgccggcaccgatgtcgcgatggagagcgccgacgtggtgctcatgaagagcgacccctatgacattgttggcgccatcgagctctcccgcgccaccctgcgtaagatgcaccagaacctgctctgggcggtggcctacaacgtggtggcgtttcccatggcggccggcgtcctctatcccttggtcatcagccccgaggtcgctgcgctcgctatgtcgggcagctcggcattggtggcgatcaatgccctgctcctgaaacgggcgcggctcgaaggcattcacagaccacatcctcaggccgttgttaagggatgacggagccgccacgttttgtcgtcgccccaacgatcttcgctgtcgcgcactgaggatttgaggcgtgagctataaaccgtacgtcgaatcgaaaatcagacagttgggttgatctgcaatgcatcgaacggattagtgtagtagcctcatttggcgcccgttctcttgcagttgcttgatccaaatcaaccctttcggagcacgccgtgatctagttgcgctatcgaacgcccctagcgcatagcacgttggtcggcgcagagcgcgcaaacccaggaggacatatcgtgcgccaagcagcagccatttccgccgcaatagcaattggcctcgtgagtttctcgatccctgcagctgccgagccacttacatcgacgcgaagcgagtggctggacaagctcgatcgggaacatagacagcttgtttctccgtcgggacacgtgcatgcaagggggcaggtccaggctgtcgatatgggccccggtgcggcttcggtcaccatcctgaccgaggcgatggaaagccctgatcgcagcattaggatgccggcaatggaaatgcccttccacgtcacgaaccgtcgcatgctgaaagggttgcgaccgggagatttagtggaatttgaggccgcccggctgaagaatgctctgatggtcacgaacatccgcaaagcgcgctagtgcctctcgggaatttacccattcgagatctggcgtacgctagtgtcccaggccgtgtgaaaatcccgcaacttggggcgctccggcgcatttcatggccgccgagcttctaattcggtggaatggacctcgtgtcgtctcagtggcaatcgggagcttcatgtaggcgctgatttggtcgcgcagaggctggcctcacgcctgcatcgcctccagcaatccgcctacgccgacgatcatcatcacgcgcttcatgttgtaggcgagcacggtgagcgccatctcggtggccacctttggcagctttttcgtgagaaagtgtgttgctcccatccaacacttcatcgtgccgaacggatgctccgctgtctgacggcggacacccatggcattggggttgtggtcgagccgatcctgaactttctccagaacggtctcgtgctcccagcgtgtgatgcggcgctcggggcctgtcgtgcactgcgcttttagcgcgcaggttttgcaggtgcttgtccaatagcggcgcagtgtctttccgtcctctacgttcgtatagtgataagttagccgctcgccggcgggacagcgataaacatcgtcggcggcgacatagacgaagttctgtttgccgaagcggccagcagctttagcgcccgaagtcatcggcttcggcaacgtcaccgtgatgtcggcttcctcgcaggccctgatctcctctccatcgtaatagccgcggtctgccacgacttcgagcgtctcgacagccatctcgtcgcgagcctgcccggccatattggcgagttggtggcgatcggtgcccacgttggtcacctcgtgagccacgatgagatgatgctgcgtatcaactgcaatctgcacgttatagccaacgatcccggtgtcctttccacttgtcgccatcgagcgcgcgtcaggatcggtcagcgagatctgcttgtcctcactcttcatcatctccgcattgatcgcgtttagccgaacgatctcctccttgagcttctcgatcttgcctttcaacctcgcaactttcgcctctggcactgcatcgccgtgccgatcggcggtctcgagctgcgagagataacgggcgatgctctcgtcgattcgctccagacggcgcttcatctttgcctcagtgaagttcttgtccctcgcattgacggccttgaacttcgatccatcgatggcgacgctcgctgcaacaagcagatcaagcttgcggcacagcgcgacgaactcgcggcagacctcacgaatggccttgccattgtctttgcggaaatctgcgatggtcttgaagtccggcgccaactgcccagtcagccagatcatctcgatactgcgttggcattcccgctccaggcgtcggctcgacggaacccgattaagatagccgtagatgtagagcttgagcatcgtaccggggtgatagctaggtcggccggtgtcgagcggctggacaccgacaaacccgagcttgtcgagatcgagaccgtcgacgaacacgtcgaccgctcgcaccgggttgtcctcagtcacatagtcgtcgagcgatgccggaaacagtgtgctctgcccgcgatccaatccttcaacaaagcgcttcatcagatgccccgcaaaatcgccgggaatcctatcgcgcgaatcacagcaaacagagccttttcacacggcctgggcctgaaccagaagttcgcggcatcgggtggtgttttgccggggcattgtatcggcagaagcgttcgatggaagcaaggatgtcacggcggacttggtccatcggaacggttttggatcggcgttgtgtcggtcgatgaacgaagtgatgtcagccctgagagcggcgacgctgcgatagatgccgcgcctgatcttcttatcggtcaggagcgcgaagaagcgctcgacctggttgagccatgacgaactggtcggggtcaggtgcacgtgccaacgcggccgtttgaccagccattttcggatcaagggggtcttgtgcgtggcgtaattgtccatgacgagatggacgtcgagttcacgcggcacggcagcctcgatctcgtcgaggaacttgcggaactcggcagcgcgatggcgtccgtagcacttgccgatgacccgtccgctcgcaatgtcgagggcggcgaacagcgatgtggtgccgtgccttgtgtagtcatggcttcttcgggccggttggccgggacgcattggcagcatcggctgactgcggtccagcgcctggatttgggatttctcattcacacatagaacgatggcgtgctccggcggcgagacgtaagcctcagattcgcgctcaaatgttgcatcaatgggatgagcgtgcgcgcgctgatacgcggcagatcggcaatgctggcgcagtttggcggctcagcgagatctgtcgacgcgatccgaatcccccgccgccgtccatccggcagcgcgacaacgatgtaggcgggaccgcgccccgatcgtcccttcaagacggcaagccgctgtccaaacagaaaatgatgcgggtcggtaatcgtgacgtgagacacgacccggtcaagaataggggtaccttgccgtgttcggtgatcccacctatgccgacgccgtgctcgatcgcctcgtccacaatgcccatcggctcgaccttactggcgagagcctgcgccgaacccggcaatccgcccgaaagacctgagcccgtgacgctgtggacatgccgctgcgcttggacaacgccaaggcgttgcccacatgcccacagcaaccgcaacagaaaacacaacaggttcaagccgcgattccagttgaccgcgcggctcgcctagtgccagagaaactaggcagccagaacgcctcgcccccgggggagatcaaatcggaaaggtgggcgacatcgtctcggaatccccgggcgacttcatatcggtacacccgggcgacttcgtcggaatccgcaatccttggcacagcgacgcgaatctactgcgaatctacgattgcgaacttgtgactcgggacactggaggaacatcgccagcaacgggtctacgatcgcctctaaggttcatccgccgactgctggctggactacttagcatttcggtgccgcccaactccgtgcgacgcggggtcgactgagcatctcgaccagcttcggactctcccggagccaagggaatgacgctcgaggcggacggacttcacaagggccgcaatagtcgccaccgaaatcatccgtgtgcatctgacaccggacactgccggcggtcggcgactcgccaacagctgcatgcctcgttcgaagacgatggcggcggcagtagtctcagggtgagcggcgcaatcgagaaagatgaagcggcaggccaagaaagtcctccagcgaacgcttcagcactgcagcgatcgataaaagctcttatccgcaaccttgccgcaatctgatcgtggtcctaccagaacagccgtacgccggcgacgaacgacacgttggataccgcttcgccgttgtttctggcaattgtcgccgtctggccgaccttgcgatcccaattgacgccgatatagggcgcaacgttgcgcgtgaactcgtagcgcaagcgtgcccccagctcgaaatcggtaattccagcgcctaattccaggtccgctaccggctgcgcctgcagcttgacatcgatacgcggctgcaggatcagccggttggtgatcaagagatcatggaaggcggtgatcgaagcggaaacctcgcccttttgactgatgtaggcgtccgcatcgatttcaatgaagccaggtgcgaggccctccacgccgatgacggcgtaggtccggctcgattttttggaaaagtcctgccgaacaccgaactgggcatcgaagtagtaggtcaagaggcgcgaatagaggacctgaaactggccctcctcgaggttcctggctttaccgttgtaaaaaccctcggacttgaagaacagcttgtcgtaatcggtgccgacgaacgcctccatgtcccagcgggcactagcgcccgtgtttggaccgccccattcgagcttgtcgaaacgcagggcgctgaaaggctgctgatcggggaagtttatgccggagggactgcgcaggtaccatggcgcagcttccgtgtatgatggagccgtttgagccccagcgggcgcgctgattgctgcgccggacaatacgattagtgcgatgcttgcgacgtgagggatacggttcatggagccctcctagcgagccgacgccgtctgccggacgacttcgatcttgcgcatcatgccggt

SEQ ID NO: 242 - DNA, 140828 bp, Bradyrhizobium colbertium
  misc_feature (34457)..(34590): n is a, c, g, or t
  misc_feature (36669)..(36678): n is a, c, g, or t
  misc_feature (83057)..(83066): n is a, c, g, or t
ggtgtccactcattcggaggaagttcacgcttgcgccggtccagctgcggaaggcgcgggagaagctcttctcgttgcggaagccggcgatctccgcgatgcgcttgatcggagtgcggccgcgcatcagctcctgcttggcgagctcgaacttcgcctcttccttgagatcgcgcagcgaggtggactcctcccggaggcggcggtgcatggtgcgggtggagagcgcgagctcgcttgcgacatcctcggcgccgaggacgcgtccgcgcgcatggcgcagcacgcggcggacacgctcgaccagcagccggtcgcggcggtagggcagcacggtcagccttagcgcgcccttgagcatgttgtcgagatcggccgcgctgcgcgtcagcggcagcgaaagatagtgcttgtcgaagacgattgccgcacggtccgcatcgaagcggacagtcctgcaaaatatggtcggatagaccgagacgtggctgggctcggcgaaggggaactcggccgcccggagcgcgatccgggagtcgacggcccagcacgagaagccgagtacgtagcgaagtagcgtgaccaggcagaactcgcggaaagacccgaggtcgcgcagctcacggatcgacacgattgcggtctctttgccaaccgcgagatcgagcaacacatcttcggtaacgagacggtggtgccggcaccagcgcttgagcgcgacctccagcgtcggcgcggtgatcgaggcccggcacaacatgccataggtgccccaaggcagccgccgcgagaaccagccgagcgcctcgtcgtcgagctcgcgcatggcatggtctgccagcgcctcgaactgggtggcggtgacccgcccatccggagaattgacgaggtctggcgcgacctgggcccggctcaatgcctccgcgggatcgaggccgtatcgctcataagcggcaaccacgccgcggacgaaggccgcgggggtcacggcgcggcgcgggattgcggtggcggcttgaaaaggcatcggagttcctttcgaaaatcctcgccaagtttggcggaaaatgcaaccttttcgaccgcaagagggccggcaccgggctaggttcggaccccaaaatagggaggaatcgccttgaacatcccgagcatcgacttcgatctgggcgaagacatcagcctgctgcgcgacacgctccgcgccttcgtcgaggcggagatcaccccgcgcgccgccgagatcgagaaagcaaacctgttccccgcggacctctggaagcgcttcggcgaccttgggctgctcggcatgaccgcgccggaccaatatggcggctccaacatgggctatctcgcccacatcgtcgccatggaggagatttcgcgcggctcggcggcggtggggctgtcctacggcgcccattcaaatctttgcgtcaaccagatccgccgcaacggcaacgatgcgcaacggcagcgttatctgcccaagctgatctcaggcgaatatgtcggcgcgctcgcgatgtccgagcccggggccggctccgacgtggtctccatgaaactgcgcgccgacaagcgcggcgaccgttatgtgctcaacggctccaagatgtggatcaccaacggcggcgacgccgacgtgctcgtggtctacgccaagaccgatccggaggccggcccgcgcggcatgacggcgttcctgatcgagaagggcttcaagggcttcatccacggccagcatctcgacaagctcggcatgcgcggctccaacacctatccgctgttcttcgacgaatgcgaggtgccggaggagaacgtgctcggcaaggtgggcgagggtgtcaaggtgctgatgtccggcctcgactatgagcgcgcggtgctctcaggcggccccctcgggatcatggcggcctgcatggacgcggtggttccctacatgcacgagcgcaagcagttcggccagccgatcggcgacttccagctgatgcagggcaagctcgccgacatgtattcgacctggcaagccacgcgcgcctatgtctatgcggttgggcgcgcttgcgatcgcgccgaccatgcgcgtaccttgcgcaaggatgcggcggccgcaatcctctattccgcggagaaggcgacatggatggccggcgaggcgattcaggcgctcggcggcgtcggctacaccaacgaattccctgtggggcgtctgtggcgggacgccaagctctacgagatcggcgccggcacctcggaggtccgccgcatgctgatcggccgcgagctgatggccgagacggcctaaacgtttcacttcattggaatcaccatgccgctccattccagcatcgatccgtcttcatcagactttgcgcgcaattccgaggccatgcgcgcgctcgtcgccgacttgcgcgagaagctcagccaggtcgccggcggcggcggcgaggtctcgcgcaaccgccacaccgcgcgtggcaagatgctggcgcgccagcgcgtcgatctgctggtcgacccgggaacgtcgttcctggagctgtcgccgctcgcggcctatggcctttatggtggcgatgtgcattcggcgagcgtcgtcaccggggtggggcgcattgcgggccgcgaatgcgtgatcgtcgccaacgacgccaccatcaagggcggcacttattatccgatgaccgtgaagaaacatctgcgcgcgcaggacgtcgcgcggcagaacaatcttccttgcgtctacatggtcgattccggcggcgccttcctgccgctgcaggacgagatctttcccgacgagcggcatttcggtcgcatcttctacaaccaggcgcagatgtcatcgcaaggcattccgcagatcgcgatcgtgatgggctcctgcaccgcgggcggcgcctatgtgccggcgatgtcggatgagagcatcatcgtccgcaatcaaggcaccatcttccttggcgggccgccgctggtgaaggctgcgaccggcgaggtcgtcagcgcggaggagcttggcggcgccgacgtgcattcgcgccagtccggggtgaccgaccactatgcccagaacgatgcccatgcgatcggcattgcgcggcgcatcgtcggcacgctgaagccacccgcgcggccgaacctcaacatgcatccgccccgcgagccgctgtttgcggcggaggaaatctatggcgtggtgccggtcgacggccgcaagccgttcgacgtgcgcgacatcatcgcgcgtgtggtcgatggctccgagttcgacgagttcaagaagctctatggcacgaccctggtgtgcggcttcgcccacatctggggttatccggtcggcatcatcgccaacaacggcatcctgttcagcgagagctcgctgaagggggcgcatttcatcgagctgtgctgccagcgtggcattccgctggtcttcttgcagaacatcaccggcttcatggtgggcaagaagtatgaggccggcggcatcgcccgcgacggcgccaagctggtgacggcggtcgcgacggcctcggtgcccaaattcacggtggtgatcggcggctcctacggcgcgggcaattacggcatgtgcggccgcgcctactcgccgcgcttcctctggatgtggccgaacgcgcgcatctctgtcatgggcggcgagcaggcctcgatgggctgagccaggtccgccgggacaatatcgaggccaagggcgacagctggtcgaaggaagaggaagacaaattccgcgagccgattcgggcgcaatatgagagccaggggcatccatattatgcgaccgcgcggctgtgggacgacggcgtgatcgatccggccgacacgcgcctcgtgctcggcctcggcctctcggcggcgtcgaatgcgccgatcgagccgacgaagttcggcctgttcaggatgtgatgcgatggacagctcaaagctctaccggcgttttcgcacgctcctgatcgccaaccggggcgagatcgcctgccgcgtcatccgcacggcgcgcgccatgggcctgcgcacggtcgcggtctattcggaggccgaccgcgacgcgatgcatgtcgcgctcgcggacgaggccgtgctgctcgggccggcacgcgcccgcgacagctatctcaacatcgatcggctgatcgaggccgcccgcaagaccggcgccgaggccgtgcatcccggctacggattcctctcggaaaatgccgggttcgcgcaggcctgccttgacgccgggctggtgttcgtcggcccgaccgccgggatgatgaatgcgatgggctcgaagtccggctcgaaagagctgatggagaaggccggcgtgccgctggtgcccggctatcacggcgaggcccaggacgaggcgacgcttgcgaaggccgcggacaggatcggcttccccatcctggtgaaagcctccgccggcggcggcggccggggcatgcgcatcgtccggtcggccgatgagcttgggcctgcggtcgtcagtgccaagcgcgaggccaaggccgcgttcggcgacgaccgcatgttgatcgagaaatatgtcgacaatccccggcacatcgaagtgcaggtcatcggcgatagccacggaaatctgctctcgctgttcgagcgcgaatgcacgttgcagcgccggcaccagaaggtgatcgaggaggcgccgtcaccgacgctgaacgccgcccagcgcgagaccgtctgcgccgccgcacgcaaggcagcgggtgccgtcaactatgtcggcgccggcacgatcgagttcgtctccgacggcaaggacgtgttcttcatcgagatgaacacgcgcctccaggtcgagcatcccgtgaccgagctgatcacgggcatcgacctcgtcgaatggcagcttcgcgtcgccttcggcgaggcgctgccgctcaggcaggacgagatcaggctcaacggccatgcggtggaggcgcgcgtctacgccgagaatccgaccaagaacttcatgccgtcggtcggcaggatatcgacctggcggctgccggcggaagccgggggcttgcgcatcgatgccggctatcgcgaaggtgatagcgtctcgccgtattacgacgccatgctggccaagatgatcgcctgggcgccgacgcgggacgtcgcgatcgagcggctcaatcgcgggctggaagagtccgacgtccgcggcatcgtaacgaacatcccgttcctgtcggcgctgatgacgcatcccaaggtgcgcatgaatgcgatcgacaccggcttcatcgagcgtgagctggcggttctcacacaggccgcgccggtacccggcgagctcgagctttgcgccgcggtggcggcgatcctcaaggacgagcagcaggcggcccgtgcgcaggcaaattcgccatggcagaccttcggctggcagccggtcggccgccgccagcgcagctttgccttccgcgtcggtcacggaccggagcagaagatcgtgctgaactacggcagcggaccgtcgacgctgctgatcggcgagcgcgagctggctttcgcgattgcgccgcgtgacggcggcttcgatctgacgctggacggcgtcaaatcgtccgtcgcggccgtgatcgacggccatgagctctacttgcgcacgcgcaacggccgcttcgatttgcactgggtcgatccgttcggcggcgaaaccgaggagcagacgggcgaggacaagatcgccgcgccgttgccgggaacggtcgtcgcggtgctggccgaggagggcgccaagctcgacaagggcgctccgatcctgaccctggaagtgatgaagatggagcagacgctgcgcgcgccctttgccggcgtgctgaagtcggtcaagtgcaaggtcggcgacatcgtccaggagggtgtcgaactcgccgtcgtcgagccgtccggggagtgacatgagcgaccgagtccgcatcatcgaaatgggcccccgcgacggcctccagaacgagaagactcccgtcagcgtcgaggcgcgcatcgccttcatcgaggcgctggttgaggccggcctcgatacggtcgaggtcggcgccttcgtctcgcccaaggcgatcccgcagatggcaagctcggacgccgtgctgcgcggcgtcagccacgtcaaggacgccgaatttcacgtgctggtgccgaacgagaagggctatgacgccgcgcgcgccgcgggcgccagggtcgtctccgtgtttgcagcggcctcggaaggcttttcgcgagcgaacatcaactgcacgattgcggagtcgatcgagcggttcaagccggtgctggcgcgtgccaaggccgacggcgtgccggtgcgcggctatgtctcctgcgtgctcggctgcccgttcgacggcgagatcaagccgaaggcggtcgcagaccttgcgagtacgctgttcgaactcggctgctacgagatctctctcggcgacactatcggcgtcggcacgcccaccagggccaaggagatgctgcgcgcggtggcggccaacattccgccggccagactcgcgatgcatttccacgacacctacggccaggcgctcgccaacctctatgccgggatggaggagggcgtgagcgtcatcgacgccgccgccggcggccttggcggctgcccctacgcgccaggtgccacgggcaacgtcgcgactgaagacgtcgtctacatgctcgaaggcatgggcatcaggacgggcatcgacatggaaaagctgctcgcggccacgaacgcgatgagtggcctcctgggcaagccgcccgtcagccgcgtggcgtcggcgctgaacgcgaagaagaagcgggccgcctcataggacggcagggaggcgtagcgcggtacccgcctgaccgttcaacgtctgccatggatcgcgaacagcagctcccagcgcggcaggtgcagcgagcatggcgggatgtccttgggcattattgttgtgctgtgatttgggcttgggcatcgagaccggcacttgcgcccgtcctggccggtccttcagtcgaacttctttcaactgacagcttgagaccggatgttccggcaggtaccggtcgtgctgcgctgcacacttccgactcctcgcaagctcgaagatcctcgaggtcggtcgcgccaattttatcggcgggggcgtaacaaggcgggctcgcgatccgtcgacatcaaatagcggcgtctgtcgctgacaaccaccactcgaagggaacatgaaccatgaccattcgcacccgcatcgtgctcggcgtctcggctgccgctctctcgctcggcctcgcgtttgccccggccgcctttgcccaagacaagatgggcaaggatgacggcatgatgaaaaaggacacgatgtccaaggacggcatgatgaagaaggacacaatgtccaaggaaggcggcatgaagaaggaccacatgtccaaggacggcatgaagaaggaagacgggatgatgaagaagaactgatccttcgccttcggagcagagcctacattgaggcggccgcactctctcgacttccggtggcagccgttggaagcctccggaaggttcttcaattctggttcaattgaacgcgaccagaagccttacttgcgcttggccttgcgggcggcatagcgcgcgtcgcgcttggccttctgctcggcttccagcgcagcgcgctgagcttcggcctcctcagcctcgcgcgcgatccgcgcggcctcggcggccttggcctcttcctcgcgtcgcttctgctccgccttttcggcctcgcgcgcagccttcgcctcggcgcgcttggccgcgagagcctcgcgttcggcacgcttcgccgccaccgcgggatcatcgggacccggctgcgacttgaacttgttcaaaagattcttgcgcgcctcttgcgccgctttttgccggtctgcgaaacctggttccctgaatccactcatcgacgagccttgtcttcctcgctttcgatcctacatccgtgcctgttggtacgtcggctgggcatagcaggcgccacgcgacgcagaagcgtgtacatcgccgcgcgtcgcgaagccacccaaatcgcagccgatcaggtcaacgaaatcgccccgacgatctctcgtagcccgaaaaaactgccgaattgtgatctccctcataagggagcacgagggcgacgcctagcgtccgcccgctacgagacggagcacagccatgacgttctccagacccaacctgaaggcgctctcaatcgccttcgtcctggcaagcctgaccggcgccgcggtgctgctagcccgtccgcagcccattgaaagtgccgtacttggggcggattgggaatgcacccagaccgctttcgtgctcacgagctgcgcaccgcgggatctgcaggcgatcccggcggtcgagacctcgggtaaggaagctattccgtcccggcgcggctgaatgagggcgcggattgggatgtgacgcgacgccgcacaggtgatagagccccttgcgcgatcaggtggccatgtccaagcccgaactgggccagaagcccaaaccagctggaagacctcgacccgtcggcaatcggcgcggcgccattgccggcttgatcattacgcttgtcatcctcgccgtcggctggtggcttgctcgccacctcacctcggcaagcaagatgcaggactgcctgatgtcgggccgcaccaattgtaatgtgattgaaccggcccgctagagtccggctccgccgcagcggttggggccaaaaattgccgtgatcttaatcatttgtaacgggacttagccgatcaagcagggcagttgtttcggccggcatcagcccggcgcgcggcgattcgccgatcgcgccgggccgggcaccacggccatcgacagagcagggggcgagcacgcatgagtgcgtccaaacgcatcaagatcatcattcccgtggcttcggccatgtcgttcctcgcgctttcggcgcaggctcaggactcaaggccgagggatgccggcccggcagcggcccgccccagcgctggtgcgccggccccgaccgatcagaacatgcgtaaaggccttccgccgcagcagcaggcggtccggccggcgcagcgccctgccgatcggccccatgcgggtcctggtgcgcaccatgccggggggccgccgccgggacggcacgtcgcccgcggtcctgcgccggagcgccattggggcggtcacatctatcgcggcaaccgcgcctgggatgggggacggtggcggcacgaagtccgcaacggacggtccggctggtggtgggacgtcggcggcgtctggtattattatccgcagcgcatggcgggcccgcccgcttacatctccgaggattacatcgacgacgtgccggtggcctacgccccacctccggtcgcctatgcgccgccgcctccgcctcctgcaccggcggatcccggtgccagcgcgctcggcggggcgctcgtcggcggcttgctgggcggcctgatctcgggcaatgcaacgggggctgccgcaggcgcggttctcggcggcgcgacgggcgcgattgcgggggccaccgctgcatcccagcccggctattactgggcgcagggcacctgctactaccgttatccgaatggccagtatgtgcaggccgatcctcgcgcgtgctattgagttttccaatccggatcgaagaagaggcgggcttaggtccgccttttttgttttgcgccgcagcgattgcttcaaatcagcaaattagcgctggcgctcgtcgccgcctcacgcaagtctcaaaagaaaacgtcgggatgattcgcggggatgtgggacatgctggatgccatccagatcagcttggcgctttgggccatgatcgtctgtggcgggatcaaactctcgcaggcgttaccatatctgttctagcgcacgattcgccacggcaacccatgcgtgtggcacctgaaccaatctgctcgcgcatcaagacacgagccagctgaagaacgcgatcgcccccccagacgaggctggcgatccaggccagcatcacgatcgcaatggtgccgagatatgcgacgccgagcagatccgagctatgccgccgcggcgggacgatggcttccgttgctgccttgcgtgtcatgacgggacatcatccatagagccatgaagcgctgtttagcgaagatttccggcgcgagttgtgacgcagttcacagagccttgccggttaccccgcaatcatacggacgaaattgccacgcgcttgtccagatggtcggttagggtctgcctcatgtgcaccgagtacgatccgcagcatgaagccgagctcgcaatgaagcgcgctgcggaggccgaaggtgcggacaggcaacggctcatccagctggccctggcatggcaccagctcgcccgcgatccgcgtggcgagcgaaccggcctctctcatccagccgggcacacagccgcggtccgataacgcggacatgagaaaaccccgtgctcgggggacaagcacggggctctgcaaagccgaccggggttggcggtcggcaccactcaagtcggtcattcaacgctctgcttgcgcgttcgttccaggtctatcggcgcggctgagatcctgcactcctggagtgacgcctgcgcttggcaggaaggaacgtccgttccgcggcgacgttgtgcggctatgaccgatcccgagctacgagcacagtctttcgagatcgcctggcgatatctcgaccagtccggcctgctcacgggtgagcacaaggattccgcccgtttcatcttgagccggatcgaccgcatgatgcagcgcggagagcggcgcagattgctgctctcgaatgccgcgatcgacgcctatcggctgcggcccgcgctcgtgactgcctgatccatgcattgaaccagttcttaacaattgctcgacgcttcgatttgcgatcgcgattcgtgccgtgcgaacgaagcagagtcggatcgtgaacaaacaaaaagcccccgaaggggctcagtgattcatgcggcttccgtcttcggtaccgcgtcggcattcatcgacagcttcacgacgtcgccctcgacggctcctacatatttcgtgtcgatgtagtgatgatggtccttgtgaccttccgggctgtccttgcgcgtcagcttgatgcggttgccctcgacgcgatcgacggtgccgacatgtgcgccgtccttgccgatgatcttcatgtgctctctgatttcagacatgctgtcctccttgcacggattcaactgcgaaaacgcatgttcgttgcacgggccttggacccaaggcgctttctatacgttgacgcctgatcagatctgtcagaagcgcatggagaccattcaagcctatctgcaacgaaagcatgaggaactcaggctgttgaatggctgcctgagaaaccggattgacttagtgcgtccgcaatccgtcgatgacgtggtcgggtccaagttccggatcactgcggcgctgagggcggagcacgaactgcatgagtggaaggcgacggagacggcctggtcgcacaccgccaatcccgccagcggaccgttcgagttcggctacgattatcagcgggccgatcttacggtacgcgggccgccgttctatgaagtcgactgcgcctccacgagcaccgcaatctataccgcctcgggtatggccgcgatctctgccgcgctgctcgcctccgcgcagatcgcgccgaaggccgatatcctggtgctgccgggctcctatggcgagacgctggaactgatccggagctacgtcgctcatttgcggctcgaggctttgaagctgccgctgggcgatgcgtttgcccgggcgggccggccgcgcatcttgctgctggattcctgctccttggccggcgctttcgaggcggcgctgcgctgcgacggctctggcctcgacctcctggtgttcgatacgacatgcttcgccggccggtcaggccggatcaggcgggtcctgagctgggcccggcgacacggcattccgctggtgctggtgcgcagccacaacaagctcgactcgctcggagcggagtatggccggcttggctcggccgtcttcgtgcatgaaaatgagcgtcagcagcgggcaggggggctcgaatgggcgcgtctcgcgtccgaaacgcgaaacgcggtgcggctgctcgggggcgcggcgctgccggcccacttcccgccctttgcgggcagcgccgcgtactgggctctcacgaaaaggcgcgttgcggcgatcttgcgcaacggccgaagcaccgctcggtattttgccgcaaagctcccggcgctctcggccgaactgcatttcgcccacggcctgtacgtgaccctccggggaaggcgcccgctcgacgaggcggcagcgcgccaggctgccgaagacatgagcagcgaactgcggcgtgagggctttcccatccgccacgccggcagcttcggctttgatttcgccgcgacggagtggtttcacgacgcgaccacggaccagtatagcgtccgggtggcggtcccggatcttccgaccgagctttggaatgatctggccgccgcaatcgcgcgatggtggctggcacatcaggcgtgaggtggtgggtgaatgcgatgtccgttcgacagctccgcgagcgcgcttcgcatcaatcggtcgccaggcactgctccaaggccggcttctcttggccgccacgcgcccactcctgaacggcgaaggcaaggtgatgctgacccatcgcggcgccgacgatcgatgcctgcgccacttcgataggcttcttgacaacgttcgtattcacgacgcctgcgtcgatcgccaagtatgacatcgcgacgatcgccaccgcagatgcgatcgccattctggtccactcgggttgaggcattgggatcctgttcgggtgcacttcgcccggcgcatagatagggctgatgtggaagcttcaaagcccggagcgaagcgacccacgcgttcgtgaacgaggtccatcagcgcaagaattggcgatgcaagaattggcgatcccggcaggactcgaacctgcaacccgcggagtagaaatccgctactctatccagttgagctacgggaccgtctcgagccggccggtctggacggctggccgttcatctagcatgccaatatgaaaaatctggtgtttcgccaagcctgaaccgaacccttttcctcaatgcggcgacaaagcggaacggcggggtgtggggtcgagcggcagcggaacggacgatcggttaaatcgccagggccgctgaacagcttccgggacacggttgccggtcgaccggccatgtcaggctgcgccaaccggaagggcgcgcgcgccgctaccttgaccggtttggttaggacttgtcatggcgcaatgcggcgttttgttcttgtggttccatcgccttgagtccgtcacctttccgcgcatttcatctgacgcggcgtttgccgcgatttccgggagtccatcatgatcgctttgcttcgcgccgtcacactctgcgccacgctggcgttcggcctaagcgccgcgcaagccgcggacaaggcgttcaagcgcgacgatctcgctgattccgcgatcaagctggaggcgcagatcaagagcgaggcggggccggtcgccaagaccagcgcgacgctcaagacggacgccgacgccgcgttccggcgcaatgattaccgcaccggcctctcggtgctcggccagatcgccgccaccacgcctgaagatgccggcaattggctgcgcctcgccaaggtcatcttccagatcacccccaagagctcgagcgagcagacgttcctcctggagcgggcctcgactgcggcctacatcgcctatcagcgtgcaggaaatccgggcgtggaggccgacgcactcgccgtgctcggcaagtcgttcgccgagcgcaagctgtggcggccggccctggacgcattgcggctatcgctggacatgcgcgaggtcgccgacgtccgcggccagtacgagaagatgcgggacgagcacggcttccggctgctcgactataccgtagactcggattcggcgagcccgcgcgcctgcttccagttctcggaggagctcgccaagcgcaccgatttcgcaccgttcctggcgctggcgggccaggacaagccggcgttgtcggccgagggcaagcagctctgcgtcgacgggttgaagcacggcgagcggtacaacgtcaatctgcgtgccggcctgccgtccacggtgaaggagggcctgccgaaatcggccgagttcaacatctatgtgcgcgaccgcaagcccttcgtgcgcttcaccagccgcgcctatgtgctgccgcggagcggccagcgcggcattcccgtcgtcagcgtcaatacgcccgccgtcaacatcaacgtcttccggatcggcgaccgcaacctgatcaacacggtggtcgacagcgatttccagaagaccctgtccaaataccagctcagcgatctcggcgacgagcgcggcgtcaaggtctggtccggcgagctcgcaaccgcgatgacgctgaaccaggacgtcaccacggcattcccggtcgacgaggcgattggcgagcttcagcccggcgtctacgtgatgacagccgccgccaagggcccgggctcggacgacgactaccagatcgccacgcaatggttcatcgtctccgatctcggcgtctccgcctattccggcaatgacggcatccacgtcttcgtcaactcgctggcttcgaccgatccggttggcaaggccgaggtgcggctggtcgcgcgcaacaacgagatcttggcgacgcgcaagaccgacgagtccggtcacgtgttgttcgaggccggccttgcgcgaggcgagggcgggctgtcgccagcgctgctgaccgtcaccggcgagaaggccgactacgccttcctcagcctgaagagctcggccttcgacctgtccgaccgcggcgtctcggggcgcaccgtcccggcgggtgccgatgccttcgtctatgccgagcgcggcgtctaccgttccagcgagaccgtctatctgaccgcgctgttgcgcgacgggcagggcaatgccgtcaccgggggaccgatgacgctggtgatcgagcgtcctgacggcgtcgaattccgccgtgccgtgctggcagaccaaggcgccggcggccgcacgctggccgtgccgctcaactcggctgtcccgaccggcacctggcgggtgcgcgccttcaccgacccgaagggatcgtcggtcggggaaaccaccttcatggtcgaggactacgtccccgatcggatcgaattcgacctgtccgccaaggacaagcttatcaaagctaacgttccagtggagctgaaggcggacggccatttcctctacggcgcaccggcctcaggccttgcgcttgaaggcgacatgctggtcgcgcctgcgagcgagcggccgggctttgccggctaccagttcggcgtcgacgacgaggagaccacctcgaacgagcgcacgccgctggagaacctgcccgaagctgacgccaacggcgtcgcgaccttcccggtgacgctggacagtcagccggcatcgacccggccgcaggaggcgcagatcttcgttcgcatggtcgagaccggcgggcgcgccgtcgagcgcaagctcgtgctgccggtcgcgccggccgctgcgcagatcggcgtcaagccgctgtttggcgagaagaacgtcgccgagggcgacaaggccgagttcgacgtcgtgttcgtctcgccggagggcaagcagctcgctcgcgacggtctgcggtacgagctcctgaagatcgagtcgcgctaccaatggtatcgccagaacaattactgggagtacgagccggtcaaatcgacctcgcgcgtcgccgacggcgatgtcgcaatcgcggccgacaggccgacgcggatctcgctcagcccgcagcccggccgttatcggctcgatgtgaaatcgaacgaggccgacggcccggtaaactccgtgcagttcgacgtcggctggtattcggatggaagcgccgacacgcctgacctcctggagacatcgatcgacaagccgcaatacgcctccggcgataccatgacggtgtccgtcaatgtccgtagcgccggcaagctgaccgtcaatgtgctcggcgaccgtctcctgacgactcagaccatcgacgtcaaggaaggcaccgcccaggtgaagctcccggtcggcaaggactggggcacgggggcctatgtggtggcgacgctgcgccgtcccctcgatgcggccgcccagcgcatgccgggccgggcgatcggcctgaaatggttcggcatcgacaagcagacccgcacgctccaggtgaagctgacgccgccggcgctgatccggccgaacgccgcgctgaagatcccggtcaagctcgacgggctcaatccgggcgaggacgccaaggtggtgatcgccgcggtcgatgtaggcatcctcaatctcaccaattacaagccgccggcgcctgatgatttctatctcggccagcgccgcctgaccgcggagatccgcgacctctacgggcaactgatcgacggcatgtcgggcacgcgcggccagatcaaatccggcggcgatgccggtgcgggcgagctccagggttcgccgcccacgcagaagccgctcgcgctctattcgggcatcgtcaccgtcgccgccgatgggaccgccgaagtcagctttgacattcccgagttcgccggcaccgcgcgcgtaatggcagtggcatggaccgcaaccaaggtcggccgcgccaacaccgacgttgtgatccgcgatcccgtggtgctgaccacgaccctgccgcgcttcctgctcaatggcgaccacggcacggtcaacctggagatcgacaacgtcgagggccaggccggcgattacgccatcaacgtgaagacaggcggcccggtgaagatgacgggcaatcccgccacgaccgtcaagcttgccgccaagcagcgcaactccttctcgctcgcgcttgacgcaacggcggcggggcaggcgacgctcgatgtcgacatcaaggggccgaatggccttgccctggcgcgccattatgcgttcgacgtcaagccggcgacccaggtgctcgcgcggcgctcggtccggacgctggccaagggcgagagcctgacgctgacctcggacatgttctccgatctcgtgccgggcaccggcagcgtctcggtttcggcgagcctgtcgaccgcgctcgatgcggcgacgatcctcaaagcgctcgaccgctatccctacggctgctcggagcagatcacgagccgggccatgccgctgctctacgtcaatgacctcgcagccggtgcgcatctggccatggacacggaggtcgaccagcgcatccgcgacgcgatcgagcggctgctggcgcgccagggctcgaacggctcgttcgggctctggtcggcgggcggcgacgatgcctggctggatgcctatgtgacggacttcctgacccgcgcccgcgaaaagggctttgcggtgccggacgtgctgttcaagaacgcgctcgaccgtatccgcaactccgtcgtcaatgccgacgagccggagaaggatggcggccgcgaactcgcctacggcctctacgtgctcgcacggaacggcgcagccccgatcggtgacctccgctatctcgccgacaccaagctgaacaacctcgcgaccccgatcgcgaagtcccagcttgcggcggcgctggcgctggttggcgatcgcaaccgcgccgagcgggtctatggtgccgctctcgacagcctcgcgccgaagccggcgctggagttcggccgcaccgactacggctcgcagcttcgcgacgccgcagcgctggtgtcgctcgccagcgaaggcaacgcgccgaaggcgaccttgacgaaggcggtagtgcgggtcgagaccgcgcgcgggctgacaccctacacctccacgcaggagaatgcttggctcgtgctggcggcgcgcgcgctcgccaaggagaacctttccatggaggtggacggccagccggtgaaaaccgcgctgtaccgcagctacaaggctgcgacactggaaggcaagccgatgaagatcaccaacaccggcgacgcaccggtgcaggcggtggtctcggtgtcgggctcgccggtgacgccggagccggcggcatcgaacggcttcaagatcgagcgcacttacttcacgctcgacggcaagcccgccgacatcagcaaggtcaagcagaaccagcgctttgcggtggtgctgaagatcaccgaggcaaagcccgagtacggccacatcatggtctccgattatctcccggccggtctcgagatcgacaatccgaacctggtgtcgtccggtgacagcggcactttggactggatcgaggatggcgaggagcccgagcataccgagttccgcgatgaccgtttcactgcggcggtcgaccgcgcctcggactccaagtccgtgttcaccgtcgcttatgtcgtgcgcgcggtctcgcccggcaaatacgtcctgccgcaggcctatgtcgaggacatgtacaatccatcgcgttatgggcggaccggcacgggcactgtcgaggtacgcgccgcgaagtgagacgagctcgaatctgagttgaactggatgagcgcagcggagccacacaaccagtcgtcatgcccgggcttgacccgggcatccacggccgcagcggcggtggatgacggcgtggatggccgggtcaagccgggccatgacgggcggcgagggcggatagcctttcgtctgctgtcagccgctgcgttcacgctcatcctcgccctcgtcggtttcgtcggctgggtctactctctcggtcctctcccgctcgacgaggcccgccgggtctccaccaccattgtcgatcgcaacggcaagctgctgcgcgcctatgccatggccgacgggcgctggcggttgccggtcgatgccaagaccagcgtcgatcccacgtatctgaagctgctgttcgcctacgaggatcagcgcttctacgcccacaacggcctcgacccgcttgcgctcgggcgcgcggcgttgcagctcggaacgcgcggccacatcgtctcgggcggctcgaccatctccatgcagctcgcgcggctgatggagccgcggcgccagcgttcgctctatgccaagctgaggcagatcgtgcgcgcgatcgagctcgagcgaacgttgagcaaagagcagatcctcgatctctatctcgcgctggcgccttacgggggcaaccttgagggcatccgcgccgcgtcgattgcctatctcggcaaggagccgaagcggctgtcgctggccgaggccgccctgctggtggctctgccgcaatcgccggagacgcgccggctcgatcgccatcccgaggctgcccgcatcgcgcgcgaccgtgtgctcgaccgcatggtcggggagcatcaggtcagtgcggaggaggcgaagcaggccaaggccgttcccattccgaagctgcgcaagccgatgccgatcctggcgccgcacgcctcggacgccgcgctgtcgatgatcaaggataagccggtagtcaagctgacgctggatgcgaacctgcaaaaggtgctggagccgctggcgcgcgaccgcgccatcgcgctcgggcccaacatctcggtcggcatcatcgtggtcgacaatgagagcgggaacgtgctcgcccgcgtcggctcggccgattattttgacgaaagccgggcagggcaggtcgacatgacacgtgcgatccgctccccgggctcgacgctcaaacccttcatctacgggctcgccttcgaggacggcttcgtccatcccgacagtctgatcgacgaccgtccggcccgcttcggctcctacgcgccggagaactttgacatgaccttccagggcacggtgcccgtgaagaaggcgctgcaattgtcgctgaacgtgccggccatcgtgctgctcgaccgcgtcggctccagccggctggcgtcgcgactgcgccaggccggcggcaacctggtcctgcccaaggacgaggcgccagggctcgccatgggcctcggcggggtgggcgtcacccttcaggatctcgcccagctgtatgcgggcttcgcccggctcggcaccacgaggcccattcgggagatcatgtctgacaaggacgaccgcgagccgatgcggttgctggatcaggtcgcagcctggcaggtcggcaacgtgctcctgggtacgccgcccccggagaacgccgctcataaccgcatcgcgttcaaaaccggaacgtcctatggctaccgcgatgcctggtcggtcggcttcgatggccgcatgaccatcggcgtctgggtcggccggcccgacggcgccccagttcccggcctgattggccgcgtcgccgcggcgccgatcctgttcgacgctttcgcgcggagcggcaagacgcttgtcccgctgcccaaggcgcccaagggaaccctggttgccagcaacgccaagctgccgctgccgctgaagcggttccgcccagtcggagaattggtgcgcgccggaagcgagcagccgctgcacattcagtttccgctcaacggctcgcggatcgacgtcgaccgatcgggtggtcgggaaagcgcagccatgccggtcaaagtcgccggcggcgtgttgccgatgaccgtcatggttaatggcaccgcgctcggcgagatcgacggtcgccgtcagcggctgatcgatccgcccggtcccggctttgcccggctcaccgtgatcgatgccacgggcgccgcggacacagtcgtcattcgaattcaatgatccctgcctcaagcggttgtggcgatggcggtttcggcgtaagcggaaccaatggccgagacctacccaagcccccgttttggagcaccccgagagtcgaaatcgcccgcaaatccgggcagcggtctcgtgcgcatgctcgacatcgtcacgaccagccatgcgcgcgccgtcggcttcctggttctgtgcgcgctactgctcttcctgccgggcttcttcaccatcccgccgatcgaccgcgatgaggcgcggttcgcccaggccaccaagcagatggtcgagagcggcgactacgtcgacatccgcttccaggaggacgtccgctacaagaagcccgtcggcatctactggttgcaatcggcgaccgtggaggcggcgtcgctgctcaagctgccgagggcggaattgcgcatctgggtctatcggctgccgtcgctgatgggcgcgatcggcgccgtgctcatgacctattgggccgcgctcggcttcgtcacgcggcgtgccgccgtgcttgccgcactgatgatgtgcgcttccgtgctgctcggcgtcgaagcacggctcgccaagaccgacgccatgctgctgttctgcgtcgtggccgcaatgggcgcgatggcgcgggcctatgtgtcctggcaacgagccgaggacgagacgcatccgccctggagctggcccgcgatcttctggactgcgctcgctgtcggaatcctgatcaagggcccgctgatcctgatgttcgcgggcctgaccatcgttgcgctcgcgattcaggatcgcgatgcttcctggctgtggaagctgcgcccggtgtggggcctgatgtggatgctggtgctggtgctgccctggtttgtcgcgatcttctggcgcgcgggcgacaccttcttcaccacctccgtcggcggcgacatgctgagcaagctgggtgcccaggaatcccacggtgcaccgcccggactctacctcgtgctgttctggatcaccttctggcccggtgcgccgcttgcagcgatggcggctcccgcagtctggcgggcccggcgcgagcccggcgcgcaatttctgctggcctggctgatcccgtcctggatcgtattcgaggcggtgctgaccaagttgccgcattacgtgctgccgctctatccggcgatcgcgatcctgaccgcaggcgcggtggagcagcgcgtgctgtcgcgttcctggctggcgcgcggttcggcctggtggttcgcgatccccgcgggcgcctcgatcatcgcggtcgtgggcgcggtgatcctgacgcggcagccggcattcgtggcctggccgttcttcgccgccgcgctgatctttggcctgttcgcctggtggctctacgacaacaatcgcgccgagcgctctttcctcaacgcgctggtcgccgcgctgatgctggcggtggcggtctacggcatcgtgctgccgtcactgacgccgctgtttccgagcatcgagatcgcgcgcgcgctgcgcaacgtcacctgtgtcgggccgaaagcggctgcggccggttatcacgagcccagcctcgtctttctggtaggcacgcgaaccttgctcactgacggttccggtgccgccgatttcctcgggcagggcagctgccgcttcgcgctgatcgagcagcgctccgagcgtagcttcgtgcagcgcgcggaggcgatcgggctgcgctacaaggtcggcgcccgcatcgagggctacaacttctcgcaaggacgcgcgatctcgatctcgatcttccgctcggaaggcaccgagtaggatgcgggccccggccgacagtgcgccgcgcgccggctatcccgcgcaagtgctcgccgtgaccaggcgcgggctggcgcagctcgtgcgctcgccctcgcattcgcgccgggccgaggcagcccgcaagctggcgcggcattcgctgtggcttgccgtggccggctcgatcgcgatcattgcgctcatggtcaccttcgaccagaccgagatccagctgatgccgccccgcgggacacccagcctctggccgatccgtatcctcaccgacttcgggaaggacgagtatctgctctcggtgctgggggctgcgctggtggtcctcgccttcgttgcggcgggactacatgggactcgccgcgcgctgctgctcggcttcggcacgcgcctgcaattcctgtttctgtcggttgccgtctcggcattggtgaccgagatcctgaaatacgtcatcggtcgtggacgtccgttcgtcggcggcacgcccaatccgttcaacttcgttccattcgaagggactggcgcttatgccagcctgccctcggggcatgccgtggccgcattcgccctcgcgtttgccgtgtcgtcgctgtggccgcgcctgcgcgccttcatgttcacttacgcgatcgtgattctcctgacgcgcctcgtgctgcttgcccatcatccgagcgacgtcgttgccggcgccctggtgggcacggccggcgccatggcggtccgctactggttcgcggccagacggctcggttttgcgatccgctctgacggcaccatcgtgccgcttccggggagggtttcgaaccgcctcaaaaaggttgcccgcggggcatctgccacataaaagcggctgcctgcggggggcgccggttccctttgaggcggccaattccaaccacgagccttgatttgtcgacgtcccagccctcggtttccatcgtcgttcccgtgcgcaacgaagccgacaatatcgcgccgctgatcgcggagatcggcgcggcgctcgatggccggtggccgtacgagatcatctacgtcaacgacggctccaccgacgcgacgggcgagcgtctcgccgccatcatgaagcagcggagcaatctgcgtcagcttcgccatgcgcgatcgggcggccaatccgccgccgtgcgcagcggcgtgcgtgcggcgcgcggagagatcgtggcgacgctcgacggcgacggccagaacaacccggccttcctgcccgacctgatcgcggcggtcgagaaaggagcagggcgcgtggggctcgctgccggccaacgcgttggccgcaaggacaccggcttcaagaagttccagtcgcgcgtggcgaacggggtacgcaacgcgatcctgaaggacgggacgcgcgataccggctgtggcctgaaggcgtttcggcgcgacgtgttcctgatgctaccctatttcgacgggctgcatcgcttcctgccggcgctggtccgccgggaaggttacgacatcgcctatgtcgacgtgatcgacaggccgcgccattccggcgtgtcgaactatggcttcttcgaccggctgtggatcggcatcatggatctcgcgggcgtatggtggctgatccgccgcaagaagccgacgccggaagtgaccgaggtgcatgcatgatcatccaatacggtcaggcgctcagcaactatctctacgacgtcttcgtcgccaagttcgacttctggctcgcgttcgggctcgtcgcgcaactgttcttcaccgcgcgcttcctggtgcagtggatcgcgagcgaacgcgccggcaacagcgtagtcccgatggcgttctggttctgctcgatgggcggcgggctgatgacgctggtctacggcgtcgtgaagcgcgagcccgtgatcatcctcggacagtcccttgcgaccgtcatctacatcagaaacatcatgctgatctggaagaaccgcggcaccgcctcgaagacactggaccgctgatccaaggcgtcatcgcggcaatgccgacgctgcgcctgatgcgggcagggtgacggtgtccacctcggctctgcggtaaggctcgccggccgcatcgagcacgggataggcgaccgagcagatgtgcgagtggatgcgcctgaggtcgcgcagcacgtccagatgcagcgaggtggtctcgatggtctccgggcggccctcgcgaaggcgatcgagatgccgctcgaccgcggcaagctcggtgttgcgcagcgccgtcttctctaccagcaacttgcgcgcctcggtggcgtcccccgacatgaaaacgccgaacgcgatgcgcagggagtccatcgtgcgcttgtgaaacgcggcgagttcctcggccccttccgccgagaactggaagcgccgcttgatcttcttggtggcgagctcgctcaggctcttgtcgatgatgtcgccgatatgttcgaggttgatggcgaaggagatgatctccatcgcgcggcgcccttcgctctcgtcgaggctgccccgcatcagcttggtcacgtagagcttgatggcctcgtcgagaccatcgacgagattgtccatcttggagacctggtcgaccagcgcacggtcgccggacatcatcgcggtcatgaccttgcgcagcatcacctcgacgaaatcgcccatgcggagcgtctcgcgggcggcgtcggcgagtgccagggacggcgtttccagcgcggtctcgtcgagatagcgcgggccggcgggatcggcctcctggacgcgatctggcaggaggcgggtgagcaggcgcgacatggtgtcgagcaggccgatgaagaggatggccgtgccgacattgaaagcgatgtggaaggccgcggtcatcctcgcaagatcgggctgccaggcgtgcatgtgcccggcgacgtcacccaggaagggcaggacgagaccgatcccgaccacgcggttgacgagattgccgaccggcaggcgataactcgccgggtcgtcgcgcctggcgccctcgaaaactggattgatggcgctgccaagattggccccgagcaccagcgccagtgccgcttcgggcgagatgaactgcgaataggcgagggacatgatcagcagcacgctggcgacgctcgaatgcaccgcccaggtgacgagagcggcgatgacgacgcacaggatgggatcgcctgtgatggccgacatgacgatgcggacgccgggcgcgttctccgccggcgccagcgtatcgagcaggatgtgcagcgagagcagcatcaggccgaggccgatgcagacgcggccgatgtccttgatccgggatcgcgggccggagcggaaggcgacgagcccgagcacgaacagcaccggcgcgacggccgcaatgttgaacgacagcacctgcacgatcagcgtggtgccgacattggcgcccaacatgatggcgagcgccgcggcgaggctgacgagcccctcggctgcgaacgaagaagtgatcagggccgtcgccgtgctgctctggagcagcgcggtcagcccgaggccggcggcgaacgcgctggcgcggttgcctagcgccttgccgagcaggcgtctgaggtcgggaccgaaggcgcgcaggatcccgctgtggaccatgtgcaggccccacaatagcagcgcaacgccgcccatgagatcgagcagaaccaacgttcccatgctccgtgtccggattggagtcgatcggtgaggctagcgccaaacgtccggcgttcaaaccgtttgttgggcaacgggcgttaacgcctgcggcgaatgcgcgttcctatggcgctgtgccttgtgagcaggctcacgttgccgccttcagggcagcgaagccgcgatcgagatcggccttcagatcgtcagtgttttcgagcccgatgtggaggcgcaatgtcgggccgccgggcgcccatttcgtcgccgtgcgatagctgtcgcagtcgaagggaatcgcaagactctcgaatccgccccacgagaagcccatgccgaacagcttcagggtattgagcatcgtgtcgaccgccttctgcggcgccggcttcagcacgatgctgaacaggcctgatgcaccggtgaagtcacgcttccagatcgcatggccgggatcggtctccaggcccggatgcagcacgcgcgcgacctcgggccggcccgcgagccagcgcgccatgtcgagtccggagcgatgatgctgcgccagccgcaccgacagcgtgcgcagactgcgcagcgcgaggaacacgtcgtcgggaccggcgcagacaccgagcaggcggatgccctcgttgatctgtggccaggccttggcattggccgagatggtgccgaacatgatgtcggaatggccgccgatatatttggtggcggcctgcatgctgatgtcgacgccctgctcgagcgagcggtgatagagcggcgtcgcccaggtgttgtcgtcgatgacgagcgcgccgcgcgcatgcgcgacctcggccatggcgcggatgtcgggaatctcgaacgattgcgagccgggggcctccaccagcaccgcgcgggtgttcggcttgaacagcttgtcgacgccggcgccgatcagcggatcgaaataggtggtctcgacgccgtagcgcgccagcatgccgttgcagaaattgcgcgagggccgatagatgttgtcgacgaccaggatgtggtcgccggccctcagcaccgagagcagggtggtggagattgccgacagccccgacggcacgatgcccacgccggcgcattgcggcccctccagcgccatcagcgtctcctggaacgccttggtggtcggggaaccgtggcggccataggtgaactcgccgcgatgggcatgcaggtcctcggcggtcggatagagcacggtcgagccgtggaagacaggtggattgacgaaccccctttgggccttggtgtcgcggccggaggtgaccagccgggtctcggcgtgctgctcttgagggtgcgaggagtccatgcgcctgctttcaaaatttccaccggacgcatcgcgcccgcggttaggcccgaaggccactgtcgttaataacagaacacagaagagtcccgtcaaccccttgaccgggcaggccagtcgttctgtgatgcgcaggtgctattcagtcgccgcatgttgaggggcctgccgcgaccttcgatccgatgtctgaccgggccagacgccatagccaccagggcgggcgccgggacagggattaaggtatggatatggcctccctgcatcggcgagtgttcggctaggtttgccagcatgactcttgcagggctctccccggcacagatgatcccagagacaacgttcctgaccttgagacgacctttgaaaggcccaaagcccatgaaacgcgtaaccctggctctcacccttgctctcgccgcaggcctgtctacccaagccgccgatgcgcaaacgctcaagacggtcaaggaccgcggcatgctctcctgcggcgtcagccagggcttgcccggcttctcctcacccgacgacaagggcaactggaccggcatcgacgtcgacgtctgccgtgccattgcgggcgcgatcttcaatgacccggccaaggtcaagttcgtgccgctgtcggccaaggaccggttcacggcgctgcaatcgggcgagatcgacgtgctctcgcgcaacaccacctggaccatctcgcgcgacacctcgctcggcgccaatttcaccggcgtgacctactatgacgggcagggcttcatggtgaagaagtcgctcaaggtgaattcggcgctcgagctcaacagcgcatcggtctgcgtgcagaccggtaccaccaccgagcagaatctcgccgactacttcaaggcgaacaacatgaaatacgaggtgatcgcgttcgccaccaacgacgaaaccgtcaaggcctatgaagccgggcggtgcgacgtctttaccaccgaccagtcgggcctctacgccaatcgcctcaagctcgccaatcccaacgaccacatggtgctcccggagatcatctcgaaggagccgctcgggccgatggtgcgccacggcgatgaccagtggttcgacatcgtgaagtggaccctgttcgcgatgatcaccgccgaagagctcggcgtgacctcgaagaacgtcgacgagaaggcgaagctggaaaatccggagctgaagcgcgtgctcggcagcgacggcaatttcggggaacaactcggcctgaccaaggactgggtggtgcggatcgtgaagaccgtcggcaattacggcgaagttttcgatcgcaacgtcggcgcaggctcgccactcgccatcaaccgcggcctaaacaatctctggaacaagggcggtcttcagtacgcgccgccgatccgctgatcacccggtcggccagcagcggcatgagcaccgaggcccgaaagccgccgccccagatcgcgctgaagatccggcgcattctgggcggcagggcaggctggaacggcgttgccgtccagtttgccttcgcggcgatcctcggctggatcggctatgagatcatctccaatgctcgtgccaacctggagaaccagcatatcgccgccggcttcggcttcctcaggaacaatgccggcttcgacgtcaaccagaccctgatctcctattccggatcggacactttcctgcgcgtgttcgtggtcgggcttttgaacacgctggtggtctcggcggtgggtatcgtctttgccaccgtgatcgggttcatcgtcgcgctgtgtcggctgtcgcccaactggctcttgtcgcgcgtcagcgagatctatgtcgaggtcattcgcaacctgccgctattgttccagatcctgttctggtacctcgcggtgctcgcggccctgcccaatccacgacagagcatttcgctgctcggcattgccttcatcagtaatcgcggactcgtcattccgagcgcgatcggcgagcgcggactcgaaccgtttttggcaatgctggccttcggcgtcgttgcgtcactggccctgcacttccatgcgcggcgtgcgctgtttcggcaggggcgggtgatccggatctggccctatgtgctgggtctgctgttcgggttgccgctcgctaccgtcctgatgttcggtctgcctttaaccttcgagctgccgcagctcagggggttcaacttcgccggcggctcgcggatcattcccgaattcgtggcgctgacgctggcgctgtcgacctataccgccgccttcatcgccgagatcgtgcgtgccggcatcctgtccgttcacaaggggcagatggaggcggggtcctcgctcggtctcagccgcggcgccacgctccgcctcatcgtcgtgccgcaggccatgcgcgtcatcgtgccgccgctgaccaaccagtatctcaatctcaccaagaactcgtcgctggcggtcgcgatcggctatcctgacctggtctcggtgttcgccggcacctcgctaagccagaccggacaggcgatcgagatcattgcgatgacgatgggcatgtacctcctgatctcgctgttcaccagcgctgtcatgagcgtctacggttggcgcgtcaatcggggcctcggcgcatgagcgatgtcacttcgctcagcttcgtgcggcgggatctgctcgccgagcgtcccgcgccggtgaagaccaccggcttcatcggcctgatgcgcacgcgcctgttcaactcgccgaccaacatcctactcacggtcgtaggtgccttgctgctctggttcaccatcgttccctcggtcaagttcctgatggtcgatgcggtctggaccggccaggaccgcaccgcgtgtctccccgagaacgcaggctttgtggtcggcgcctgctggccctacatccaggccaagctgccccagctgatctacggcttctatcccgaggccgagcgctggcgcgtcaacgtcacattcctcctttcagccgtccttctcgtgccgctgctcgtcccgcggctgccggcgaagggcatcaacgccagcctcttcttcgtcgcatttccggtggtcgcatttttcctgctgtacggtggcggcatcaagggatttggcttgagctggacggccgggctgcttcagctgttcgacgagagcattatcggcgccgggcaggcgctgctcaatctgagcaagacatccgcaatcggccctctgctgtggagtctcggaagcttgatcatgctggtcggcacggcgatctcctggttgatctttccgctcacctggctgagcgatcatatccaggggacggcgcaaccggtctggatcgattttgccgttaccgccgcgattgtctccctcgtcgccttcgtactggggggcggcgttcgtgctggagggcgcgctctggtgaccagcgtcgccgttttcatcggcatcgcggtcgtcatccagctgatgggcctcgatcgcggcggattaccggtcgtgtcgacgaatctgtggggcggccttctggtgaccctggtggtctctgtcaccggcatcgtcacctcgctgccgatcggcatcgcattggcccttggccgccgctccacgattccgttgatccgcatcttttcgatcacgttcatcgagttctggcgcggtgtgccgctgatcaccgtgctgttcttcgccacctatatgttgcctctgttcctgcccggcaatttcagcgtcgacgggctcgtccgcgcgctgatcggcattgcgctgtttaccggggcctatcaggccgagaacgtccgcggcgggctcgctgcgatcccgcgcgggcaaagcgaggcggcggccgccctcggcctgtcctggtggaaaacgacctcgctgatcgtgttgccgcaggcgctgcgccacgtcattccgaacctcgtgaacagcttcatctcgctgttcaaggacacctcgctggtctcgatcgtagcgctgttcgatcttctcggctcccttcgtgcctcgttctcggatccgaaatggtcgacgccgtcgacggcgttcacgggtttcgccttcgccgggatcatctacttcgtcttctgctttggcatgtcgcgctactcgctgttcgtcgagcaccgcctcaacgcccaccggcgcaactgatcgaggtcaccatgtccgaccccatcgtcaagatctcgggcctcaacaagtggtacggcgaattccacgtcctgcgtgacatcgatctggcggtcaacaagggcgagcgcatcgtgatctgcggcccctcgggctcgggcaagtcgacgttgatccgctgtatcaatgcgctggaggagttccaggagggcgagatcgtcgtcgacggtatcgagcttggtcccaacctcaagcatgtcgatgccgtgcgccgtgaagtcggcatggtattccagagcttcaatctgtttccgcatctgaccgtgctcgacaattgcacgttggcgccgatctgggtccgcaacatccccaagaaggatgcggaggcggcggcgatgaagttcctggagcgggtcaagatcccgcaccaggccaacaaatttccggggcagatgtccggcggccagcagcagcgcgtcgcaatcgcccgcgcgctgaccatgaatccgaaggtgatgctgttcgacgagccgacctcggcgctcgatcccgagatggtcaaggaggttctcgacaccatggtcgatctggccgaggagggcatgaccatgctggtcgtcacccacgagatgggctttgcccgcgaggtcgccaaccgcgtcgtgttcatggacgctggccagatcatcgaggccaacactccgaacgagttcttcgccgctccgcagcacgcccgcacgaagctgttcctcagccagattctgcggtgaaccttgcgatccggcctcgcggtctgaccgaccgcaagcctggcaccatgcgaatcagctggcctctttccgagcaatactcgggagagagatcttgcagagaagcgccggcgcgcgcgcatatcacaatgcgcgactggaaaagaagctgaagaagcaagccgatgccgtcatggcattcgcggtcgaggcactcgggcagggcagacttgacgaagccgagatgctctgccgcgagatcttgaaggaggtgccggatcatttccacgccacgcacctgctcggcctgcgcgcgttcgatggcaggcggctcgaggaagcggaaatcctgcttgagcgtgcgattgcgctcgatccgcgttcgcccgatgcccacggcaatctcggagccgtgtatttcgacctccagaaatttcaggaagcccgcgcatgccaggagaaggccattgcgctgaagccgaattgcccgatcaccctgaccaatctcggcaacaccctgctgcatatcggcctcgccgaggaggcgatcgggctgcacgaacgcgcgatcaggctcaagccggattatgccgacgcactttgcaacaggggcatggcggaactgatgaccggccggttagaacgcgccaaagagagcttcgatcgcgcgctggcgtttcagccgcgtcatgcggaggcgatcgccggcaagggcatggtgagcctcgagctccgacacttcgaggaggcagtcgtcgcctttgacgcagcactcgcgctcaagcccggttcaccgcagcttctgctgcagcgcgggcgtctcaatctaacccggtcccggctggagcaggcggccgcggacctcgatgcggcgctggtgcaatcgccgcggctcgagctcgcactgtgctggagagcgcagatcgacctcctcgtggggaataccgcgcgggctctggcgggcgtcaagcgacttctcgaggtcaatccgcaatctgagatggggatggcgcttctggcggcttgccatgtgaaccagggagacatcgcgaccgcactcgagcacctggacgcggcgctcaggatcgctccggattttccggaagctatcggatacaagattttcgtgttggactatctgccggaggccgacttcgtggcccagcaggctgcgcgaagatattggtgggacgcgatcggggccaagcttccgcaaaggacgctgctgccgcgcgaggtcgatccggacaggcggatcgtgatcggatatgtcgcctccgaattcaggcgccactcggcagcgtattcgctgctgccggtgctgcgccatcacgatcacgccaaattcaagatcgtctgctattcctgctggccatctcaggacgagatgactgagcgcttcaagcctctcgccgatgtctgggtcgatgctgcgcagctttcggacgacgagctggccgatcgcatccaggcggacgggatcgacattctgatcgacgtatccgggcatacgaccggcagcaggctccatgtgttcgcacggaagccggcgcctatccaggtcaccggcttcgggcatgccacggggaccggccttcagaccatggactacgtgcttgcggacccgatcttcattccgcaatcggcgcgccatctgctggctgaaaaggtccacgatctgccgtgcctgatcacgatcgatccgatcctggacgtgccgccgtccgagcttcccatgctccgcaacggctatgtgacattcggcgtgttcaaccgcatcttcaagatannnnnnnnnnnnnnnnnnnnnnnnnnnnnnnnnnnnnnnnnnnnnnnnnnnnnnnnnnnnnnnnnnnnnnnnnnnnnnnnnnnnnnnnnnnnnnnnnnnnnnnnnnnnnnnnnnnnnnnnnnnnnnnnnnnnnnagactattgtgccgtggcctcaaagggcgggaggtagcttgggcccggccggatgttgccttgagcccccgggaaatcccggaggctcggctgatcggcggccccgacggcgaatcagctagactctccgtacggccattctccggagagacacattgcaaagcagcggcgccggcgcgcgcgcattccagaacgcgcgattgcagaagaaactgaagaaacaggcagacgcggtcgtcgccgccgcggcaagcgcctatggccagggccgatatgcggagaccgaggcgctctgccgtcagatcctgcaagcgcttccggatcatttcgacgccacgcacctgctcggcctgtgtgcgcagaacggccgacgcctggacgaggcgcaacggctgctggagcgtgcgaccgcgatcgatcctcgttcgcacgaggcccacagccatcttggggcagtgcatttcgatctcaggaacttcgatgaagcgcgccgctgccaggagaaggcgatcgcactgaagccgaattttccgcagggtctggccaatctcggcaatacactgctccagctcaacttcgcggagcaggcgatcgaaatgtacgaacgcgcgattaagctgaagccggaccatgccgatgcgctctgcaatcgcggcctggcggagctggcgctgcgccagtttgaccgcgccaagcagagtttcgatcgcgctctcgtgtttcagccgcggcacacggaagcgctcgtcggcaaaggcgtggtctgtattgagctcaagcactacgatgaagcgaaagccgcgctcgaagccgcgctcgcgatcaggcctcattgggccaaggccctggcgcaccgcggacggctgcatttcgagctgtcgcgactggaccaggcggccgtggattttgatgcagcacttgcgctttcgcccaagctcgaggtcgccttgcaggggaaggcgcaagtcagcatccagcttgggaatacggccgaggcgattgaggccgtcaggatcctgctcgtggaaaatccgcgctccgcgattgcggtgacgctgctgagcgcctgtttcgccaaccagggagagatcgcatccaccatcgcgcatctcgacgccgcgctggcgctcgcgcctgacgatgccgacctgattgcacgcaagatcttctttctggactttctctccgacgccgatttcgcgctccagcaggctgcgcggaaatactggtgggaggcgatcgggtccagattgccgcaacggacgttggcgccgcgggagcgcgatccggacaggcggatcgtgatcggatatgtcgcggccgagttctggtaccactcggctgcgttcgccctgttgccggtgctacgccaccatgatcacgccaggttcaagatcgtctgctattcgtgctcgccgcgacgcgatgagatgacggccgaattcaactcctatgcggacgtctgggtcgatgcctggcagctttcggacgacgaactggccgatcgtatccaggccgacaaggtggatatcctgatcgatgtgtcgggtcactcctcgggcaacaggcttccagtcttcgcacggaagccggcgcccatccaggtcacaggcttcgggcacgccaccggcaccggccttcagaccatggattatgtgctcgcagatccgattttcattcccaagtcggcgcgccatctgctggcagaaaaagtctacgatctgccatgcctgatcacgatcgatcccatcctggacgtgccgtcgtcggagcttcccatgcttcgcaacggctatgtgacgttcggcgtgttcaaccgcatcttcaagatatcggacgaggccatccgggtgtggtcgaaggtgatgcgcgcggtgacagggtcgaagatcatcatcaagcatactttgcttgacgatcccttgctgcgcgacagcctggtcgcgcggttcgtggggcagggtatcggcgaagacaatgtcatctgcatgggctcgaccccgcgcgatgagcatctgcgggcgtttgcgaatgtcgacatttcgctcgatacgttcccgcagaacggcggcatcagcnnnnnnnnnntgtggcggcagtcggtctcgaggactgggtcgccgaagatgatgagggctatgccgcgatcgcgtacaaatacgcgacgcagccggcttgtctggcgaagttgcgcaacgaattgccggctcggatcgccgcatcccccgccggcaatgtcgagatctacacgcgcaaggtcgaggcgggatatcgccagttctggcgtgactattgtgcggcggggtcggaacacggcgcgatggtatagggcatcctgccgtgcgcgagctcgggcggtgtctccgacgtgagccttccctccgcgatcacacgaacggcggcttgatgttgctgcgcttctccagccactccggcaccggcaggttcttggcgcgcatgaagtcggcgttgaacagcttggattggtagcggctgccggaatcgcagagcatggtcacgactgtcttgccaggcccgagctgtttcgcaaggcgcatcgcgccgacaatgttgacgccggtcgagccgccgaggcacaggccctcgtgctgcagcagctcgtagatggcgctcacggcctcagcatcgggtatgagataggcgtcatcgactttggctgtttcgacgatcgccgtggcgcggttgaggccaatgccttcggtgatcgagctcccgggcgtcgccttggcttcgccggtcctgaaatattcgtacatgccggcgccgtgcggatcggcgcaggcgatgcgaatggtcttgctcttctctttcagataacggctgacgccggccagcgtgccgccgctgccgaccgagcagacgaagccgtcgaccttgcctgcggtctgttcccagatctccggccccgtggattcgtaatgcgccttggcattatcgagattgttccactgatcggcgaatagcacgccattcggctcggtcttgcgcaactcgtcggcgagtcgccggccgacatgctggtagttgttggggttggcgtaaggaagggcgggcacttcgatcagctcggcaccgcacagcttcagaaagtccttcttctcctggctttgcgtttccgggatcacgatcaaggtgcggtagccgcgcgcgctcgccacgaccgccagtccgatgccggtattgccggcggtcgcttccaccacgagaccgccaggcttgagctcgccgcgcttctccgcctccaggatcatccatttgccggcgcggtccttgaccgactggcccggattcatgaactcggccttgccgaggatggtgcatccggtcaattccgaggcgcgcttcagcttgatcagcggggtgttgccgatggcttcgacaacgtcgtttcgaatgggcatgtcggggaaaatcgctaccagggggttgatcaggtctggcgagaacgtagtgcttggcaggccaaaggggaaggcctttgcggtgcggcgaaccggagcgaaacgtccgctcaaacactgatattctcgagggacgaaaccggcggaagatgcgcgtggccgcgaggcggggatatcggtaggaggaaatcatcgagcttggtcagggagcgaaatgatacgcgcttcatgagcagtcttgcgaccaattcttgctacgggcgacaccggtcgagttcgagaggcgtgggaaggccggagcgacatcggcacgaaagagccacgggggtcggcagttgacggtcttgtgagttgccggagggcgtgattgagctgaagccgcagggtgtggtcgtattgaagggctcagcagcccgtgttgcagcaatatcacatgaaatcttggtaagcttgatcgcgcttccaatgtaccgcaatccaagaagccgctgcgagacaggcacattcggcattcttgcgcgctccctgccggcgcattgacatgggcatctcgcaactgcggcactgtcccgccattccgcgcccggctagtatggttcgaggttccgcagaaagcatcacgcctgtgaacgcgtcgttcaaagcctcccgactgccccgccgcgaatcggttaatccggctgtgcggcagcggctcgttctgcccggcgggggctggatgtgacactggaagttcctgcgatcgccgcgcggcggtttctcggttctccgtcatggacgctgcgcgcggcgcgctggattgcggtgctgtgcctcggtgccggttccggtgcgtgtgtgctgacccaggatcttccagatcccgccctcgacgttcccgcgcagtacaaatatgcgggcaaaggcgatgcgccgccgtcactggattggtggcgcggcttccgctctgcggagctgacgcagctgatgcaggaggcgcagaccgtcaatctcgacatcgcagccgccgttgcgcgcatcgtccaggccgatgcccaggcgcggcaggcgggcgccgcgctgctgcccagcgtctcctctggcggctcggaaacctattcgcgcacctcgggctcgagcgcttcgggcctgtccatcggcgggcgcgaggtcgtcaattattcggcctcgctcagcgcgagctaccagctcgacttctggggccagaaccgcgccgcgctgcagaccgcagaggagacggccaacgccaaccgcttcgatcgcgacacggtggcactgacgacgctggcagccgtcgccaacgcctatttccaggtgctggcctcgcaggaccgcatcaggacctcgcagcgtaacatcgcgagcgcgcagcgcattctcgacgccgtcagggaacggcgcaacgccggcaccggcaccgatctcgacgtcgcccagcaggagagcgtgctcgcaaaccagaaggcgcttgtgccaccactgcgccagacgctcgaccagaatgtcaatgccctcgcggtgctggtttcccgcccgccggaaagcgtgcgcgtgcacggcggctccctggaccggatcgcgatcccgcgcgtgacacccggcctgccgtcggaactgctgacgcagcggcccgacattcgccgacaggaggcgcagctcgcctccgccaccgcaaacatcggcaatgcccgcgcgcagttctttccgaccatccagctcaccggcaatggaggctatcagagttcggcgctggtctcgctgttccagccgcatgcggccttcttccagctcgtcggcagcgcgacgcagccgatcttcgacgggggcaggatcctcggcaatttcgagcttgccaaggcacggcaggacgagctgcttcagatctaccgcaagaccatcatccaggcctttgccgacgtcgacaacgcactgttctcgatcaagcaaaccacgatcaggctgcaattgcagcgcgacgtcgttgccgcctcgcgccgagcattcgacttgtccgagcagcagctgcgcgccggcactgccgatatcgtgaccgtgctcaacacccagctgaccctgttccaggcggaagatgcgctgttgcaggcgcaactggcccgcctgctcgccatcgtcagcctgtatcaggcgctcggcggcggctgggagccgcgaatggagaaaccggtcaatgctctttaagccggatgcgaagcaaggcgcgggagaggggagggcgaaaagatcgcgtgcacgcggcttcgtcgtgactcttatcacgctcgcgatcctcggtggccttggttacctcggctggattgcgatgcaccagcagcaggccaacaatcgcaaccagcgccccgatctgccggtgccggtgctggcggcgaccccgcgcattcaggacgtgccggtctttctcgacggcgtcggcgcggtccgcgcgctcaacaccgtgaccgtgcgctcgcaggtcgatggcaagctgatctcggtcaatttcacggaaggccaggacgtcaagaaaggcgacgtgctcggcgagattgatccggcgatctaccaggcccagtacgaccaggccgtcgccaagaaggcgcaggaccaggcgcagctcgccaaccagcgcatcgaccttgcgcgctacgagcagctcgccgcctccaatgccggctccaagcagcaggccgacacgcagcgcgcgctggtggcgcagaccgaggcgctggtgaaagccgatcaggccgcaatcgacaatgcggcggcaacgctcagctacaccaagatcgtggcgccgatctcggggcgggccggcctgcgccaggtcgaccagggcaacatcatccgcgcgtccgataccacgggcctcgtggtgatcacgcaattgcagccgatcgcggtgtggttcagcctgcctcagcagcagatcatgcgcgtcaacgcggccgcggcaagagggcccctcgcggtcgacgtgttcggcaatgacggcgtgaccgtgatcgacaccggcaagctgaccggcatcgacaacctggtcgaccagacaacgggcacgctcaagctcaaggccgaattccccaatgccaattaccagctctggccgggccagttcgtcaatgtccgcctcaaggtagagaccttgacgcaggcgctggtggtgccgacctcggcagtgcaacgagggccggtcgggacgttcagctatgtcatcggtgaggacaacatcgtctcggccaagcccgttaccgtgacgcagcagaacgagcatgatgccgtgatagccggcggcttgtccgcgagcgacaaggtcgtcaccacgggctttgccaatctggccgacggctccaaggtgatcatcggccgcgatgaccagaccccgtcagcggatcttgcgccgcgcaagcgctcgcgcgggccggacgcccagaagaaggatggtgcgagagacggccagaagaacggccaagtcaaggagggcgagttccgcgccaagcgcaagagcagcgaaggcgaccagaaggggcagaccgggccggcaccggggccgggggcatcgggaccaggagccaagcagccatgatcccgacaacagccgcctgagcggcaggcagatcccatgggcgtctccgaacccttcatccgtcgacccatcgcgacctcgctgctcggcatcgctctcatgatcggcgggctgctgggctatttcgcgctcccggtctcggcgctgccccaggtcgatttcccgacggttcaggtgacgacgcagcttcctggcgccagccccgacgtggtcgcctcgctgatcaccgcgccgctggagcggcagctcggccagatcccgtcgctgacgtcgatgaactcgaccagctcgttcggcgtcagccagatctcgctccagttcgacctcaaccgcgacatcgacggcgccacccaggacgtgcaggccgcgatcaacgcggcggccggcgtgctgcccaagacgctgccctatccgccgacctacgccaaggtgaacccggcggatgcgccggtgatgacgctggcgctgcgctcggacacgatctcgctgcgagcgatgagcgacatcgctgataccattttggcgcagcgtttgagccagatctctggcgtcgggcgcgtctcggtgctgggcgggctgaagccggccgtgcgcatccaggccgatctggcgcgcctcgccgcctacggcatcgccatggaggatctgcgcaccgcgatcgccagcgccaatgtctcggggccgaagggctcgctcgacggcgcgcaacaatcctacatcatcgctgccaacgaccagatcgcggccgccgacgcctacaaacccatcatcatcacgtatcgcaacggctcgcccgtcaccatcggcgatgtcgcacagattatcgatggtctcgagaacgatcgcaccggcggctggtaccagggcgcgccggccgtcatcatcgacatccagcgccagcccggcgccaacgtcatcgacgtcgtcagccagatccgcgcggaaatccccaaggtgcagcgcgcgatcccggccggcgtgaacctcactatcgtgtccgaccgcaccgtcaccatccgcgcttcggtgcgcgatgtgcagttcacgctggtcctcgccgtcgtgctggtaacgctggtcgtgctgctgttcctgcgctcgctgcgcgcaacggtgatcgccggcgtcgcgctgccgctgtcgctgatcacgagctttggcatcatgtattttgccggcttcagtctcgataatctctcgctgatggcgctcacgatcggcacgggattcgtggtcgacgatgccatcgtcatgatcgagaacatcgtgcggcacatggagaacggcgacggtccgatggaggcctcgctgaagggcgccagcgagatcggcttcaccgtgatctcgctgacggtgtcgctgatcgcggtgttcattccgctcttgttcatgtcgggtctcgtcgggcgcatgttccgcgaattcgcgctgaccctgacgatcgcggtcgtgacgtcggcggtggtctcgctgacgctgacgccgatgatgtgctcgcgcctgctcaagcattcccacgaagagctggcggtgccgggcttggccgcgatcagccgcttcatcgaccgcacggtcgaggcctatcacagatcgctgctgtgggtgctggaacgccagcgcgccacgttggtcgtgacattcgttacgctgatcgcgaccctcgtgctctatgtcgtcgcgcccaagggtttcctcccgctgcaggacaccgcctcgatcacggcggtaaccgaggctgggcccgacgtatcgttcgcggagatgaagagacggcaggccgaggtggcggaggccatcagggccgaccctgatgtgctcggcgtggtctcggtgatcggtgcgggttcggtcaatccgaccaccaatgtcggccggctcgtcatgggcttgaagccgcgcggcgagcgacgggacgacatcacagtcgtcgtggcccggctgaaggagcgggtgtcgggcatccccggcatgaccgtctatttccagccggtgcaggacgtgcagatatcgacgcagtcgagccgctcgcaatatcagtacacgctgaccggtaccgatgcgacgctggtctcggaatgggcgcgcaagctggttgccgagatgcggcgcgatcccttgttccgggacgtctcctcggaggcgcaggagggaggcctgcgggctcagcttgatgtcgacaggacgcgcgcaggccagctcggcgtcagcctccaggccatcaccgacacgctcaacgacgccttcgcgcagcgacagatctcgaccatttacggccaggccaaccaataccgcgtcgtgctggaggcgctgccgatgtaccagcgcgatccctcgatcctgtcaaagctctatctcccgggcgctgcgagcgtgaccgcgggcgcgcccgccgcccaagtgcctctgtcggcggtggcgacgctgaagcgcaccacggcgccgctcgcgatctcgcaccaggcgcagttcccgtccgtctcgctcagcttcaacctcgcgccgggcgcggcactcggcgatgccgtcgaggcggtcaagaccatcgagacccgcatcggcatgcccaacagcatcgtcggcgtctacgccggcgacgccgccgaattcgccaaggcgctcgccggtcagccctggctgctgctcgccgccgttatcacgatctacatcgtgctcggtgtgctctatgagagctacatccatccgatcacgatcctctcgacgctgccttcggccggcgtcggtgcgatcctggccctgatgctatgcggtcaggatctttcggtgatcggcctgatcggcatcatcctcttgatgggtatcgtcaagaagaacgcgatcatgatgatcgactttgcgctcgaggccgagcgcgggcggggcatgtcgccgaacgaggcgatcgtgcaggcgtgtctcttgcgcttccgccccatcatgatgacgacgctggcggcgctgttcggggcgctgccgctcgcgatcgaaagcggcacgggcgccgagctgcgctttccgctcggcatctccatcattggcggcctgctgctgagccagctcctgaccctctataccacgcccgtgatctatctcgcgctcgaccgcatcaaccggcgcctcgaacaggcactgccgcctgccgaatccggcgggccgccggtcgccggtgcgaccgagggtatgcagtgatggcttcgatctcggagcccttcatccgccggccggtcgcgaccacgctgctgtcgatcgggttgttcctgctgggcgtcgtcgcctaccaatttctgcccgtcgcctcagtccccaatgtcgatttccccgccatcttcgtctcggccagccgccccggcgcggacccgtccgtgatggcggccacggtggcctcgcccctggagcggcggttaggcgagattgccggcatcaaccagatcacctcgacttcgaccctcgggaccaccagcatccagcttcagttcgacatcggccgcaacatcgacaaggccgcacgcgacgtgcaggcggccatcaacgcgtcgatggtcgacctgccgaccgacctgccgacgctgccgcgcttccggaaagccaatacggccggcgcgcccgtcttcgtgctggcgctgacctcgaaaactctgtcggccagtgcaatctacgacgttgcggatacggtcatcgcgcagcgcatctcgcaagtgcccggcgtcggcgatgtcacggtatccggcgccgaccagccggccgtacgggtgcagctcaaccccgtcgcgctctcgagtgctggcatcgccaccgacgacgtcaggaccgcgatcgtcaatgccaatccgctcggtccggtcggcatcttcgaaggcgaacgccaggccgagacgctggcgctcaatcggcagatgcgcaccgccaaagagttccgcgacatcgtcatcaagagctccaacggcaatttcgtgcggctctcggacgtcgccgacatcgaggattccgtccggaacgcccgctcgatcgcctggttcaacaaacagccggcggtgctgatccagatcaccaagcagggtgatgccaacgtcatcgacaccgtcgacagggtgaaggccctgatccccgcgctgaagcagtggatcccggccggcgtcgagatatccactctggtcgaccgtaccagcacgatccgcgccagcgtcctggacatgcaatggaccctgctggcgacgtcgttcctggtgatggtcgtggtgttcgtgttcctccgccgcctgaccccgacgatcgcggccgggatatcggtgccgctggcgctggccggcacctgcgccgggatgtgggtcgcaggtttctcgatcgacaatctgtcgctcatggcgctcgcgatctccgtcggcttcgtcgtcgacgatgcgatcgtcatgatcgagaacatgtatcgcaatctcgagcatggcatgcggccgttccaggccgcgcgggagggtgcgaagcagatcggcttcaccgtcgtctcgatcagcctgtcgctgatcgccgccttcaccccgctgatcttcatggacggcatcgtcggccgtctgctgcgcgaattctcgctgacgctgaccttcgccatcctggtctcgacgctggtgtcactgacggtcacgccgatgatctgcgctcactacatccgccagaccacgtccggtacggcgacccttttcgatcgcatcatagagggttcgctgtcgcgcatcgtggctttctacgccagaagcttgcgtgccgtgctggattatccgttggcgacattgctggtgttcttcgccacgatcggcctcaccgtgacgctctacatcaaggtgcccaagggctatttcccgaccgacgattccggtttcatcatcggcgcgacgcgcgcctcggccgacatctcgttccagtcgatgctcagcctccagcagcggctcgccgacatcgtgatgcaggatcccgccgttgccggtatcggatcgaccgtcggcagcggaggcgggccgggagcggcgacctcgaatcgcggcaccatgttcatcagcctgaagccgccggaggagcgcgaccacgtctcgacgcaagttgtcatcgatcgcctcaggcgcgcgctgtaccccgtgcccggcatccgtcttttcatgttcgcagcccaggacgtgcgcgctggcgggcgccagagcgattccgattaccagtacacgctcaccagcaccgatctcgggctgctgcagaaatgggctccgatcgtggccaagcgcatggagagcgtcgaaggcatcaccgacatctccagcaatcgcgaccccggcgggctccagctcacgctctccatcgaccgccagaaagcctcggcgctcggcgtccgggttcaggatatcgacaccgcgctcaacaatgcattcgcgcaacggcagatctcgatcatctacacccagcgcaaccagtacatgatcgtgctggagatcgacccgaagttccaggtcgatccctccaacctcgatcgcatctatgtcgccggtgcgggcgacgcccaggtgccgctatcggcggtggtgcatgctacacgcgggctcgccccgcttgcggtctatcactcgcagtctttcccttcgaccaccgtgtcgttcaacctgctgccggacgtaccgctgcaggcggcgacgcagaacatccagcgcgcggtcgaagagttgcacatgccggagggcattcgcggcagcttcgatggcaatgccggcgacttcgccaggaccgccggccgtcaaccgcttctgatcctcggtgcgctggtcgcgatgtatatcgtgttgggtgtgctctatgagagcctcgctcatccgctcacgatcatctcgacgctgccctcggccgggctcggcgcgctgctcgcgcttcagctcaccaacacgccgctgacggtgatcgccttcgtcggaatcatcctgttgatcggcatcgtcaagaagaacggcatcatgatggtggatttcgcgctcgatgccgagcgccagcgaggtctatcgtcggccgaggcgatctttgaagcctgccaggcgcgcttccgccccattctgatgacgaccatggcggcgctgttcgccggcattccgctcgtggtcgcgaccggccccggcacggagctgcgccgcccgctcggcatcaccatcatcggcggcctgttcgtctcccagatcctgacgctctacaccacgccggtgatctacctcctgatcgaccgcctgcggcggcggtccgagccgcgtccgctggcagtgccggcggaataggttgttgaagtgcagcttcaagcgtatagcgcgcccatgtccaacccgccccagaccaccgccgcgccgcccgagacgattcccgaatgcccgcactgtcagaagccgatgccgctctgcatctgcgacagcgtcgtgccgatcgagaaccgtctttcgctgctgatcctccagcacccgcaggagcaggacagggcgctcggcaccgcgcggctgctggcgaagcattttgccgacgccacagtgcgggtcggcctgtcctggccgagcctgtccaaagcaatgggccggccgatcgagaacgcctcgcactgggccgtgctctacctcggctcggcgcgcgcggccgatctggaagccgaaggcgagatcgtcgcgctcaaccgcaagggcgaggtcgcggagaatcagcgcgcgatcctcagcaagctcgaaggcatcgtgctgctcgacggaacctggagccaggcgaaggcgctgtggtggcgcaatccctggatgctcaagtgccagcgcgtgatcctcaacccggcgcacccctcgcgatacgggcggttgcgcagggagccgcggagcgacgggctttcgaccatcgaggccgcggcgacgatcctcgccgggctcgagcggcgtcccgacatcgccgagacgctgcacgcgagttttgaaaggctgcttgcacgttaccgcgaggtccaggcagagatgccggaattggcgcccagacccgccgcgaaaggccgcaggcgcgacttccgacgccgcaaacgcgcctgacggcatggcactctgggtctttcaagagcctggaagtcggcgggaaagtgggacgaaggcggttgcctaaacccttcatcccctatattgctccgcccttacggggccacgtggcggagtggttacgcaacggtctgcaaaaccgtgtacaccagttcaattctggtcgtggcctccattcataaatcactgatctatcgtcgtaattcgacttccggccgggagagagcgtcgaggcttgcccccgctgtaccgacggctttgcccacggtcagacgcactgcgcccgtgaggcgggcgtgcatccagactgccgcgaaaaaacccctcagctggccgcgtaccacccctcggggaagggcaggaggggccaggcgccttcgttgtcattggcggctttgggcgtcgtctcaagactccacgagcggggcacgaattccacctcaggcacgggcgcgacatcttcgaagaccatggcgtcccggacagcatccagcatcaagttgaattcggcttcgctcatcacaccctcgcagaacgcggatggcgcaatgtcgcaaagccggtttgtttccggattgacccgatcgctcgcattttaacgatccggcgatcgggatccgattggttagcaattcctgaaaattcctcggcgaagcctaggtgcctcctgcgcgccgcgggtgtgaaagagatcacattcccaacggtttattctcctatctcttcgtgccacgccagccgcggtggcttcggcgggagaggcagagcaggagactggtcatgaaggcaagattcctgcggtttgcgggcgtgaagagccgagcgcgcggcgcatccaccgtcgggctgttcctgacgctgtttgcctcctcggctcatgcacagggcacagcggtgcagcggcgggcctggacgcccgacgtgtaccggctccacgcgggcgagatcttgaacgtccacgccaccggcgaggcctgccgcgcggtgctcgatcaggcggggggctgagcgtgccgccttgtgagtttgtgcgcagcaagtagctcgcatgggctggcgaatccgccacggtcagcctgtggatatgctgcggacaggctgtggacgaccggacggtattctgcagatcccagtttttgtgcagccgcttgcccaaatgccgggcgcactccatccaattttttgtgcgcccgcggacaagcttttcacggcccggttccgcacgcttcctccccgatcactggaccatggcaggcgccatgacattcggaggaactggcgaaatggagaaatcggtttggccccaggcgcggcggggaatggcgcgcgcatcaacgccatggcgcaaggccacgcttggcgccgccgtcgtgttcggcctcgtcgtcgccgcaccgctcggtgcgcaggccgctccgcccgccgcctgcgccgcactccaggagaaatacccggactggaagggcaagacactcgtcaacgccatcaacccgcacacgccgggttacgagacgatcgatcccaaggaccccagcaagtacatcggtttcgacatcgatctcggcgaagccatcggcgaatgcctcggcttcaagctgacctacaagcccgtggtgttcgcagccctcttgaccacactggccgccgggcaggccgacatcgtgatctccgacatctacgccaccaaggagcgcgccaaggccgccgacttcatcacctactcgaaagtgttcgacggcgtcctggtcgccaagggcaatccgaagggcatcaacggcatcaacttgtcgctgtgcggcgccgctgccgccgaaaacaccggctatgtcgaggtgcccctgatccaggcgttgatcccggagtgcaagaaggccggcaagcccgaaccgaccatccagctctacgacaacaacgccaactgcattcaggcgatcctcgccggccgcgccgacacctacatcaacgacgtcaacaccgtcgacagcgccgtaaaggcctatccggacaagctggagaaggcgattgcggtgacgatcccgtattccgtcggcatcgccgtgcccaagaacaagccgaaattccgcgatgccgtgctcgccgcgctgatcgaggtgcagaaggccggcacgcacatggcgctccttaagaagcatgggctcgatgtgaacaacttcatggagccgggaattctcacggccgactgagcgcggtttacctctccccgacggggagaggccggcgcgaagcgccgggtgagggggcggcgcggcaaatgcggtgcagcgtaatccctcacccggctcgcatctgacgatgcgaccccacctctccctatgggagaggtggatcgagccaggctcactcgcattctgccaatttcattccgttgatgacggctgactgatgtcgctgttccttcactacctgagcatgccgtatctgctcgcgggcatcgagctcaccctggaggtgaccgccctcggactcggcggcggattgatcctcggattgatcctcgccagcatgcagctctcccgcttctggctgctggcggcgatcgccagggcctacaccgtgatctttcgcggcacgccgctgatcctgcagatggtgttcgcctacgacgcgctgccgcatatcggcatcaagctgccggcggtgctcgccgccggtctcgcgctcgcctgcaacgaggcgccgttcatcgcggagatgctgcgcgccggcgtcctcggcgtcgatcgcgggcaggtgaccgcaggccaggcgctcggcatgacgccccggatcctgatgtggcgggtgatcgcgccgcaggcgatccgcacgatgatcccggctttcggaaacgaggcggtgagcgcgctcaagaattcctctctcgcctccgtcgtcgcggtgcaggaactgacgctgcgctcgacgcagctcgcttcctcaactttcgacttcttctcgatcttcttcgcctcaggacttctctatctggtgctgaccacggccatcagcgtcatccagctctttgtcgaatggctgctcgatctcgaccggaccacgcgccgccagcgcaagctcgccgattatctgccgtggcgccgtgtcgatctcggcaccaagctcgagcttgccgctgcgaccgccgcgaatcctgagcccgcaccagcggagctgaccgacacgccgccattggccttgacgcgcgaggagcgcgcccgccgtgctgcgacgatcgcgcgcaacaacatcgcggtcgaggtcaaggacctcaccaagagctacggctcgcagaccgtgctcgacggactcgatctcacggtgcgggtcggcgaggtcgttgcgctgcttggtcccagcggctccggcaagagcacgctgcttcgctgcatcaatcacctcgaaagctgggactccggcacggtgcgcgtcggcggccggcgcctcggtttttccgaacacggcaagctgctatcgccccgggcgattgccaatgagcgcgccagtgtcggcgtcggcatggtgttccagcagttcaacctgttcgcccatctgtcggcgaaggagaatatcgccggccccttgcgttgggttcacggcatgacccggatcgacgccgatcgccgcgcggccgagttgctcgaccgcgtcgggctttcgcatcgcgccgacgcgctgccgcggcatctctccggcggccagcagcagcgcgtcgccatcgcccgtgcgctggctccgaacccgagcgtgctgctgctggacgagccgacctccgcgctcgatcccgagctcgtcaacgaggtcctggaggtcatccggcgcctcgccatcgacgacggcctcaccatgatcatctcgacgcaccagatccgcttcgccgacgaggtcgccgaccgcgtcgctttcttgagcgggggggcgatcattgaagagggcccggcgcatgaggtgctctccaacccgcgtagtccgctcaccgcgcgtttcctcagcgtgatggaagccgacaagaggccggaggcggtgcgatgagcgctgtctccgcactgttcaagattttccaggaggccacctgatgaagcatttcacgctgccggtttcgccgaagaccgtccactggggctatttctccaagaaggtcacgccggccctgacgctgcgctccggggatcgcgccaccatcgagacgctgacgcatcacgccaacgacgattacgagcggatgattcagggcgatccaggcgccgagagcgttttccagtggacgcgcgagcacaaggcggtggcccgccgtggctccggtccggtcgaaggtccctttattcgtggcgccggggaggggatcggcgtgcatcttctcaccggcccggtcgcgatcgagggcgccgagcccggcgatattctggaagtgcgcatcctcgacgtccggccgcgtccgagctgcagcgcctgtcacgccggccgttgcttcggctccaacgtcgccgcgaactggggctttcactatcacgatctgatcgaggagccgaagccgcgcgaggtcatcaccatcttcgagctcgatacctcgggcgagccctatgcgaaggccatctacaactatgtctggacgccgcagaccgaccctgacggcatcgtgcattcaaccatcgattatcccggcgtccccgtcgaccacgccaccatcaagaagcgcaagaacattctctccaacgtcaaggtgccggcgcggctgcatttcggcacaatggggctcgcaccatcggaggccgatttcgtcagctcgattccgccgagctataccggcggcaatatcgacgactggcgcatcggcaagggcgcgcggatgttctatccggtcgcggtgcctggcgcctatttttcggtcggcgatcctcatgcggcgcagggcgacagtgagctcggcggcaccgcgatcgagacgtcgctgacgggtgatttcgaattcatcctgcacaagaaggccgaccttgccggtaccagcctcgagggcctcgaccatcccatgctcgagaccgaccaggcatggtcgttctacggtttcacctatccaaactacctcgctgcgctcggccccgaggcgcaaaccgagattgccaatcattccagtctcgaccgtgcgatgcgcgatgcgttcaggaaactgcgccggtttctgatgaccgtacatggactcagcgaggacgaggcgatctcgctgatgtccgtcggcgccgattttggtgtcacccaggtggtcgatgccaattggggcgtccacggtacgatccgtaagaacatcttccggtgcgactagtgcgcggcctgtcttcggggtgagcgtgtgacgagcggagatcatttgcggcccgtcgccacgacggacgatcgcgtgcttctggcacggaggttgcttcgatcgactgcaacttgggtcgatccgatgagcttccgcccgttcacgagcgaatcctacgcgcaagacgaccgtccggaggcctggcgggacgtgctggccgctgtcggcctgcaaccggcgggtggtcacgacgtcttcgacggacatgcgagtgcatcgcaccggcgcgctgcaggcatcgcgctgacacgcatggccgcgggtgcgcagagcgtcgggccgctgtcgcgagccagcgaagacattcccatcgcactgatgccggtggaggatgggatggtgctgaagagcgccggtgatcaccgcatcgttcccgtcggtcaccttgtgctgttgccgcgcagcggcgactggagcatcgtgttccagcgcgacatgcgcgccatcgtgctgtcggtgacgtcggaggcgttgcaggggcgcctctcgggcaagccgcggctcggcgagccccgggtcgttccgccgagcggctttgccgaattgttctcgcgcctgctggatgcaaccgcgcgcacgctcgacaccctgagcgatgccgaatgggatctggtggcacgatcgcttgcagacctgctgctgacgcttgcgcatcagttggcggcctcgaactccgatgccggatcgagtgcggcgcaagccgcgctcctgcaccggatctgccagaccatcgagcgtcgcctcgaagatcccgatctggtgccggcgcgcgttgcccaggccgaagggatttccgagcgctacctgcaaaggctgttcgagacggtgggagacaatttcacccactacgtccgtgaacgccggcttcagcgcgcctgggccgatctgtccaatccgaccgcggcgcatcgctcgatctcggagatcgcctatgcctacggctttggtgactccgcgcatttcagccgagccttccgccatcgcttcggcctgccgccgcgagagtttcgtcaacaggaggcagagcgggcggcctcgcagcttggcatcgcgggccagcgcggctggccacaggaggcgctggctcaattgcgggcgcatcagagcgtagcggcgcgcagcagcatcgccccgggcgacggcgagaagcgggccacctcggagcgcaggcatcaccatctcccggtcgaggccagccgcgtgcattggggctatttcagccgttcgctgccaccgcagatcgagatcgcctccggagatacgatcaccatcgagacgctgacccagcacgcctccgacgatcccgagttgatgatcgcgggcgatgccgccgctgaaagcgtgttcggctggacgcgaaacaggaagaacgtggaccgccgcggcgcaggacccatggatgccagcgtgttcggtcgcggcgccggcgaggggtttggcgtgcacatctgcaccggcccggtcgcggtgaaggacgcccagcccggcgacgtgctggaggtgcgcatcctcgacatcgtcccgcgggcgagccgcaatccgaaccacgcgggccgggtattcggctcctcggtcgcggcttggtggggctatcattacaacgaatttcttggcggccccaagccgcgcgaggccgtcaccatctacgagatcttcgacgacgctgaggtgccgcacgcccgcgccctctattcctaccgctgggagccgcagacagaccctttcggtgttgtgcacaccacctacgactatcccggcgttcccgtcgcacccgccacgatcaagcgtcgccatgccgtgctcgacggcatcaagattcccctgcgcccgcatttcggcgtgatcgcgttggcgccgcgcgaggtcgatttcatcgattccgtgcctccgtcctatttcggcgggaatctcgacaattggcggctggggaagggggcgaccgtgtatctaccggtttcggtacccggcgcgctgctgtcaatcggcgatccccatgccgcgcaaggcgacggcgagctcagcgggaccgcgatcgaatgctcgatgaccggcaccttcgaagtgatcctgcacaagaaggcggacctcgccggtcgtcccttcgccgatctctcctatcccttgatcgagaccgccaccgattgggtgctgaccggcttcagccatcctaattatctcgccgaattcggcgcccaggggcagagcgaggtctacgcaaaatcgtcgctcgacctcgccatgaaagatgcgttccgcaagatgcgccgcttcctgatgaacgtcaaaggcctgagcgaggacgaggccatcgcgctgatgtcggccgcggtcgatttcggcgtcacgcaggtggtcgacggcaattggggcgtgcacgccatcctcagcaagcgcctgtttgaagacgcaccttgacgaggataccgaagtgaaattccacatgatcagcggcggaccgaagccggtcgcgccattcagccacgcggtcgagaccgatggcttcgtcttcgtcacgggccagatgccggacacgccgcaggcaccaggagtcttgcccgacggcatcgttgcgcagacccgtgcggtgatggagaacttgaaggtcgttctggccggcctcgatctgggcctcgagcacgtcgtgatggcgcgtgtatatctgacgcgcttcaatgaggactacacggccatgaacgagacctaccgcgcgttctttccgccggaccggctgcccgcacgcacctgcgtcggcgtcaccgggctcgcttatgaggcgctgatcgagatcgacctggtgtgccggcggccctaggcgtcacaaggcaaggtcgatcgccccggaacgtctcgcgtgctcatcgctccctcattgcgagttgagatcagcatcgagagtccgcagaaagactctggacttctccgtcgcgaggggctcctcgccagatggcggtgagagcttgcagttcgcttcaaattgcaacttttgcgtgcaggaagtcttgattggcggtgcgctaggggtgatcggccggcttgaacgcgcgcccgaaccacggcgactaaccaacagagtgcattggatcagaggaacgtgatcagcttccttcttcctaaagcaccaaaatggtgctttagtgctttccatgaagcagtcgccccgcaacgctccctctgccctgcgttacaggctcgttcccgacgcggccgccaaggctgcgctggaggcaacgtttcaggcttatgaccggatgatggagatcctcgacgaggtggctcgtgcgcacaatgtcggctccaatgtcgtcctgctccatgcccatgcctacgagcccgtccgcaaacagacggggctgccgtcgcggttggtgacgctcggcctgcgcgatcgcgccgagtatcgcgcggcgcagggccgccggcttccgctcgacgacaagctcgtcaagatcaagggaccggccgctgtgtcgatcgcgaccgtacaagggcgcttcagcgtgcctttcgactatgccggctatgtcgagggctgggggcagagcgtgcccgcgcacctcatccgcaccgacgacggttttgaaatccactacggcgtcacgccgaacagtttgccagaggaggagaatgccatggataccatcgctgccgctcccgaaaatttcctgtcccgggtcgggcgcctgatcgccggcatcgcttatgacgcgatcgagcaggcggaaggcaagaacaagctgaaggtggtcggacaggccatccgcgagatcgagcgcgccgagacggaggcgcgcgatgcgctcgcggccgcgcgtgccgaggaatatcgcctcaacgcgcgccgtaccgagatcgagcgccagatggccgatcttgcgcccaagatcgaagccgcggtcgctgatagccgtgacgatctcgcgcgtgccggcatcgcgcgacagatggatctggaggcacaattcgaggtgctctcgcgggccatcgacgagaacaacgagaagatcgaacagtgcgtgacatcgcttcgcgccgtgctctcggcgctccaggacgccgagcagcgccgcgccgatctcgaaaagagcgaggcggccgcgaaccatcaaacctcggcgtcgccgcggaagcagggcggcagctcggcggccgcgaaggcgctgcgggcaggacgggcagtggcacgcgccaccggcgtaccccctggcatttcctattcgagcgacatcgacgagctcagcacattgcatcgagacaaggaaattgcggcaaggctggcccggttgaagtcgggctcctgagtgccgtgtcatgagcgctctgctcgaacacgtcatggcgccggaggtcaggccgttcgcgatcgcggcggccatgatcatcatcgtcggctcgatcgagatcgtctcgattctggtgggggcttcgctcagcgaaatactcggcaccaacatcgatttcgctcaccccagcgacaatggcgtcgtcaatgccatctcctggatcaatgtcggcggcgtaccgctcttgatcttcctgctgctgctgctgggcgtcttctccatcaccggattcctgatccaggacatcgcacgaatggttgcgggtcccttgccggcgacagccgcctcggtgggtgcggtcgtggtgtcggttccgctggtccgcgccgcaagcaggaccatcgcgcggctcattcccaaggatgaaagctatgccgtcggcctcggcgatctcgtcggccgcatcggcgaggtcgtcatcggcccgctcgaccacgggccgcctggccgcgtcagcgtcgccgacgtccacggcaatcgccactttgtctcggcggtcgccgcgccgtcatcgggacctttgccgcagggaaccatggtccttctggtcgaccgcgacggcacccgtttcgtcgcggtgaaagctgacgatgaactcaagccgtccaagcccagtctaagcagttagcaagccccatccagcggagagagtccatgttcgacattgcagtcccggccatgatcggcgtcgcgctgatcgtcgttctggggatcgtcttcaccatcctctacaagcgcgccacccgcgacgaagccttcgtgcgcaccgggcttggcggcaagaaggtcgtgctcgacgggggcgccatgatcctgccgatcttccactcctatgcctgtgtcaacctgaagacgctgcgcctcaccgtcgagcgcaaggagcgggaatccctcatcaccaaggaccgtctgcgcgtcgatatcgttgcagagttctacgtgcgtgtccgccccgacgaggagagcattgcgctcgccagccagacgctgggtgcattgaccaacgatgccgaggcgctacgcaaccaggtcgaggcgaaattcgtcgacggcttgcggtcggtggcggcgaccatgaccatcctggagctccaggagaagcgctcggatttcgtcaagcacgtgcagtcgacggtcgagtccgacgtgaagtcgaacggcctcgagctggaatcggtgtccctgacgaagctcgaccagaccgacgtgaagttcttcaatccggaaaacttcttcgacgccgaaggtcttacccagctgaagaccatcaccgagacccgtcgccgcgaccgcaatgcgatcgtgcgcgacaacgaggtggcaatcgcgcagaaggacctcgaggcgcggcagcagacgctgaccatcgagcgcaccaagaaagaagccgagctgtcgcaggagcgcgacatcgccaacaagaccgccagcacccgcgccgaggtcgcaacagcgacgcaaaccgcacgcctgaccgaggagaacgcgcgcatcgataccgaccgtgcggttgccgagaaggaggcgggtgccaagcaggtcaaggagaccgcagtcattgaatcggatctagcgatcaacaagcgcaggaccgacgcccagcgcgagatccagatcgcgacccaggagaacgagatccagatcgcggccaagagcaaggagacctcggaagccgtcgccgaagccaagaccgcagaagcgctcgccgtctcggcggaagaaaaggtcgtgaccgcgcgcgccgtcgaagtcgccgatcgcgcccgcctgacccaggtgctcgctgcgcgcaccgaggccgagcgcaagtcgaccgaggtcatcgtggcagccgaggcggagaagagggcggcgctcgaccgcgccgaggccatcaccacactggccaccgccgaagccgagtccaacaagatcaaggcggtcggcgtcaggaacatcggtgaggcggaggccgccgtcatcacgatgaaaaacgaggcgcagaacaagctcggcagcaacgtcatcgatttcgagatcgccaagaagcggatcgagacgatgccctcggcgctggccgaaatggtcaggccgatcgccaatctgaaggatgtccgcatcctgcacaccggcggcgcgttcggcgggaacggcaccggcgcgggcggcaatgtcggcttcggcgagggtctcgcgggcgagctcctgaaggtgcatgcgctgcgtccgatgatcgacgagatcctgcgccagggcggctttgcgccggacgacgatcccgtcaaggcgctggtgggtgccgttactgggaagagcaacggcgcggccgtgccgacgccactcccggagaaagcaagcgccgcggatctgtgaaggtcagttcattgctgccgagaatgcgcagcgcatctcgcgtcgcgaatcgacaaggtgctgcagaccccggccagcacgtttgtcggttcgacgacgaaggctgcgtctggaacatccgcgttgattggcaagacgaggacgaggcggaagaacgccaacctctcccagtcgccgcgctgcgacgccggaccaagcaattcgttcctcgcggcatagtgcgtggccggggttggctggaggaggagccattccagccccctttctcaagacgcattgcggacgatgacgaattcgtcctttgcaagcgcaagcggctttgttatacgcagccgcgcgcgaacgaacggttcgccttttcctcggtagctcagcggtagagcatccgactgttaatcggatggtcgctggttcgaatccagcccggggagccaaatccttcaagtatttctgtggtttaggctcgtgatctagcgtggcgagtgaactcgctcgcgtagtgctggagcatgtcccaaggggtggatcgcacgtcaaaaggatgcgcgggcgcggtgacgccatgcggacggcgccaaatcgacccaatccggatgcagcattgagttgccggacatttacggagccgattcccatgccagacatcccggtcgaccgctctcacatggccccctcgattctgccggcgggcgttcccgagctcagcgacgatgaatgcctcgcctgcctggcgcgcgcggtcgagacgccggattccgcccggctgggcgaggtcgccgctctgatcggccgcctcgcggtggcgatcgaataaggctgatcggccgggctccgagggagtggcgtagcctggtgtctcaggtctaccggccatgttgcgttttgaccgagcatgctccaaagatgccgcgaattctcgtccgcggcatcgtccgcattgcagggtccgcaaatgtccggtttttcgaccgcgcgccaaaaaatggtcgatggccaggtgcgcaccaatgacgtcaccgatcgtcgtgttctcgatgccatgctcacggttccgcgtgaggccttcgtgccggccgccaggcaggcgctatcgtacctcgatctcgatctggacgtcagcgaaggggcggccaagcggttcctcatcaagccggcgctgaccggcaagctgctccaggccgctgagataggcgaggttgacaacgtgctggtcgtcggttgcgccaccggctacctggccgctctgagcgccaagctcgcgcggcagatcactgcgaccgagtgcgattcggccttggctgcgaaggccaaggccgccttcacctctctgggacttgccaatatcgcctgcagggcggcggcctgccccgagggagatccctccgccgccccctatgacgtgatcatcctcaacggcgctgccgaggtgttgccggaagctctgctcgggcagctcaaggaaggcggacgtctggtgggggtctcggccgagtccaagccgccgcgcgccatgctcgtgacccgtacccacggtgaattcggccatcggacgctgttcgacgccgcagccccggtccttcccgggctggaacgggcgcctgccttcgtcttctgagcccacagcccgttaaaatcccgttccgaatcagaagtgtggccgggatgctgcacgtgaagagtttccactgagaacccctcccgggtagttccgtcgcgcttgaccgcgtcctatgttgcggcggggcagcgactccactggtagacggtacctagctcgcgggcacgagccgggcgttagaatgaacggaattcagggatgcatggggtgaagctcttcaccggagctgcggtttcggtcctgctgctcgcgcttgccgggccgacgcctgccttggcggagaccatggaaggcgcgctggtgcgtgcctatcaggacaatccgcaactcaacgcgcagcgcgcccaggtgcgctcgactgacgaaaacgtgcctcaggccctgtccggctatcgtcccagggtctcgctgtccgcgagcgctggttatcagtactcggacttcaagagcagcagcaccagcgttccggctaacgggaccggcatcccccgaagcgtgggactgactgcttcccagacattgtacaacggcaaccagacggccaatcggacacgcgccgctgagagtcaggtgtccggagcccgcgaagccctgcgcagtcttgatcaaaatgtgctgctccaggcggccacggtttacatggactatctgcgcgatgccgccacgctcgaagtccagcgcagcaacgtgcgcgtgctcgagcaaacgctgaagcagactcgtgaccgtttcaacgtcggcgaagtgacccgcaccgacgtcgcccaatcggaagcgcaactggctgccggcaggactcaggcgctcaccgccgaggcgaatctcaccacgacgcgcgcgaacttccggcgcatcatcggcaacgagccaacgaatctggcgccaggttcgcccgtcgatcggttcctgcctccgacgctcgcttcggccatcgagctcagtctggtcgagcatcccaatgtgacggccgcaatgttcggcatcgacgtcaactttctgcaggtgaaagtcgccgaaggtgcccttctgccgaccgtcactttgcaggccagcgccacgcaggcatacgaacaatccctgatccagtatagggcgttcaacgctgccgcgatcgcgcaggtctcggtgccgatttatcagggcggtagcgaatattcgctgatccgccagtccaaggagaatctggcgcagcagcgcctcaacctcgaaaccacgcgcgaccagactcgtgcgaccgtggtgcaatggtggggatcgttgcaggccaccaaggcgcaggtgcagtcagcccagtctcaggtggctgcgtccgagatcgcgctgaacggcgtgcgcgaggaagcgaaagccgggcaacgcaccacgctcgacgtcctcaacgcgcaacaggcgctggttaacgcacgcgtcgcgctggtcacggcgcagcatgatcgcgtggttgcgtcctataatgttctcgcggccgtcggccgcctgtcgccgcaggtgcttggtctgcggaccacgacctacgacgcaagcgttcactaccatcaggtccgcgacagctgggcgggcgtacgcacgcccgacgggcgctgattcccgtagtcatccggtcgacctcgcaaacagctgaggtcgaccggtgctttgcttgcaatcgtcaaattccctgacatagccttgccaagatgatgcgggtcgattcgcccgcgttgatgtcgtgtgcgtaaggcttgagtgcccgggggcaggggcgcaccgctgcacgttgagccgtgatctggggacaagtcgggccgccgcgacgaaaatgacgggcctctcgttgcggaaccggccaatcctgtcgtgcttggtgtaaaacaacgcatgcgagggcgttgatgatgtggagtcggagatgacgcagcctgcaaaggttacagaaccctcgatggaggagattctggcctcgatccggcgcatcattgccgacgatgaggccaagccaccgccggccgaggccaccaagcccgagaaggctgcagcgccggccgctccgccgaagccgcaggccatgaacgacattccaccatccaaggtcgctcctgccaaaccggccgctgagaagcctgcgccgccagctgcgaagccggctccagcggcgccacccgcgccggcggcggatgcctccaacagccaggacgatatcgacgcgctgctggctgggctcgacgcagctacgcctgcgcccgaggtccgtgcccccgagcccgagcccgagcccgagccggaacccgacgtgctcgagctgacggacgagatggtgatggatccgacaccgcctccaccgccgccgagcttccgcaaggtcgagccgcgggacgatcttgaattcgccgagtcgcccccccgtccgacgccgccaccttcctacgcgccggtggatttcgacgcgccgccactgccgccgcagcagccgatcctggcgcaatcgacggtctcggcggtcgaatccgcgttcaactccctggcccatacggtgctcagcagcaatgcacggacgctggaggatctggtcaaggagatgctgcggccgatgctgaagtcctggctcgacgacaacctgccgggcctcgttgagcgcatcgtgaaggcggaaatcgaacgggtctcgcgcggcggccgataggaaggatatgcccggccctgatatggccccgcttgtgcgccatactggcgtttgagcggaccggagcgcccgtctgcgctcacctttgttgacttgtccgttgacttggccccctcgcgcggctttctaacagcccatgatcgagaaaaattaccagcccgccgatatcgaaacccgcatgtccgtcgtgtgggaggacagcctcgctttcaaggccggccgccctgatcgccgtgatgccgtgccctttaccattgtgatcccgccaccgaacgtgacgggctcgctgcacatgggccacgcactgaacaatacgctgcaggacatcctgtgccggttcgagcgcatgcgcggccgcgacgtgctttggcagcccggcaccgatcatgccggtatcgccacgcagatggtggtcgagcgccagctgatggagcgtcagcagcccggccgccgcgagatggggcgcgcgaagtttctcgaacgggtctggcagtggaaggccgagagcggcgataccatcatcaaccagctcaagcggctcggcgcctcctgtgactggtcgcgcgagcggttcaccatggacgagggcctctcgaaggccgtcgtcaaggtcttcgtcgaactgcaccgcgagggtctgatctacaaggacaagcggctggtgaattgggacaccaagctgctgactgcaatctccgatctcgaagtgcagcagatcgaggtcaagggcaacctttggtatctgcgctacccgatcgagggcaagacattcagcccagatgattcctccagcttcatcgtcgtcgccaccacgcgccccgagaccatgctcggcgacacgggcgtggccgtgcatcccgatgacgagcgctatgagaacctgatcggcaagaacgtcatcctgcccctggtcggccgcaagattcagatcgtcgcggacgagtattccgatccggggaagggctcgggcgcggtgaagataaccccggcgcacgacttcaacgacttcgaggtcggcaatcgccatggcctgcgtcggatcagcgtgctcgacagggaggggtgtctcgatctcctcgacaacgaagactatttgcgggacctgcccgaaggggcttcgcaattcgccgaggagttccacaaggtcgaccgcttcgccgcccgcaagcgcatcgtcgagcggctggaatcgttcggcttcgtcgagcgaatcgagccgcacacccacatggtgccgcatggagaccgctccaacagcgtgatcgagccgtatctgaccgaccaatggtatgtcgacgccaagacgctggcgaggcctgcgatcgcggcggtgcgctcgggcgaaacgacgttcgtgccgaagaactgggagaagacctatttcgactggatggagaacatccagccctggtgcatctcgcgccagctctggtggggccaccagattccggcctggtatggccctgacgggaaggtgtttgtcgccgagaccgaggaggaggcgatcagccacgcccttggctactacgtcgagcaggaagtcatcaccccggagcaggggcgcgagatggcgctcgaccgtaacaagcgcgaaggcttcatcacccgtgacgaggacgtgctcgacacctggttctcctcggcgctgtggccgttctccacgcttggctggcccgacgatacacccgaggtgcagcgctattatccgaccaatgcgctggtgaccggcttcgacatcatcttcttctgggtcgcccgcatgatgatgatgggcctgcacttcatgaaggaagtgccgttctccaccgtctacatccacgccctcgtccgcgacgagaagggcgccaagatgtcgaagtcgaagggcaacgtcatcgatcccctcaacctgatcgacgaatacggggcggacgcgctgcgcttcaccctggccgcgatggcggcgcaggggcgagacatcaagctcgccaccagccgcgtcgagggttaccgcaatttcgcgacgaagctctggaacgcgtgcaggttcgccgagatgaaccactgcgcagtgccagaaggtttcgcgccggcgaaggcgaaggagacactcaaccgctggatcgcgcatgagaccgcgcacaccacgcgtgaggtcaccgaggccatcgaggcctatcgcttcaatgacgccgcaggcagcatctaccgcttcgtctggaacgtctattgcgattggtatgtcgagctcgcaaagcccatgctgctgggtccggacagcccagccaaggacgagacccgcgccatggtcgcctgggcgcgcgatgcgatcctgaagctgctgcacccgtttatgcccttcatcaccgaagagctgtgggaggtgacggccaagcgtgagggcctgctcgcgctggcgccgtggccgctcaagccggtcgggccgacgccggagcaactcgcgatgctcgccgcgacgacggggccgaccgatgcgctggtctcgccggcctgggtgctgccgatcttcgaccatgccgacttcactgatcctgcggcggaggccgagatcggctgggtgatcgacctcatcacccagatccgctcggtgcgcgccgagatgaatatcccgcccgcgacgctgacggcgctggtgcttgcgggcgcatctgcggagaccaaggagcgcgcccctcgctggaccgatgtgatcaagcgtatggcccggttgtcggacatctccttcgccgaccgcgcgcccgacggcgcggttcagcttctggtgcgcggtgaggtcgctgcgctgccgctgaagggcgtgatcgacgtcgccgccgagcgcacgcgtctcgacaaggagatcggcaaggccgacgccgacatcaagcgtgccgagtccaagctggccaatgagaaattcgtcgccaacgcggccgaggaggtcgtcgaggaggagcgtgaaaagcgcgaggcggcgctggcccgcaaggccaagctgctcgaggcgctggagcggctgaaacaggcatcgtaagcctatttcggaaatggcttgctcaagaacttcgagcccttgatgccatagcgccagggaagttcgaccgccttggtgatgccgatccgaatcccggttgcgacctccacatcctccgtccgcgcatgcagcgcgatcggcgggcggtccagcggcagggcgttgtgcgcgatagtgatgccgagcgcctcggtcagcttgcctgggcccgagcatagcgcatgcaagtcctgcaggtgccgccggcggcgcatcgcagccaggccatgcgtcggctcaatcgcgcggatcagtacggcgctggccgagccttcctcctcgcagacgaagttcacgcaccagtggatgccgtaggagcgatagacataggcaaagcccggcgggccgaacatgacctggttccgcggagtcggcccgcgataggagtgcgcagccggatcggtgtgatgatacgcctcgacctcgacgatgatgccgccgacgccgtcgaccagcatggtcgcaccgatcaggtcaggagcgacctcgtgaacgctgcggctgaaaaaggcccgcttcagccgcttgccaagaggcggggatgagatcttcgagattggagccattcgaggtgagaatcgcctgagaacagagcaggatattgcccatatctgccatgttccctgaagcggggcgaggcgggttgcgatgcctggccagaccgactaggtagggtctgaacagaccggacaccccatggtcgttattgtcgataccatctcgaacccgttgcgcccgcgccaccctgaaaaggtgaaccggcccgattccgcttcgccgccgaagccggactggattcgcgtgcgtgcgccgagcacccgcggctacgccgacacccggaacatcgtgcggtccaacggcctgcacacggtttgcgaggaggccggctgtccgaacatcggcgagtgctgggacaagaagcacgcgaccttcatgatcatgggtgacacctgcacccgcgcctgtgccttctgcaacgtcaagaccggcctgccgaatgcgttggatgcggccgagccgcagaacgttgccgaggcgaccgccaagctgggcctcgcccatgtcgtcatcacctcggtcgatcgcgatgacctcgccgacggcggtgccgagcatttcgcgcagaccatccgcgcgatccgggtcgcctgtccctcgaccacgatcgagatcctcacgccggatttcctgcgcaaggatagcgcgctcgaggttgtcgttgcggcgaagcccgacgtgttcaaccacaatctcgagaccgtgccgtcgcgctatctcaccgtgcggccaggcgcgcgctatttccactcgatccggctgctgcagcgggtcaaggagctcgatcccaccatcttcaccaagtccggcatcatggtcggcctcggcgaggagcgccacgaggtgctccaggtgatggacgacctgcggtcggcggacgtcgacttcctgaccattgggcaatatctccagccgacgcgcaagcatcacgccgtgatgcgctacgtgccgccggacgaattcagttcttatgagaaggtcgcctacaccaagggctttctgatggtgtcggcgagcccgctgacccgctcttcgcatcatgccggcgaggactttgcccgactgaaggccgcgcgggccgctaacgcccgctgaaccgatatgccccgtttttcgagcaagcgccgtgtcaatcacagcgcacccgagatgttcgatctggtcgccgacgtcgagcgctacccggaattcgtgccgctgtgcagcgcgctgaaagttcgtcagcgcatggccaagcccgatggcaccgaggtgctggtggccgacatgacggtgtcgttcaagctgatcaaggagtccttcaccagccgggtgacgctagatcgcgccaacctgaagatcctcgtcgaatacctgcaaggacccttcagcaacctcgaaaaccgctggacgttcgagcccaaaggcgagggcgtctgcgatgttggtttcttcctgtcctacgagttcaggagccgcatgctcgcgatgctgatgggctcgatgttcgatgccgccttcgcgcgcttctccacagcgttcgagaaacgggcggacgcgatctacgggcggccgaagctcgcgtcgacgtagctgccgcaggcaccgatctttccaccgtcattgcgaggatctcttgcgacgaagcaatccagatctctccgcggaaggattcggattgctttgttgtgctcgaaatgacggtggagaaacccatgcaatccaccgccttcgctattgggccccggcgcacatgagtgcgtagcctggatgcagtgcaaagcaaatcaggcccgccgactctgcgtgagcgattcctgattgcgcgacgctccgacacgttacgagcctacgttccctatcaacatccgccgggatcatttcgcggtgccacgagttctctccggattgtctcgggttggagtcaccatgaccatcaatttcgatacgctgaaagcatcgctcatcctgtacggcttgaacgcgatctatgcgatcctgctgttggcggtcggctggtatctgtccggcgcgatgcaccgtttcgttgctcgcgtcctgagcgtcgcgcaccgcgtcgatccgctggtgacgttgttcgtgggcagcttggcgcgctacggcgtcctcgccgtcgtcggcattgccgtgctgcagctcttcggcatccagaccgcgagccttgtcgccgtattgggcgcgacatcgctcgccattggtctggcgttgcagggcacgctctccaatatcgccgccggcgtgatgctattgttgttccggccctttcacatcggcgacgatgtcgaggttgccggcaaggcaggcaaggtgagatctctgtcgctgttcatgaccgagctggtcgcgcccgacaacacgcagatcctgctgcccaacggacaggtttggggcgcggccatcatcaaccacagcacctatccgggcacaggcgagatcaaggtgacgtttccggtaccggcgagcgccgcttcggctctcgctgatcgcatcctgaatgagcttcgcagcgattcccgaatggacgatcaggctgcgccttcggtcaacatctccagagtcgtcgatgttgccaatccggcgtcgccgatcctggagctgactgtgagtgcgaaggcaaagccctcggaggcgaacgcggtcaggcagtgcgtgctcgatcacgccagcgcgctgctcgcagcggcgtagaggcttggaaggcgcagtcgttcagctccgcggcgaacgcggcgacctgcgcttcactgcatgccggcgcggcgagcgtgtcacgcgcgggcgcaggcggctggcggcggcacgctgcggcttggctgcgacttgcggcccgcgggcgagatccatcagcatgcgcagcgcctcgaccaccgagcgggcgcgcaccgcgctgcggccaatcgcgccgaaacgatgctcgcggtggatgatacggccgtcgcgtgcggcggcggcaaagtgcacgagaccgaccggtttaccgggcgtggcgccgccggggcccgcaatgccggtgatggcgaccgcgagatcgacatcggcgcgctccagtgcgccgatcgccatagcggttgcggtctccttgctgactgcgccgaaattcgtcagcgtgcttggctcgaccccgagcatgacgcgcttggcgtcattggaataggtgacaaagcctcggtcgatcacgtcggaggagcccgggatgtcggtcagagcggccgcgaccagaccgccggtgcaggattcggcagtcgcgatcgtcagcttgcgcatccggcaaagatcgagcagcgagcgggagagggcgcgtgggtcgctgccgcccatgatcttacacgctccagggaaggcggatggtggcgctcgcggtggccgcgatgccttcctcgcggccggtaaagccgagccgctcgcttgtcgttgccttcaccgcgatgcgggagatgtccacgcctgatatctcggcgatgcgggcgcgcatggcgtcgcgcaaggggccgatcttgggccgctcgcagatcagcgtcacctcgaggttggcgacgcggccgccgcgctgggcgacgcgctcgatggcgtatttcaggaactgatcggaagaggcgcccttccacttcgcatcgctcggcgggaaatgcgagccgatatcgccgtcggcgagtgcgccgaggatcgcatccaccagcgcatgcaggccgacatcgccgtcggaatgggccaggaaacctttggtgtgcggcacccgcacgccacaaatcatgacatggtcgccttcaccgaaggcgtgcacgtcatagccggtgccggtcctgatatcgccgagctgggcggccaagcgcgcttcctcgcgcacgaaatcctcgggggtggtgagcttcatgttggcaacatcgccttcaaaggttgcgaccgtcaatcccgcccattcggcaatcgccgcatcgtcggtgaaatcgctgcgcccgtcctttgccgcgcgacgatgcgcctcaaggatgacgtcgaaacgaaaggattgcggcgtctgcgcgatcctgaggcgcgcccggtccggtgtgtcctcgacttcgccgttctcgccggtgagcttgatcgtgtcggtgacgggaacaacggggatcgcggcgccggtgcggctcgccgcctcgatcgcgcgggagatcacgcctgccgaaacgaaaggacgcgcagcgtcgtgaatcaggacgatgtcgggctcgtgcctggcgagcgcctccaggccggcgagcaccgaggcctgccgcgtggccccacccatggtcggcggctcgtgcatcagccctgcgaccgcagccgtgaacatggcgctgtcgtcgggattaacgacgggctgcaccgctgatacgtccggatggcggctgaacgcctccatggcgcgatagataacgggcacaccgccgatcgtccgatactgcttcggtccgccggcgccagcgcgcaggccgcgtccggcagccaccaggacgaccgcggtgcgttgtgatttcgccataggactgaagtactcagttgctgatgaagggcaggatttattgccggcatgcctctagcacggcaggcccgcaaaaaaagggggtttccccggattgtgggaaacagcattttgctgcactgcacttgaaagatttgcagaactgtctaaactgtaggcatgacgcttgactgcacaagaattgtgcgcaagatagatcatggcaggcgcgatgaggccctgcctagtcaacgagacccctgtgaccggcccggcagtattcggctctaagccgttgaaaataggcgatattgatgtcgccaccccggtcttcctggcgccgatgtcaggtgtgacggactcgcccgtccgccggctggccgccgagcttggggccggtctcgtcgtctccgagatgaccgcgagcgatgagctcgccagcggccaccggatgtcgcggttgcgctgcgaagccacgggaatcggtccgcacgtggttcagctcgccggctgcgaacggcattggatggccgaaggtgcccggatagccgaatccgaaggcgccgacatcatcgacatcaacatgggctgcccggcccgccacgtcaccggcgggcagtcgggctcggcgttgatgcgcgatctcgaccatgcggtcagcctgatcgacgcaaccatcgcggcggtgaaggtgccggtgacgctgaagatgcggcttggctgggacgaccgcacgcgcaatgcgccggaactagcgcggcgcgcggaggcatcaggcgtcaagctcgtcactgtccatggccgcacccgttgccagttctacaagggcgaggccgattgggatgcgatccgcgccgtgcgcgaggccatctccattccgctcgtcgtcaatggcgacatcaccacctacgagaaggcgctcgcagccttggaggcctccggcgccgacgccgtcatgatcggccgcggcgcgcagggccagccctggctgcccggtcagatcggtcgccgtctcaacggcgggcctgaggaggccatgccctcactcgaagcgcagctgcagtacgtccgcacgctctatgacggcgtttgcgcgctctacggtttgcgcatcggtctcaggcatgcccgtaagcacctgggctgggcgcttgatgtcgccgcgcaggcgagccgtgcccccgctgagaagctgaaatcctggcgccagaagatcctggtctcggaggatccgcgcctcgtccaccaatcgctgcaagacgccttcgacgatttcgcatggagggctgctgcatgagcttagccgctgaacatcgtcggccgtccgacagcgacgcgatcctcgatgcacttcccaatcccgttctgatgatcgggccggacggcaagattgtcgctgccaatatcgcgaccgaagccttcttcgagatctcgacccagttcctgaaacggcagtcgctgaaggaactggtgccgttcggcagcccgctgctggctttgatcgaccaggtgcgttcgtcgaattcgccggtcaacgaatacaaggtggacctgggcacgccgcggatgggcggcgaccgtcaggtcgatctgcatgtcgccccgctgacggagcggcccggccacatcgtggtgatgctgcaggagcgcaccatcgccgacaagatggaccgccagcttacccatcgcagcgccgcgcgctcggtgatcgcgctcgccgcgatgctggcacacgagatcaaaaacccgctctcaggcatccgcggcgcggcgcagctcctggagcagcaggcctcgtccgaggaccgcatgctgacgcggctgatctgcgacgaggccgatcgcatcgtgacgctggtcgaccgaatggaggtattcggagacgagcgtcccgtggtgcgcggccccgtcaacatccattcggtgctcgatcacgtgaagcggctggcgcagtcgggctttgcccgcaacatccgcttcgtcgaggactacgatccctcgctgccgccggtgctggcgaaccaggaccagctcatccaggtgttcctcaacctcgtgaagaacgccgccgaagccctgatcgacgtaccggacgccgagatccagctcacaacagcgttccgccccggcgtgcggctgtcggtgcccggtcagaaatccagggtatccctgccgctggaattctgcgtgaaggacaacgggccgggcgtgccggacgatcttctgcccaacctgttcgatcccttcgtgaccaccaagcagaccggctccggtctgggccttgcattggtcgccaagatcgtcggcgatcacgggggcatcatcgaatgcgaatctcagccgcgcaagaccaccttccgcgtgctgatgccgatgtattccacatcggtgaaacatgccgatcaaagcagtcgcgccgactctgccgggacgtcgtcgcctgcgtcacagggggcaaaatgaggatcaacgatgcccgcaggtagcattctcgtagccgatgacgataccgccatccgcaccgttctcaatcaggcactgtcccgcgccggttacgaagtgcggctgaccggcaatgccgcaacgctgtggcgctgggtcagccaaggggagggcgatctcgtcatcaccgacgtcgtgatgcccgacgaaaacgccttcgacctgttgccgcggatcaagaagatgcggccgaatctgcccgtcatcgtcatgagcgcgcagaacacgttcatgaccgcgatccgcgcctccgagcgcggggcctatgaatatctgccgaaacccttcgacctgaaggagctgatcgccatcgtcggccgcgcgctcgccgagccgaaggagcggacctcgacgccggacgaggacgccgagatggaggcgatcccgctggtcggccgctcgccggccatgcaggaaatctaccgcgtgctcgcgcggctgatgcagaccgacctcaccgtgatgatcacgggcgagtccggtaccggcaaggagctggtggcgcgggcactgcacgattacggcaagcgccgcaacggtccgttcgtcgcggtcaatatggccgcaatcccgcgcgacctcatcgagtccgaattgttcggccacgagcgtggagccttcaccggtgccaacacccgcgcctccggccgcttcgagcaggccgaggggggcacgctgttccttgacgaaatcggcgacatgccgatggaggcgcagacccgcctgctgcgggtgctgcagcagggcgagtacaccactgtcggcggccgcaccccgatcaagaccgacgtgcgcatcgtcgcagcctccaacaaggacctacgcgtgctgatacagcagggcctgttccgcgaggatctattcttccgcctcaacgtcgtcccgctgcggctgccgcccttgcgcgagcgcatcgaggacctgcccgatctcgtgcggcacttcttcgcgctggccgagaaggacggcctgccgccgaagaagctcgacacgctggcgctggagcggatgaaacagcaccgctggccgggcaacgtccgcgagctcgaaaatctcgcccggcgcctcgccgcgctctatccgcaggacgtgatcacggcctctgtcatcgacggcgagctcgcgccgccttcggtcagccccggcgccgcggttcagcagggcgtcgacaacctcggcggtgcggtggaggcgtatttgtcctcacacttccagggatttccaaatggcgtgccgccgcccggcctttaccaccgcatcctcaaggagatcgaggttccgctgctcacggccgctctcgctgccacccgcggcaatcaaatccgcgcggcggacctgctcggtctcaaccgcaatacgctccggaagaagatccgggacctcgatatccaagtctatcggagcgggggctagtctctcggagcggaaggtggctcagctccccctacaaaggcagagctgagcctgtccggatcgcgctggccgttgtggctgacgcggtgagcagaagtccggagcggaccgaaatgttccgctcgcgcgtccaagctggccgattggccgcaacgtgtgacgtcgcatcgatttgacaggccttccactgacgccggcatcatgctggcgacatccacctccgcctgctgacggccgaggccattgaccataaggtcggcggccacgatcagcagcagaacggccgacaccatcgttgcgagaaagatcctatccatgccggatcaagccgggatggtcggaatccgttccaccctgacgggcaagatgtgcctgtggattgcgccgctccgccgcgcgcgcagcgccgcggaattgtcgcaattcagcaacaatgtggtacgaatacatcagtatccgcccatcgcggacccgttttcagcacccaccattgccggaatgaccagcgcagacacctcggccgcacactttgacacgaccccagcggaagagccccggcgctggtcggtgcggcgctggctggcgccggttgcggtggcgctggcgctgctgtcggccttcctgactttcctggttctcaccggcctcaccaggatcgagccgacgccggaggttgtccgcacgttctacctcatcaatgcagccacgatcctgctgctggtcggcatcatcatccgcgaactctggcaattgatcctggcgcgaagaaggggcagggcggcggcgcgcctgcatgtccagatcgtcagcctgttctcgatcgtggcggtgctgcccgcggtgctcgtcgccatcgtcgccaacgtcaccatctcgcgcggcctcgaccggttgttctccggtccgaccaaggaggtgatccagaactcgctgacgattgcgcgcgcctatatgcaagaccacgcgcagctgatccgaggcgacattctcggcatggccaacgacattgcgcacgcccggccgctctatgaccaggatcgccgctcctttcgcgagatgctgacggccagcgccagctcgcgcaatttgccgggcgcgatgatcatcgacaagaacaccaacatcctggagtcggccgacaccggcatgcggctcgcctattcgccgccggcgccggactttctcagcaatgtcaacgagagcgagcccgaaatcgcggtgctcccagatgcgagcttcgtcgccgcggtgatccgcctgcgcgctttcaacgacacgttcctctacgtcgcccgcccccttgatccgaacgtcgtgaatcagctcaagcagacggaggtcagcgtcgccgaatacgctcagatcgagtcgcgccggctcggcattcaggtcgcgttcgcgctgatgttcgcggtgatcgcgctgaccattctgatggcctcggtgctgatcggcctcaacttcgccaattcgctggtctcgccgatccggcggctgatgaacgcggcgcagacggtttcgaccggtgaccttcatgtccaggtgtccgtgcaccaatcggaaggcgatctcgcccagctgggtgagactttcaacaagatgacgcaggaattgcgcagccagcgcgacgagctcgtcaatgcgagcgacctcatcgacagtcgccgccgcttcatcgaagccgttctgtcctcggcgagcgcaggcatcatcggcgtcgatgcatctggcagcgtcggcattctcaaccgctccgccgagaagttgatcgggcactccgaagcggagacgctgggccacccgctctccgacgtgctgcccgaactcgacgacatgatgaagacggcgcgggaagggacccagcggctggtccagggccagatcaccatcaaccgcgacgggcaggaacgtaatctctccgtccgcgtgagtgccgagaaaaatcagccgcatgacagctacatcatcaccctcgatgacattaccgaattggtctcggcccaacgcacatcagcctggggtgacgtggcccgccgcatcgctcacgagatcaagaatccgttgacgccgatccagctctcggccgaacgcatccgccgcaagttcggcaagacgatcaccgaggacaaggacaagcagatcttcgaccagtgcaccgacaccatcgtgcgccaggtcgatgacatcaggcgtatggtcgacgagttctcgcgcttcgcgcggatgccgaaacccgtcatggaaggcgaggacgtcgccgacaccgtgcgtcaggcggtattcctgatgaaggtcgctcatcccgagatcgatatcgaggccgagttcaagcaggatccgctccgtgcccagtttgaccggcggctgatctcccaggcggtgaccaacatcgtcaagaacgccaccgaggcgattgagcaggtcccagcggaggaactcggcaaaggccgcatcgacgtcgtggtgtcacgagagggcgacgacgtgctgatcgacgtgatcgacaatggcataggcctgcccaaggtcgcgcgttcgcgcctgctcgagccgtatgtcacgacgcgcgccaaaggcaccggccttggccttgcgatcgtcggtcgcgtgctggaagaccatggcgggcgcatcgaactgaaggacgcctccgacttccgcgaagggcagcgcggcgcctggatgcggatgcgctttgcggtctccgggcaaccggcaaaatccgggggatccgagccagcggcgcccgccgggcaagcaaccaagccggaaggcaaggagacggccgcggaattcatcaaggagtccaacagggatttggaaacaaaagagccggccgccggaaccaaagagccggctgaaaagaccaatgattcaaccaaaatcgaagcctcaacaggcagctgacaagacaggcgcgatccatggcaagtgaaattctgattgtcgatgatgaggccgatattcgggatctcgttgcgggcattctcgaagacgaggggttcgtcacgaggaccgcgcgcgacagcgacacggcgctggccgagatcgccaatcgtcggccgcatctggtgttcctcgacatatggctgcagggctccaagctcgacggcctgcagctcctggagcaggtcaagaaggacaacgccgatctgcccgtcgtgatgatctccgggcatggcaacatcgagaccgcggttgccgcgatcaagcgcggcgcttacgacttcatcgagaagccgttcaaggccgatcggctgatcctggtcgcgaccagagcgctggaaaactcccggctcaagcgcgaggtcaaggagctcaagcagctcgcaccgagcgccagccagctcgtcggccgttcgccgagcatgaaccagctgcgccagaccatcgagcgcgcggccaaggcgaacagccgcatcctgatcgtcggccctgccggcgccggcaaggaattgacggcgcgtacgctgcatgcggcctcgggtcgcgccgacggtcctttcgtcgtcatcaacgccgccgcaatcacgccagagcggatggagcacgagctgttcggcatcgagcagtccaacggcgagcagccgcgcaagccgggcgcgctcgaggaagcccatggcggcacgttgttcatcgacgaaatcgcagacatgccgcgcgagacccagaacaagatcctgcgcgtgctggtcgagcaatcattccagcgcgtcggcggcaccgccaaggtgcaggtcgatgtgcgcatcatctcctcgaccgcgcgcaatctcgaagaggagatctcggccggccgtttccgcgaagatctctaccaccggctctcggtggtgccgatccgcgtgcccgcgctgtcggagcgacgcgaggacattccggaactgatcgactacttcatggagcagatctccgccggcagcggcctgcccaagcgtcagattgggcaggatgcgatggcggtgctgcaatcccatgtctggcccggcaacgtgcgtcagctccgcaacaacgtcgagagagtcatgattttggcggctggcggacctgaggtgatcatcacggccgacatgttgccgcaggatgtcggctccatggtgccggcaatgccgaccagcaacaacggcgagcacatcatgggcttgccgctgcgcgaggcccgcgaagtgttcgagcgcgactatctgatcgcccagatcagccgtttctcaggaaatatttctcgtacggctgagttcgttggcatggaacggtcggcgctccaccggaaattgaaggccctcggtgtgggctaggcgttattcccgccggagtggaggccggtccccgtcgaagaaggcgcggtaaaacaatggcctagcgcgcgaccctgctgccgcgcgtcagggatgagcgaggagaaccgtcgatttccgtagttttccgggacaataggggtggcctgccgcgtgaagcagcttgcctaatatcccgacctgtcctctaatcgaaacgctgttccttccgagggggatctcatgagggagcggcaccgggagaggccccgacgtcacaagagggcagcaaccggcgcaataaaaagaaactcaaagcgagaaaaaaacaatggcggcagaccgcgcacaaaacctacaggacaccttccttaatcacgttcgcaaaaccaagacgccactgacgatctttctggtcaacggagtgaagctccagggcatcgtgacctggttcgacaatttctgcttgctgcttcggcgcgacggtcactcgcagctcgtctacaagcatgcgatctcgaccatcatgccgggcgctccgatccagttgttcgaaggcggtgaggatcagccggcttgagagtgatctgattggaaccccggaatttcggcggggatgccgaccggccgcggtcggcaggggctcatacgggacgggtgcttgtcatcggcccctacctgagagtgcgtgggggtggtgccgacgcgcaatcggaaagccatgcgatgcgcgatgtggaggcgcggcttgacgaggctgcgggcctcgcccgcgcgatcgatcttgtcgttgcagatgccatcatagcgccggtcggccagatccggcccgcgacctatatcggcaagggcaaggtcgaggaaatcgccgggctgatcaagacgctggaggtcgagctcgtggtgatggattgcgcactgtcgccgatccagcagcgcaacctcgagaaggaatggcaagccaaggtgctcgaccgtaccgggctcattctggaaatcttcggccgccgcgccaagaccagagaaggctcgctccaggtggagcttgcgcacctcaactatcagcgctcgcgcctggtgcgctcgtggacccatctcgaacgccaacgcggcgggttcggcttcatgggcggccccggcgagacgcagatcgaagcggaccgccgcctgatccaggagcgcatctccaagctcgagagcgaactgaagaaggtgcaggcgacgcggcgtctgcatcgcgccggccgccaacgcgtgccgtatcgcgtggtcgcgctggttggctacaccaatgccggcaagtcgacgctgttcaaccgtctgacccgcgccgacgttcaggccgccgacatgctgttcgcgacgctcgatccgaccttgcgtgcgctcaacctgccgcatggcggcaaggcgatgctgtcggatactgtgggcttcatctccaacctgccgacccagctcgtcgccgctttccgtgccacactggaagaggtgctcgaagccgacgtcatcctgcatgtgcgcgacatctctcatgaagatgccgaagcccagcagagcgacgtcgatgccgtgctgcgccagctcggcatcaaccccgacgattccggccgcatcatcgaggtctggaacaagatcgaccgtttcgcccctgagcagcgcgaagaattgctcaatatcgccgcgcgcaggccggaggatcatccggcgatgctggtttcggccgtgtcgggcgagggcatcgacgcgctgctcgccgcgatcgagcaacgcctcgcggccaagcgtacnnnnnnnnnncgccggcatcagctggctgcatcgcaatgccgaggtgctgtcgaaggagctgcacgacggccgcttcgacatgacggtgcgggtggatgagaccaagcgggacatcgtcgtgtcgcggttcgacgccgtgccgcacgcgacataggtcccgccgcgagctgcgcactgctgctgaacggtgctgtcctgccgggtcctgcgcgcgactgaggcgcgcttggcgcagacgccgtgccgttagcggcgggcccgattgcgctcctctgacgctgtctcctcacccttcgccgcattccacagcgcgtccatctcctcaagcgacgcctgctcgagcgtccggccctgcgcctcaagcgcgcgttcgatataggcaaagcgccgctcgaattttgcgttagtggcacgcagcgcagcttccggatcggcatcgacatggcgggcgaggttgaccagggcgaacatgaggtcgccagtttcctctgccagctcctgcttgtcgttgcgatccagcgccgcttcgatctcgtttgcctcctcgcggatcttttgcagcaccgcacgcggatcgttccagtcgaagccgacggtggaggctttgcgctgcagctccattgcgcgggtgagtgccggctggccggccttcacgcccgacagcagcgatttatgcccggccgcgtcttccggcggtcggcgcgcagcgcgctcggccttctcttcggccttgatgcggtcccagacttccttgacgtgggagggcgcgagattgccgtccttgtcggcgaagacgtggggatgacgccggatcatcttgcgtgtgatggcctcgacgacgtctccaaaagcaaatgcgttctgctcggacgccatctgggcgtgaaacacgacctggagcaggaggtcgccgagctcctctctgagatcgtcgagatcgccgcgggtgatggcgtccaccacctcataggcttcctcgatcgtgtagggtgcgatggtcgcaaaatcctgctcgaggtcccaggggcagccggtcaccggcgtgcgcagcgccgccatgatctcgatcaggcgggaaatgtcgcgggaaggggtcattgcggggtggtctcctgggtccagagccttatgccaaaagcgggccgccgttcccagcgcaggcgcgcggaacgggccgatttccacggattggcgggcaagtcgcgcaatgctaaagcgcgggcatgagtgacgcattttcctccgaaaccgcgctggtgctgttctccggcggccaggattccaccacctgcctcgcctgggccttgagccgctttgcgggggtcgagacgctggggttcgagtacggccagcgccacgctatcgagcttgcctgccgtgaccggctgttcgacggcatcaaggggctgcgggccgattgggccgcaaagctgggcgagagccacacgctgtcgattccgacgctggcggccgtgtccgacacggcgctgacccgcgacgtcgcgatcgcaatgggcgcggacggcctacccaacactttcgtgcccggccgcaaccttgtgttcctgacgtttgcggcagcgctggcctaccggcgcggcatcacgcacatcgtcggcggcatgtgcgagaccgattattccggttatcccgactgccgcgatgagaccatccgcgccatgcaggtcgcgctctcgctcggcatggcgcgcaacttcgagctgcatacgccgttaatgtggatcgacaaggccgcgacttggcagctcgcgcaggatcttggcggcgacggcctcgtcgatctcatccgcgagcactcccacacctgctatctcggcgaacgcggcgcgcagcacgactggggctatggctgcggggagtgcccggcgtgcagcctgcgggcgaagggatggcgggagtttgtggcgggcagatgatgcccgctagaaggtgtgctgcactttcactgagatgttgcggccggtctccaccaaagggtttgtgaagctccgcggataggagcgattcacgaacgtcgatgcgtcgacataagccgtattgaagatgttctccacgccgaggatcagcttggtatcgccgagttgaggggataccagcttgcccagttgaagcgtcgcatagagcttgggaatggcgtagcccgaggtcgtatattcctgcgccggatcgatccgggtcttgctggcggcccaatcgatcacgccaaggatcgagtaggcgccgctcgggtccgcgtattgtatcccgacccgcccgcgatacggggcgagaaagggcagcggcttgtccgtcaccgtgttggtgccgcgcagctgggcaaaattcgtgaacaggttgacggccggcgtcacttgccagcgcgcttccacctcgacgccggtcacctcggccttgccgacgttctgtgactgggtgtatccgccgacgccgttgagcgttactgcgaccgtttgaagaaagttctcgtagtgcgtatcgaacgcagtgaccttgagctccgcattggtcgtatgaaagcgtgcgcctccttcatacgtcacgccgctctccggcttcaggttcggattggggagctgggtggccgtcaccgcaaacagctcggaattcgtcggctggcggaacgaggtcgccacgttgccgagcaggtcgacgtttggcaggacggcgtagacgaatccgaggctgccggtcggagccgtttgatccacgttggtcttgcttgcgtataccgctctgacatttgcaggaatggtcgaggcgagcggcgaggtatcagttgtcgtgttgaaccagtcgaaacggccgcctgccgaaagcgtcagcggctgaatcggcttccattcatgcaggacgaacgcgccgacgttggattgcgtcgtgtcggggccttgcttggtgtaaggagaaatcacgtcgcttgtcacgacccccgtcgttccgttgcgggtgatggtctcggacgtcgactcgctgcccggccgtgcttcccggaagccatcgaggccgagcgtcttctttgttgcgccccaaggaccgagccagggaatttcagccagtgagcgcccgccgatcaccagcggaccgatgacatggctggtggacctgacagtcttcgtggcgatgcccgcggcgttgatcgtattgttgatcgtcgacagcttcgtatcgaaatagttgacgtagaaggatgtctcgacgtgcttcaccaggccgtcgagctcgccggtataggcgatgcgcgccgaatgcacctgattgggatcctgtcggacctgcaggtatggcgcgcccggcgctccgccgacaccgccggcgcgcccgtccacctcgctgtaggagcgcaacgaaagctcgagcctctggccgatatcgggcgtgtagccgagcttgatgttgccgccgacactctgatagtcgctgttcggcaccgttccgagcgcagtctgatagtcgctaccccagcggccggcaaaaccgccgatgaaatcgaaaccctgtccggcgcccttgacccaatcataggtgctgaacgagttggcgacgctgccgtaaccagctgaccagccgccgcccgtgaaccggaacggccccgacgtgtcgccgctgtacgatcgggtcacgacgttgaccagcccggtcagcgcctcgctgccgtagacgacggagcctggaccgcggatgacctccacgcgctcgacttcatcaggggcaagatagttgagctgcagcgtattgcggccgcggaagcgatcgccgtcgatgaacaggggtgagcggaagttgtttgacgagaaccctcgcaagtagatctggccgccgatgccaccggagcgggcgatcgatatccccgggacagaggcaagcacatcgagcagaccagttggcgacgtcgcctcgatctgcgctcggtcgacaaccgaaatgctctgcgtcggcggatgaggaatgcccggttgcggcagcctgccgcccatcggcttcagggaatcgctgttcgtgccttcgggagccgctgccgtggcttgccggccttgcgccggctgaacggcgggtgattgagtttgccgcgtcgcacgcgccgtgctctgccgtctcgtgcggcgcggcgtcgccggctttccagcctcgactgtcacggccggcagcacggattgctgagatgagccgctcgcggtctgggcttcggcgatcacgctcgatgccgcggtcacgacacaggcaaatccgaagctcagtttgcaggtcgacgaaaagatccagctccttttgcaatcaagcgcggtcctcaacaacatcagcgatatccctcagcattccctcagcctcggggtccttatcgtgttgcaggcgcgtgagccatggtccgcagacgagtttcgagttattcaaattgcggcgtctgcgatgctcatcgcgcaagcggtcgatgcacgcaattcgatcacgcatcgtcgtggtcgagcggcgcctactcgttcttttgaataattccagttctgcagatcgccacttgcagcgcgggacgaacattttggttttgcgttttcctctcatggcactatgtagccatgtcgcggcgccgcgcagatcctcgctggcgccccccgaggttctcgaatttcatgctgccgtcgttgcgctggggaagatcattgctgggcttgggggggagcttcgtgattgcgctcggcgcattcagctcggctcatgcgattgatctgactgaccagcgcaatcgcagtatctcattcagccgactgccggaacgtctggtcatcatcccgattccggcgccctcgaccttcatggcgatcgatggcagcgagaggaagatcgtcggcatgaacgaatacgccgcacgcgcgatgcaggagggcatttccggaaagctgtttccaggcttcaagcaaattcaaacgggcgtgacgaccgggggagacgcctcgaatttcgctccaaatgtggaggcgatcctcgcattgcgaccggatgccattttccaatgggccaacagcaacgaagtcatcgggccattggatcgaaccggaatacccgtcgtcggaatgcgtgtgggctcgttcgagaattacgtcgcgtacgtgaggctgatggggaagatcgcgggcagggaagaaagggccgccgaacttctcggcaagcaggaagagatacgtcagtccctggcatcgcgctttgccgatctatcatcgacccagcggccacgcgtactctacttcaatcgcgcgaccaacatgctgcgcgtcagcggccaaggcacggcgcaggatctcgccatccaattggccggcggacagaacgcgatcggtagcacgccttcaatcagcaccgtgaccatcgaacagatcctggcgtggaatccgcaggtcatcctgctcggaaacttcgattcagcgatgccgtccgatctctacagcgacccgcgctggcagggcgtcgatgcggttcgggctcgtcgcgtctatcgcgttccgctgggcggttaccgctgggatccgccaagtcacgagtcggcccttggctggctctggttggcgggtctgctgcatcctgagcgtgggcaggtggacattcgtaggtcggtgagggactggtttggctttctctatgcctacgatccgacggacgaggagttggaccgcatcctatttctgcaggaaaacgctggctcggccggctacgaagcatatcgggctcattgatggacagcgctgtctcacgatcggcgacacgggcccaatcgtcaggtgaacgatcctacggcctgctctgcgttgggctcgttgcgagcttggtcctcgtcttgctgtggtcggtcgcatcgggacggtatcaggtcccgttcgacacggtcctgtcgatcatcctgtctcacctggtcgccgtcaaagtgacatggacgaccaccgagtccgtggtggtcgaaacggtgaggctgccgcgcgtgctcaccgccgccatcgcaggcgccggtctgtcactctgcggcgcggtgctccaggccatcttccgcaatccgctcgtcggcccgcagacgatcggggcatcctccggtgccgccctcgggggcgtcaccgtcatctatctggtcgggttcggaccactcgtccaggtcggagcgtttggcggagccgccctggcgctcttggcggtgcttgcgtttcatcgcagcgacaatctctcgccgatccttacgctcgttctcgcgggggtggtcgtcagcgcgttctgcagcgcgctggtcggactcgtgacttacctcgccgatcccgagacgacattgcaggtgatcgtattctggctgttaggcagctttgcatcttcgacttggccgcaattcggcttgattgcattctgcaccacgctcgcagccatcgttctcattgggatgcggtggcgcgtgaacgttctttcgcttggagacgacgaggcccgaaccctcggcgtcaatccggctcgggaccgattgatcctgcttgccgcggcgtgtcttgcgatctcgtcccaggttgcggtcagcggcaccatcggctgggtgggtctcatcattcccaacctggcgcgcatgatggtcggggcagacaaccgccggcttctgccggtatcgacggttcttggcgccatctttctggttgtggcggacacgctggcgcggtcgctcacgccggcggagattccggtcggaatcatcacggccctggtcggcaccccgatttttgcgctgcttcttcggcgcaccacgaagagtggcgcggcatgatccaaatcgagaatgcaggccacagctacgggtccgggcagtggctctttcgtggactgtcggcgacctttcccgccggcaagatcgcagcgatcctcgggcccaatggctgtggcaagaccaccctgctgagggcgatcagcgggacgctgaggctcaaggaaggaatcgtcgccatcgacggccacgtgggtttcgttccgcaggcactgacggcggatcagtcctatagcgcggcggacatggttctgctcggtcgaagccgctacctcggcaggttcaactcaccgaaccgcaaggaccgggagcgcgcctatgcatgtctcgaggaggtcggcctcacggcgctcgcgcagcagcgttatgaccggctcagcggcgggcagcgacagcttgtcttgctggcccgcgcactggctagcgactgcaaggtgctggtgctggacgagcctgcgtcggcgctcgacatcgccaaccagggcgtcgttcttcgtctgctccttcgccttgcaagctcattaggcttgaccgtactgttcacgacgcatcaccccgaccacgcgatcggcatcgcccatacgacgttgctgatgcagcgggatgccacccacattgcgggccgcaccgaggtggtgctgacggaaggcaatctcgcccggatgtatggcgtgccggtgcgccgcgtggatgttcatgcggacgaagagacggcatcggcgatcgtgccgctgcacggcttgcgaggcagagtgccggatctggcggcgcgttgagatcagacgtcgctggaataagctcggagagcggccttcgccctggcccagggcaggaagccgtcgagaagcttcgtggctgcgggcatgaagttgctgccgtgatgatagaatggatccagcgtcgagacgagcatgctgccgggcagggtgacgcgatcctcgtagagcaacgcgccgccgctgtcgcggccctgcggatcggccggaacgtcgatcaacgcccgggcccccgcaggcggagttagcacgccgtgaaagtgccatatcgtatgttcgaatggcaccgcctggaagaactcgtgctcggacgccagcagacggttcggcggacgcgcgtctttgtcgagccaccaccagaaattggttggccgtggcgcccacgtgacgcccggcaaccatgtgtcagcacgattttcgccgaacacggccagcgtgtgcccggcttttgcaaaatcgatcaaaacgtcgcgcttggtgcgaagaatattcggattgacacgatccggaacgatcaggaatgtgacgccgaccaaggcatcagccgtgagctcgggggcatagatggtcttgtcgaacagctctcgatagcgctgaccgtggattgccgcgtgatgataaaacgtgccgccgtcaaggatcgccaggctcattgaacgtctcgctctcctgcgacccattgcatgatccgggaagccagttgcttgtcctcgccgccaaaggtccagaggtcgtttcccccatggaaaagcacgtgaccgcgaccgacgggatagatgaagtccagcggcatgtccggcttgccaagcgcatggatgatttgcgcatccggcggcgcctcgtgccagacccgtccatagaacccggacacgccgcggcggaaggtcagatcgcgcggatcgatgccgtgccagatgggatgatcggtgaggcgcagcacggtgatgtcgctgagcctgtaatggtgaatggtgtgaaagcctgccatgcgcggaagataggaataggcatgatgaccgttggcgacgacgacgccgccgcgaaccaggaattgctcgatctggagcgcgcgagccgccaggaagcgctgatcgctatgcatgctcacgaagaggacgctgaaatcgttcaggtcgatcccgggcagcgaatagatgtcgcggagcagaatttccggcgccgttcctgcgctggtcaaagcatgcagcgacccgtcctcgtagccaaagctgagcgcaagtcccggcttcatctttcagctcacccgcatcgtgaagagggtgtctggctccttggcgagcacatcctgcgcaacggcacgcttcaatgcgctcagctcacgctcctgctctgttgtgcgatccctggtgaacacgagctcgaaaaaccgcccgggcagaacgcccggccgcaacgccatctcgacggtgcgttcacccagcgtaattcgaaagctgtacgaaatggcgtggcccgctacgaatctcgcatcgggcagcgagcggtctacgacataagctccgcgggtcacggcgcgggtgatgacctcgaaggcgtcgcgcacaccggggccagggtgtccgctcacgatgctgatgtcgcgtcgtgccggcacagcttgcggcgacagcaaggcgaacgcggcacgctgcgcctggaatacgatcgcggccatggcgagcgcggattggccatgataggcggccaccatcggaaagccgatctcgatgggctcctcctcggccaagatggtaatcgtaggtccttgctgaattggcgcgctcacggggtccccacggcgaaacggctgttacgcgcatcggttatctcgtgcgtttgcccgaggtcaacaggcccagcttagattcagttcaaagcgcgagcaggcggaatggctcttccgcgtgcagggatgcaagtgcgtgaggaatgaccgttttgctgctcgaatgatcgcgcccgcggttgggcaatatcgcgctcgacccgcatgcacgcttcggtcggttagcggaaatcctccggctgcagctcgatcggcttgccgtgcggggtccgatcggcggcgtggtcccaggcgtcgcgatagcggtgcagtgtttccgtcgaggcgacacccttgcgcgcaacaagaccttcaagcgtggcgagccaatgcaggtagtaggtctcacccgtatcaggatcgcccgccgcctgggcacgcttgatctcgtcagcgagtgctgcggcccattccggccaggtgaacacgccgcgctcatgaagcgtcaaggccatcgcgaacgcatgcgcttcccaaggcgcgcggaacaccgggccttcatcgtcgcggggaatgctggggatcgccgccgtcgccgcggcggcggcttgtgtgctgctgttcatgcggggtccagatagggctcgaacgcgtcgatcgagaccttcgtggttggatcaccgtcagggccccagagatcgcggccctcgaacaccacggtgtagagccattgcggattctcgccgcgctccatcgcggccgtgtcaggaaagacgtggcagccgtggttgagctcgacgactccgacatggccgcgcacgtatcggggcagccgcgtgtgcgtcgtcggatggatgttcttcgcgcgcacacggtcgccgatgctgaatttcgccggtgccggagcaggacggtcgaacttgccccgcaccatcacgcgctcgacattggcgagatcgaacctgccgtgcttgagcgcctttccaggctgcatcgcatggccggcggcgacctcctcgcgggtgaggtagcctttgtcgatcagcatctcctccagcccgagaaaccacttcttgtagtacgagctcgacaggtagacgtgcggtggcaaggtctcgcgataaaaacgcgaggtgtcgatgttgaaggcgccggctgcgcccattgcgcgcaccatggccagcacgcgagactcccactgctcgtgaaacatcggctcgttggcttcgggctcgaccttgccgaacccgtccatgccgcccatgtcgtgcacgccgttcatgatggcgctccgggctttcgcggcaagccggtgccgatcatggaatcgcgtgtgacgagcccggcgagttgctcttcgctccagccctcggtgccttcggggcgcatcggcagcaccaggaagcgcgtctccgcagtggaatcccatacccggatttccgtgtccttcggcaaggcgacgccgaaatcggcgagcaccccgcgcgggtccttcacggcgcgtgagcggtagggcgcggccttgtaccagaccggcggcagccccagcatttcccagggatagcaggagcacaacgtgcacacgaccatgttgtggcgtccaggcgtgttctcgacgacgacgagatggtcgccgacgcggctgacatggcccagcgtgccgatcgccttgctgccgtcgtccagcaacgccttcttgaaggttggatctgtccaggccttggcaacgacgcgggcgccattatgcgggccgatcttggtctcgtaggcctggatgatggcatcgagcgcggccggctcgacatagcctttttcggtcaggatcgtctcgagcgcgcgcacgcgcagctcggtctccgacagctcggaatggtcgtgatcgtgatgatgttcgtgctcgtggctcatgggcggaaggataggcgcaatggtccctgcctgtcgagtattcgttgcagcgcaatcgggcctgtattcgcagccaagcttctgcgctagtatcgccgcagacggggtggagacgatggtgacggactacgtgaagatcgagaagggccttgggcctgagggacggattgcggtggtgcgcttcgaccgcggcgacggcatcaacgcgctctcgccggaagcgttgcgccagctcaccgcggcggcgcgcagcttcgaggacgacgcggcgacctccgtcgtggtgctgaccggcagcacgagcacattcagcgccgggttcgacctcaaggacgcagagggacgttcgcgcaaggacatggatctcggcacgctgcggcggcatctcaagctcgggccgcgcttgacgcaagcctggcaggaaatggagcagatcacgatcgcggcgatcgagggcttttgcgttggtggcggcgtcgcgctggccgtggcactcgatttccgcatcatgggccgcgatgcgcatctgcgcgtgcccgagatcgggctcggcatgaacatgagctggcagagcatcccgcgcatgctgcatctgatcggaccggcccgcaccaagcaggcggtgatcctggccgaccagcggatcagcgcggacgaggctcatgaatggggcttggtggagcaggtgaccgaacccggccacgcgttcgacgccgccatggagcttgcccggaaagtcgccgcacagccgccgctctcggtcgcaatgacgaaactcaccgtgaaccggctcgcgcacgcgttggacgatctcgccagccacatggacatcgatcagttcgcactcgcgagtctcagcgaggaccacaaggaaggcgtcgaggccttcctggcccgccgcaagccgcgcttcagggggcgctagaaccactcagagcccgtgaaggcgttcctggaaactcgcttcaaggaactgtctgccgacctggtagaggcgagcggtgcgcctcaaggcgccagtctggtgcgccgcagcgtctccgatggcagctcggagaaatggcgcttgtagtcgagcgagaactggctgaagtgccagaagccgtgccgtacggcgacgtcgtaaacggaggcgcccgtgccggcggcgcgcttcagatcacgccgcacgcggttcagccgcatcgcgcgccaatagtgcatcgggctcgtgcccaacacctcctggaagcaatagccgagcttgcgcgggctggcgccgaccgccttgcagacctccagcagcgagagcgtacgctcgccgctgccatgcatcagcgcccgggcacgttccacggtgcgcttgcgcgccgccgcgctgcggccggaatcgttcgcgcgtgcggtcggcagcatgtccatgatctcgacgaggagggcgtcttcgagccccgcgcggacggccggttggtcgaatcgttcgggcgtggtcgtgatggtgtcgtgaatggccgcaaggtgggctcgcaatcgcgcgaccggcgcctgtgccatttcgatcacccgcagctgatgccagaccacgcgcggcagctcgatatcgagccgggcggcgagttcctcgatcagcgccgcgctggcgacgacgccgcgcagctcgaacgacttcggcgtgcagatgtcgatttcggcgtcgatgcaggcgatgacctgggcgcctgcaacgctggcgccgttgcaattgatctcaccgtcaccctgccacggcagagcaataccaaagcagccgtcgcccagcagaccgtgttggcggacctgctgactggtgatctcacgaaagacgtcgagtcgcggcagggagagctgggtaaagctgcccctgaaggcgccggcgctgatctggtcgtagctcagccgccagcctccgagcgaagcgcaatgctcgtcgacatcgctactgctcgcctgaagcagactggcgcccgagtcttgaatcggaagaattgcgcttaagggcatgacaacactggaaatttgccatccggcacctggcagggaaccacgccagactggcacggccacgggcgctgtccagcaaaatattgccggatctcgataacgcctgccgcgaccttcaatgcactctccgttggcggccgttcccgacatcggggtcggggccgctttgcggaggatcgagatgcgaccgaccgagatcatgcgcggcagtccgcccgcgcccgaggcgcaggtgacacgcgccaactggcgcagttttccggcgatccgctggggctttacccacacccgcgaagtgctgccgaccgcggaggtccgccgttccgctcatccgactccgatgcgaagcgcgccgcgcgaactgtcaaagctcggcttcaccacgccggacggccagccgaccaccgtcgaagccaccctgcacgagaccttcggcgatgcgctgctggtcatgcacaggggcaccctggtccacgaatggtatggcgacggcatgagcgcgaccacgccgcatctgatttgctcgatcagcaagtcgatcgcgggcacgctcggcggcattctcgccgcgcgcggcttgctcgatcccgaggcgagggtggtgcgctacgtgccggagctggaggcctcggtctacggcagctgcacggtccgcaatgtgctcgacatggcggtcgccatcaagttcgaggaggattatgaggaccccgccggcgacgtggcgcgctaccgcttttcatcgggctgggacgtgccgccgcagggtgtcgagcccagccaccagcgtgcctatctcacaacgctgcgcggcaccggcaagccgcatggcaaggtgtttcactacgtctcgaccaataccgaagtgctcggctgggtctatgagcgtgcctgcggtgcgccttacccgcgcatcctctccgaatatctctggcagccgatgggcgcggaggaggacggctccctgaccctcgacagccacggcatgggccgcatcgccggcggcctctcggtcaccgcgcgcgatctcatccgcttcggcgagatgatccgctgccgcggcgtcgtcgagggccgacaggtggtgccgggctggtggatcgacgacatccacgagaacggcgatcccgacgcctgggccgacggcgatctcgccgacatcttcccaggcgcgcgttaccgcagcaaatggtacacgatcgatccctcgcgtaacgatcttgccgggatcggcattcatggccagtggctctacatcgacgctgccgccgacaccgtgatcgtcaagctcgccacgcagccgaaggcgatggacgtgccgctcgaccatcgctggctcgccgccttccgtgccatcaccgcgcatctcgccctgcgctgaacgttcggacagaacatgctcgatcccaccgaagcgaattcaaggctccaagccgccaggccacatccgctcgatccgctcacggctgaggaaatcaccgcggcctgcacatgggtgcgggcggcggcgaccgccccggagaactgccgcttcccgatcgttcggctggaagagccgaccaagcaacagctcgccgcgggccggggaggccgccgcgccttcgtgctgacactggacgcgatgacgggcgaggcgatcgagcatatcgtcgatctcggccgcggcgagatcgtcacgcgaaaaatgctcccgaaccgcgaggccccctatggccagccgccggtgatgctggaggagttcttcaaatgcgaggccgcggtaaaggccgatcctggctggcgcgccgcgatgcaccgccgcgggctgacggacaaggatatcgagctggttcaggtcgacccgttctcgtccggcttcttcgacaaggagttcgagcgcggcactcgcatcgtacgcgcggtcagctatttccgcgagcatccccaggacaacggctacgcccatccgatcgaaggcgtcgtcgcagtcgtcgatctgatcggaggcaaggtcatcgacctcaccgacgaagacccgatcgtgccgatcccgcgcaagaagcggaactatggcgcacatgaggttacggacccgcgcaccgacatcaagccgctgcacatcgagcagcccgagggcccgagctttcgcgtcgacggctggaaggtcgattggcagaaatggagctttcgtgtcggtttcacgccgcgcgagggcctcgtgctgcatcagctcgcctaccaggacgggacgcgcaagcggtcgctgatccatcgcgccagcgtcaccgagatggtggtgccatacgccgatccgaccgcgaaccatttctggaaatcggcgttcgatgccggcgaatacggcctcggcatgcttgcgaacgcactcgaactcggctgcgactgcctcggcaacatccattatttcgacgtgccggccgccgacaacaaaggcgaaccgtttgtcatgcagaacgccatctgcatgcatgaggaagactacggcatcgcctggaagcactacgagttccgcaacggcctgttcgaggttcgccgctcgcggcggctcgtgatctcgttcttcgcgaccgtcggcaattacgattacggcttctactggtatctctaccaggacggcacgatccagctggagaccaagcttaccggcatcatccagaccgccgccgtgccatcaggcgaaaagtatcgatggggcggcatgatcgacgacaacctgggcggacccacgcaccagcacttcttcaacgtccggctgcacatggatctggatggcggcggcaacaccgttaccgagcacgatttcgtgcctcggccctggggtgacgacaatccgcatggcaacgtgttcgacaccacgacgcgggtgttgtcgcgcgagtcagacgcggcggcggttgcgaacggcgaaaccggccggttctggaagatcagcaatcccaacgcgaccaactcggtcggcaatgctccggcctacaagcttgtcgtcaatccgagcccgttgatgctggcgcaagagggcagctacgtgcgcaagcgcggcggcttcgcgaccaagcacgtgtgggtgacggcgttcgatcccgccgagaaatacgcgagcggcgactaccccaacgtccatgccggcggcgacggtctcccgcgctacgctgcacaggatcgcaacatcgagaatgccgacatcgtggtatggcactccttcggccatacccacgtctgcaagcccgaggactttccgatcatgccggtcgaatatgccggtttcgtgctgaagccgaccggcttcttcgccgccaatgcggccggagacattccgcccgaccgcaacagccgcagcgtgctcgcaagcgggagcaaccgcgacgaatcgtgctgctgcgccggcaagacgtagagcccgcgcggtaacgggtcgactatgtccggccgttgccgataagtgagggcgtgtttccatctagaattattccaaatgctcgacggcagcgaggagcgagatcgctgctcgcatgcacgtcgactgcaaatcgccgccggcgtcatttgccgtgggcgctttcgccgcacatgctgcgcacgggtctggagagattctaacctcgttcctatcgcactacgaaacggcctgagttacggcgaggcatcaagaacgataccggcaaagccggcagtgcgtggggcttcgaaaaacgtgaccgacttccaactttcttcgcgtggcagcacgcgtcgtccacccattcaggtgctttttctcggagcggtcagcacattctccctcgtcgttcccatcggttccgtggaggcgcagacgcaaattcctgcagtgactgtggaagcgccggcgcagcgcgcccgtcccgcggcgattgcttcgtcgcgaagagcggcggcgacacgcaccgcacgcgccgctcgtcgcgccccggcgcagcagcccgcgccgacccagtcggcatcatcgaacggcgccacgggcgaacgtgccaatggaccggtgcgcggtttcgtcgcgacgcggagcggcaccgcgacaaagaccgacacgcccctgatcgaaactccgcagtcggtctcggtcatcaccacggaccagatcaggaaccagggcgcggtctccatcggcgaagccttgcgctacactgccggcgtcagcggcgacgtcaatggcggctcggacacccgtttcggcggcctgcagatccgcggcttcgacatgaccatgcccggtctctacatcgacggcctgcgaattccgtccagcaattacgtgcatttcaacggcctcgatccctatggcgccgagcgcatcgaggttctgaagggcccgtcatcggcgatgtacggcggcagcggcaccggcggcatcctcaactacgtgaccaagctgccgacggcccagcagtttggagaagtttcgatctccggcggcagcttcaaccgctatcagggtcagttcgacatgggcggccccgccaacaaggagggcaccgtgctgtggcgtctgaccggcgtcgtccgcgacggccagacccaggtcgacttcagcaaggacaaccgcgtcttcatcgcgcccgccgtgacgttcaagccgaatgaggacaccaccctcaccctgctcgccaactatcagcgcgaccgggcagggtggggccttcagttcctgcccgcctcgggcactgtgtggccgaacaacggccgtacgatcccggtgtccttcttcgcgggcgtgccgggcttcgacgccttcaacaccgagatcgcgaccgccggctaccagctctcgcacaatttcaccgacaacatcacgttccggcagaatttgcgctacgcctatcagcacaacgaggagaaggtgttctacggcggcggctataccaacgaggccgcgggtcagctcgcgcgctacggcagctacagcaactcctacatcaattccttcgccgtggataatcagctccagggcaagttcaccaccggcatgctcagccacaccacgctggtcggcgtcgactatcgcaacacctccttccgcgacaccgccttcggcgtcacgacctcgtcccccgagatcaacgtcttcaacccgaactacagctacgactacgtcattggaaccatgagcgacaacacgggagtcaagcagtcccaggtcggcgtctatgcgcaggatcagatcaagctcggccggctctcgttccagctcggcggccgccaggatttcgtgaccacgcaggtcgacaacggtctcgcgaacaccacggcgtcgaaggatgcctcggctttcaccggccgggctgccgtgatgtacaatttcgacaacggcatcgcgccatatttcagctattccgagtcatttctgccggtgcttgccactgcttccggccagttgctgagccccgagaccggcgtccagtacgaggtcggcgtcaagtaccagccgctcggatggaatgcgctgttcaccttcgccgccttcgacctgacacgcgacaacgtcgtgacctatccgccccccaccttcgtcgctgagcagaccgggcaggtgaaatcgcggggcgtcgagctggaaggcaccatgtcgctcgccgacggctggaacctgcgcgccgcctacgcctatgtcgacgccgtggtcacgcaggatccggtcaatgtcggcaaggcgccggtcaccgtgccgctcaaccgcgcctcgctgtggagcgactatacgctgcagaccggaccgctggcaggcttgcagttcggcggcggcatccgccatgtcggcgcaacctggggcgatgattccaacacgttcaaggtgggagcctcgaccgtcctggacgcgctgctcgcctacacccgggacaattggcgcctgtcgttgaacgtcacgaaccttgccgatacgcgctacgtcgctgcctgttacagcctctcaggctgcttctatgccgaaggccgcaaggcgatcggcaggctgacctatcgctggtgatgcttgatggcgctcgttcatgacctttcacaggcgatcgtcatgccccggctcgtcccgggcatccacgttctttgtgctccgtggcgcggcgtggatggccgggacaggccggccatgacgctggcggaaagtaaccgaccaatctctcacgtcgtgcggcgtaaggagacaaggcgatgagagcgatgttcggcaaactgcaccgctgggcgggcctgctcacggccgggttcctgttcttctccggcatcaccggcgcaatcatctcctgggatcacgagctcgacgacgtcctgaacagccatctgttcgacgtctcgaccaaaggaccggcgattccgtcgatcgagctcgccaagatgatcgagcagcgcgatcaccgcgcacgcgtcgtccatctcttcatgatgccggaggagggccattcgttgtggttcttcgtcatgccgcggatcgatccagcgaccggcaagcgttatgcacttgactacaaccaggtcttcctcgatcccaacaccggtgcggagcttgggcgccgctattggggcgcggtctggcccgtcacgcgagagaatttcgtctcgttcctctacaagctgcattacacgatgcacatccctgagttctggggcagcgatcgctggggcatgcgggtgctcggcatcatcgccatcatctggaccatcgattgcttcgtcgggttctacctgacgctgccctcgcggcggcgcgccaaggcggcgcgggcacctgaagtcgcacgccagctcgagcgcggcttctgggcgcgctgggcaccggcctggaccatcaagacctcgggcagcgcctaccggatcaatttcgacatccaccgcgccttcagcctctggacctggggcttgctgttcatcgtcgccttcacggcgttctcgctgaacctctatttcgaggtgttctcgccgctgatgaagatggtgtcgaactacacgccgacgccctacgagcagcggccctatcgcgatctcgacgatcccatcgagcccaaggtgaccttcgccgacatcgccgcgcgcgccgccgccgacggcaaggcgcgcgggtggaccacccctgtcggctcgatcaattatggcccggcccacggcgtctatgccgcggccttcttccaccctggcgacgatcacggcgccggcggtgtcggtccggcgcagctctactacgacagcgaggacggccgcccgatcggcgagcggctgccctgggtcggcaccgccgccgacatcttcgtgcaggcacagttcccgctgcactcaggccgcatcgtcggactgttcggacgcatcctgatctccgtcatggggctcgtggtggccgcgctctcggtcaccggcgtcgtgatctggtggcgcaagcgccgcgcccgggtccgcgtgcgcgagaccacggcaatgcggctgagccggcagctgacaccggcggagtagggcattctaactccctatgcagatgaacctcgccgccccgcgccagcacaaacactgggagatcactcccagtcgttccggaagctgaaattgagatcccttgccttggtctgcctgctcgtcctcgccgcgccgggccatgccgccgcgcccgagcagcactatctcgagctgcgcgatcgctatatcgccaagttctcgaaggcaaaggagagcgacgaaacatccaagcaacatgatacggctctgaaggagctggccggcgtgctgcgtggcctggtaggtccggtcgccatcaaggggctcccggcagagggcaagtcgaacgtcgacacgctcttcagggatgacgtcggcttcggtcacctcgatgggctcagcttcgcctcggaagactataggacgcaagccgtggtgaccacgatgacgctgctcgggcactggctgcgcgagcatcgcgaggacggcatgccgcaggagatcgcggccgcgctcaggtcggaccgcttctaccattacgccatccaggacgccgccttcgcgaagtacgccgagctgccggtcaccaagcccgcgtctgccagcgctgcggtcgccgtgctgggcctgcgcggcaacggcgacctgaagggcctgccgagcgaaattggcatggtcgcgatccagggtgacaaggtctacttcatcgccacgtcggatgccgtgaagacggcggagattccggcctgcgaaaaggtctggaagcagatgatggccaggaagacgccacaggatgccatggcgcgcgaggaccaggcgatggacgcctacaccaagtgcttcgcgaaggaagcaccgagccagagctggttcgcggcggcggtgaagaaggcgcaggcacagctggattcgttgctggcgcgctgagacttggactggcgttagaacggatagtgccgtggtccggtctgtacggtgatccagcgcaactcggtgaactcgtcgatggcggccttgccgccgaaacgcccgtagcccgacgccttggtgccgccaaacggcatctggggctcatcgtgcacggtcggtgcgttgacgtgacaaatgccggcctcgatccgcttggcgacgccaagggcgcgtgcgatatcgcggccgaacacggcggaggagagaccgtattccgtgtcgttggcgacgcggaccgcctcgtccacgccgctgacgcggaccacggtcacgaccggaccgaagctttcctcgccatagatgcgcattgcaggcgtgacgtgatcgacgatggtggccggcaagatcgtgccgctgccatgtccgcccgccgcaaccaccgcgcccttggcgacggcgtcgtcgatcaggcctcggacgcggtcgcaggctgcgttgctgatcagcgagccgagcacgacattgcccttgccaggatcgccgtgaggcaggctgttcgccttggctacgaacttggagacgaaagcatccgccaccttgtcgtcgacgacgatccgttccgtcgacatgcagatctgaccctggttcatgaaggcaccgaaggccgcagcgttcacggcggcctcgaggtcggcatcgtcgaggatgacgagcggggctttgccgccgagctccagcagcgcgcgcttgagatgcttggcgcaggcgagtgcgatgagacggccgacccgtgtcgagccggtgaagttgacgcggcggatcgcgggatgggcgatcaacgcttcgacgaccgcctgcgcatcctccggcgcattggtcacgacgttgacgacgccgtcgccgagcccggcctccgtcaggcagctgccgatcaggcgatgcacgcccgggctcatctcggacgccttcaacaccacggtattgccgcacgcaaggggcatcgcgacggagcgcacgcccaggatcacgggcgcattccacggcgcgatcccgagcacgacgccgaccggctgacggaacgccattgcgagattatcaggcttgtcggttggaatgatctcgcccgatatctgcgtcgtcatggcggcggcctcgcgcagcatgccttcggcgagatgcacgttgaacccggcccagccgtcggtggcgccggtctcggcgaccatcagcgcggtgaactccgccgcccgacgtgccaggatgtcggccgccgcgctgagccgcttgcggcgctcggagggggcgagctgagaccaggccggaaaggcggcggctgcggcatcggcggcgcgcatcgcatcgtcgatcgaggccgcggccacgatggtcgcgatctccccggagatcggattgcggcgctggaaggtgcgctggttgctggccgactggtccttaccgccgatgagaaggtcgatcgcgttcatggcgttctccgtgaggtgctggggaggattacgttggtgttgacgcgccgcgcgccttgccgagataggcgcgctggatctcgggatcgttcttcatcgcgctggcaagcccggtgccggcgttgcggcctgactcgatcaggtagacgcgatcggcaatatcgaggcttgcccgggcattctgctcgaccaggagcacactcaagccgctgccgcggatctgcgtcaatgcacggaagacctcgcggctgaggagcggcgatagaccgagcgagggctcatcgagcaagagcagcaatggattcgacatcagcgcccggccgattgccaccatctgctgctcgccgccgctcatggtgcggacggcctggggcaggcgctcggcgaggcgcgggaacagctgcaggatctttgcgagccggtctgcctcgccagcgcgggcacgagcgggataggcgccgagctggagattctcggcaacggtcagatcgccgaagacgccgcggccctccggcaccaaagcgatgccgcgctccacgatcagatgggcaggcagttcggcgatgctctgtccttcgaatctgatccttgcgcccgcggcaggcctgaccagcccggcgatgctcttgagcagggtggacttgccggcgccgttggcaccaagaatagcgacgatctcgccttgttcgatgccgagcgcaacatcggccagggcctggtgcttgccatagaagtgggagagggcggcgacctcaagcatcgtcgtctccgagataggcggccacgacctttggatcggacagcacctcgtccggcccgccgcgtgcaatcacgcagcccgcgttcatgacgatgcaatggccgcagagcgcgcggatcgcgtccatgacatgctcgaccatgatgatggtgaagccgcggtcgcgcagcttggcaatcagggcgatgcctgtttcgagctcgctcggattgagcccggccagccattcgtcgagcagcacgaggcgcggctgcagcgccagcgcgcgggcaagctccagccgcttctggtcgatgtaagtcaggtcgcctgcgggggcggcgtgcacggtgccgagcccgacgaggtccagcagctcgcttgccgtagcgcttgaaccgttcgacgtggagaacagctgcgccgccgcgacgttttcggcaacggtcagatccggcatcacacgcaccagctggaacgtgcgggcaaggcccaggcgtgcgatctggtgcgcgcgcaggccgttgaggacgatgccaccgaaccggatcgtgcccgacgagggcttcaaggcgccggaaagcgtgttgagaagcgtcgtcttgccggaaccgttcgggccgatgatgccgacgatctcgcccggtgcgaccttgaagctgacatcatcgacggcacgcaacccgctgaacgacttgctgacgccttcgactgcgaggagcggtgcatcgcttgtacccgcgcgcgcggccacggggccgccggtcgggacgcgccagcggccagtcccgaacaggccgatcaccccattcggcagcaccatgacgatgagcacgaagatgaggccgagcacgatgctgaaatggttgggcagcgtcgcgctcagcacctcgaacagcaggaccagcggaatgacgccgagcacgggcccgaacagcgagccggcgccgcccagcagagccatgatcacgacctggaacgagatcgtcggattgaatgcgatggctggatcgatataggtccagcgcggagccatcaccgcgccggttactgccatgaaggttgcactcaggatgaagacgccgagcttgacccgcgtggcgtcgatgccggaatggctggccgcggtctcgtcggcaccgatggcgcgcagcgccagcccgtagcgcgagcgcccgagcagccagcccaccaggaacacaatcgcggtcaagcccaggagctgccagtagagaatatcctgcgtcaccgcactgaagagatagcggccgaccgatttgtggatgttgacctcgtaccagatcaccagctgccggatcagctcggcaagcccaaacgagaagatcacgaaatagatgcctgataaccgcagcgttgaaaggccggtgattgcggcggtgaatgcgcccacgcccgccgcggccagcagcacgactggccagggcatggtctccccgagcactgcggcggtgtaggcgccgaggccgaagaaggcgaccgtcgcaagcgagatatagcgggtcggacctgagaacatcgcccaggcggtcgccagaatcgtgaaatagaggacgctgatgccgagcgcgagatagtaaccattggcatagagcgggtaggtgacggtggccgcggcgagggcaagcccggcgcaccacaacaatgcgcgcttgggcccggtcatgacgcagctctcccgaacaggccggtcggtctgatcaggagcacgccgagaaacagcgcgtaggtggcagccagcgtcaggcccggatcgaccagccgcgccaccgcggtttcgaccacgccgagcagcagtcccgcgaccagcgcgcccatcacgttgccgaccccgcccatgatgacgacgaccagcgccttcatggtgaatatcacgcccatcgcggcattgaaggtgaggaacatgctgaccaacacgccgccgaccgcgaccaggccaccgccaaaggcgaacgcgagccccgacaaggcggccacgtcgatcccgacgaggcgcgcggcgttggcatcgacagcgatggcgcgtacggccgtgccgatccgcgtgcgggtgagggcgagatacacggcgccgccgaccagggccgcgaacagcagtgcgaccaggcgattgaccgcgagcgtcgagcccatgatcgtcagcggaatggagagatagctatagctgtaatactggccgccgaaggcgaccagcatggcgccctggatcacgaacaatacgccgaaggtgacgaggatgctgtcgatctcctgcgcgcctctgtccttgctccgccgcatcaggcgctcgagcaggaagcgatagagcagccagttcaccaccatcgcgacagggacagccaggagcagcgcagccagcgggctcagcccgaggccactgtagagcgagaacgcgccgaacgcggccgcaacgagcgactccccataagagaggttcatgatccgcgccacgccatattgcagcgtcagcccaagcgcgatcagcgcgtacatgccgccaagcaccaggcccggcaggacgatgtcgacaagcagcatgaacggggttcctagtggatgggggcaggcctcgcagcgcaaggcctgcccgccagccttgccttactgccactgcgccttcggcacgaccggcgtacgcgcgcctgaaagcgaagcgggtgcgagggcgtagaattcgccgttctgccactggccgacgctccagacctcctggagcagaccgtccttcagcttgaccttgccgatgatggtgtcgaacgtgcccgagcggatttccgctgcgactgcggcgcgatcgagcttacctaccttttcgatcgcctgctggagcacctggaggctcgcataggtgatcgagcttgcccagcgatcgggctccttgcccgtcgcggccttgtggcgcgcgagatagtccttcagccgcggcgagtccgcgttccagccaccgatccccataacgccctcgctgttggcggcaaacttgcccttgtagagcgggaatgcggtgccgacgccgacgtagaagattttggggttgaacttcaggagctgcgcctgctcggtcagcgcgatcgtgtccggcggatagctgaaggcgacgaacgcgtccgggttggacgcgatggcgtccttcaccagcggctggagatcctgcgttcccatcggataggtcttgtcgtaggccagcgtgaagccgtgcttcttgaacgcttcgcgccccgcagcggacaattcgatgccgaactgatcggcgatgctgaccatcgcgatgttcgccccgatcttgccttcgctcctgagcttcccgagcagatcggccaacgcctgggagatctgcgccgacgttccgagccagaacgtcgcgttggaccagcgcttggcaagttctggcgccttgtcggtcaccgaggtcaccgcgaggtgagggtagccgagacggttcagcgtcgggccgaccgcgaggttgaggccggtgccccagggcgaaagaatgaaatcgaccttgtcctgattggcgaggcgctcgatcgccttgacggcttcctcagaactgctgcggtcgtcgtattcgaccacttcgatcggcagcttcttgtcgccgagcttgatgccgccggcggcattcacatccttcacccacagctcgtaattcggcagcgtggtgatgccggcgccgccggcatagggccccgttttggaaatggcatagccgatccggatcttctcctgcgcctcggccgtggatgccaaggctcccagcactgccgcaaccaggccagttgcgcgcagcaacgttcgacggttcgccgaaaacatgtcgatcctccctcgtgtttcacgcaagcgattgttcgcaagcggtatgagtggtcgttcctcttggcctgatttcttcggcgcagcttcgtttagccggccgcgaccaggacttgacctaacaagcaccgcgcggtttgttcgcacaatggacagatccggtgaaagattggacgcttctggtcgcgacgggcaggtgcgtcgaggcgtcgcggggaccgtttcggcggccgcgagcggcgctgcgcctgtcggcgcggagctgatccgttcgcattacgttgcgcgccgctggatgctgtcgtcgaaggccgccaggccgttcatccatctgctttgcctgcatgaaggcgccagcatcgacgtcggcgagcccggcaggacgatggccttcaccgggcctgccatcgtctggctcccggcgggttcagccgaatacctggaggtgtcagccggggcgacggccgagttgctgcaactacgcgctggcatttggcaccgctatctgccgccctcggccgagcctgcctatctcgcgctcgaagccgccggcggcatcatggcgctgccggtcgaacccgacctcgtgaccacgatgtcgcgatcaatcgcggcaatcgccgcggaaatcgcatcgcccgcacgcagcgctgcggcatcgatcatgtcggccgagctgacgctgtgcgtgctgcgcctctggcggctgttcgccgacagcgaccggaacgaggagggcagtagcgccgagatactgagccgcttccgccggctgctcgaggagcgctatcagcagcatctgcgcgtcagcgattacgccaagcttctcggcatgaccccggaccgtctgcacgccctctgtagccgcgaactgaagcgttcgccgagcgagctgatccagcagcgcgtcgtcaaggaggccgcgacacggctcgaggccggcaccgttgccgtcaagcagatcgcgttcgcgctcggcttcaaggacaccgcctatttcagccgcttcttccgcaagcacaccggtgaggcaccgggcgtctggcgacggcgcgttgccgcccgctcgcgagccggacagtcgaggccgaccctcaactttgccgactggccgtgagcgtggtgtggcctgcatcgttgatgagatcgacgcggtcgatgccggcacgcggcaacaaggatcgaatctcctcttcctgcatcaggctgaacgccgtcgacaatgcgtccgccgcagtcgcgctgcgggacacagcggtcacgctgcgatagcccgttgcgcagcttcctgttcggggatcgaacagatggttgaactgcgccttggcgccgaactgtaggccgtaggcgccggacgtcgacactgcgcggtcgacgatcgggagcaccgcttcggcgtggccgacatgatcagggtcggcgatgccgacttcccaaggctggccgtccggacgggcgccgatcgcgcgggcctcgcccatgtcgaccaggctgtgagagataccgtgcgcccgcagcagatcgaccaccttgtccgtgacatagccttgcgcgatcccgttcagggtgacggccatgccgcggggcatcgtgatccggtcgcggctgatcgacagccggctgctgccgatgcgcgcgagcgctgcctggatctcctttgcggcaggtcccgccggatccgcctcatctcgtgagaagtggccggcatagagatcccacagcggctgcacggtgacatcgaacagaccgcctgtcagcgtggagtaatgctgcgacgccgacagcagatcgaccatttcggcggccggatcgatcaggatgcccttccggttcaactcgaccagggcggaatcgtccaagtagaggctgaacagccgttcgagccgacgcgcctcggcgcaggccagcgttatcagccgctcggcccggcggcggtcttcgtcgtggatctccattgtcgcgacggcgcccagcatcgtgccgcgccaggtgactggcgcgatgtccgcccggagccgtccgctgatggacagcgggccgaggcccgccgccgccgcgctgatccggatgaaccgtcggcgcgtcagcgcttgcgtcatggcgtcctcctcgatccgtcgccgggcggcccttcggcttcgccgggcccagcgccgccgccggcattcgccgaggccaggacatagtcgcggggcacctcgtcgaagccgacgatcctgccgccgttctcgccggcgaatttctccgcggccgcccggtccgagaacggaacggcctcgtcccctcccatgccgctcttgactcgactctcgatcacgaacagcgccttgcgggcctccacccagttgtcggagccgggcgcatcccagttcgccgccttgcccatgtcggacacgtagatcgcctgaatgtccttgggctcgtccggcagcatggtgaaggcgagggtgtcacgcgccgacgagaaccataccggctgaatgaggctcgcagcgaagatatggcccttcggtccggggtgttcgagcacgttcatgccgcagtaatgcccgatgtcctctgccgtcatccgatgcggcggcgggatcttcgcggtctgcttctcgttgcaggccgcaagcgcgaatggcagcagcaaggcccaagcgatggccacgcgcctcatagctccctcctcgaaaaggcgagcgcagcaagccccagcggcagcagcgtccagcagagcagggcggcgagaaggaccggtatcgtcagggacgtgctttgagcaaggccggccatgccggcgaaggtgctgacattggcgaatccggtcaggttgatcagccggtaggcgtcggtcgggttcgacaggagcagggcgttgagcacggtcgctgagatgctgcgcccctggtcgagcgcaagcacgcccagcaacgccatgtcgtagatcagcaccagcagcagccacagcccgatgcagatgccggccgcagttccgcggtcgcgtaccagcgcgctgaccagataaccgatggcgacgaacgcagcgccgagcagcaccgaggagcccaccatcgcagcgaatgccaggagactatcgctgtcgatgtcgctgcccgtcgccgccagcgctccggcggcggcgccgtaaccgaggcacgtcgcaaagccgagaacggcgaggtggcccaggaatttgccaagcagcacctgccatcgcgcgaccggatagctcagcagcagcagcatcgtccctcgttccatttcgccgacgacggcatcatgggagatcagaagcgctatcaacggaacgagaaagatcgtcaggctcgacaggctgacgatgaccacgtcgagcgcgcgaacgcccacgttccccgtcggcgcgctgccgagaaaggtcagcgacagggcaaggccggcgagcaggagcgttgctgccagcacccagcgattgcggatggcttggtggatttccttggcggcgatgatcaggacgttcatggcgcctgctccgattgccgaagaaagtgagcataaagctcgtcgagggtcggcgggaccacgtcgacgtcctcgacggagtttccggcggccgtcgcgcgatgcagaagctcgatcttccgctccggcgcagcgtcgatctcgacgatgtggccgttcaagcgacggcaggtcgcgtccttgggcgcccaacccggcagctcgctcggagcgaggcccgccaccctcaggcgaatcctggtgggcagccgggcgaggcgacgcagttcgtcgatcgatccgtccgcaaccttgatgccgcggttcatgatgatgacccggccggcgcgctcctcgagctcggtgagcgcatgcgacgacaggagtacggtcgcgccgccagctgcaagccgcgcgatgatgtcgtagaacgtctgccgcagctccggatcgagaccggtggtcggctcgtccagcaacagcacgcgcggatgccccagcagcgcctgcgcgaggccgagccgctggcgcatgcccttcgagtaggtgttcaccctgcggcggctggctgcgccgaggcccacggcatcgagcagctccagggctttggcaaccggctcccgcttcagcctggcgtagaacgcctgcgtctcgcggccggtcagggcagggtcgaaggagacgttttccggcagatagccgagttgccgtcggcccgcgaattcaccggcggcgggattgtctccgagcacctcgatggagccgcttgtcggccggatcagcccgagcatgagcttcatgagcgtggtcttgccggcgccgttgtgaccgatcaaggcgacgagctcgccttgtccaagcgtgaacgaggcatcgcgcacggccgtgagccggccgtacgtcttggtgacctcgctgacgcgtaccgtaccggtcatcgcgtttccttcggtgtgcggctgttcggcggcgataccagcggatggctgtcgacgacgccacccggcagcagcgccgggaactgcgcctgcgcccagcggatcacctggacggcggggctgttgatgagaaccttggcagcgggtgcggtccacagcacgcggtcgatcatatcgttcggccggtacgcggtgtccgcgattccgtcgccgttcaggtcgaatgccgggttgtcgctccaataattgccgcgcccgccgatcgaccagtcgagatgccgggtgccgacatatttcacctggttggcgttgctgacgaaggaattgccggtgatttcgttgccttcggagccggccgtgaagtgcacgccgatggagcaacgctcgaaccagttgttgcggaacttgttgtgattggtgttgtagatgaaaacgcatttctccgggccggtcctgagagagctctcccgtttcggctgcggaagcatgcctcgctcatcgtccggagcatcctcagtcttctgcatgaccggattcagcgggccgccggtgacacgattgttctcgatccgcgcatagttcgcgtaattcaaaagtagtccatagtcgcgatcgcgatcggaggaattgccgcggatcaccaggcggttcgaatacatgatggcgtaaccgacatggttgccgatcgacacgttgccgctgacttcgctgtcgttggtgtacatgtagtggaccgcgaagcgaacctgctcgaagcggttgtcgatgaagcggtccttgctgctggagatcgagaagatgccgtcgcggccgtagcggaacgtgttgttcgcgatggtgacgtcgggtgcattccacagcgagaccccgttgcccgcctcgctgaggcgcccgccgcgcagtccctcgatctcgttgcggacgactcgggagcccctggcaccgtgcacgtagacgccgaacaggtttccgaccagccggttgtcctcgatcttcgcacgctcggccgtcttctgcaggaagatcccggaatccatcgcctgcaggtcgcgacccgacccgcgaatggttacgccgcggacgacgacgtcgggcgcgctgacggtgatcacgttgccggagccatcgccgtccagcaccacgccctcggtcccaacgagctccaggggacggtcgatccggatcgagccgtgatagtcccccggggcaagcttgacgacgtcgcccgcgcgcgcgcgatccagcaccgcttgcagcggctggccgggcgcagccgtcaaggtctccgcttcagcgaagctggacaatccggcggcgaccagcaccgccggaaacatgcgtgacaggagacgcaccagttcgctccggtcagaccgacttcggttcgacgaacatgcggcccttcatctccatgtgcatggcgtggcagaaccacgagcagtagtaccagtagacgcctggcttatcggccgtgaaggtcaccgacgaggtggccatcggtccgatctccatgttgatgccgtagttgacgatgcagaagccgtgcgtcaggtcttcgaccgcatcgatgttggtgatgaagacggtgacctcgtcgccttgcctgacctggaactgatcgaggccataggccggcgcggtcgacgtcatgtagacacgcaccttgttgccgtcgcgaatgaccttcgaatccgcctcgaggttgatgccgtcggccttggcctgcttcaccgcatccgcgaacatcggatccgcacgatcccagatcgagatcggattgatcttggaacgatggacgatggtcgcgtcatgcggttcggcgaagctcgggccgtcatgcaccagcttcatctgatcgcctgagatgtcgatcagctgatcgttctccggcttgagcggcccgacgttcaggaagcgatcctttgagaacttgttcagcgagatgagccattttccatccgcctccttggtctggcccatcgaggtatggttgtggcccggctgatagtgcacgtccagcttctggaggatgggattgaccttctcccccttgaaagcccgcttggcgaggtcgatgttccatttgcagacctggctgtcgaggaacagggtcgtataggcgttgcccttgccgtcgtaggcggtgtgtagcggcccgaggccaagctcgggttccgcgacgacgacgtcacgtggcttgatcttgtcgtcgaacagctggtcgaacagccgcacgtccatgacggtcacggtgggcgagagctttccggctgcgacgacatggatgccgtccggagccgtgttcatgccgtgcgggttgttcgagaccgggacgtagcgcgtgtaggccgatcccttgcggccatcgacgacgggcacgccgttcatttccttgaagtcgcccttcttcacggcctcctcgatccgcttgatgttgaagatgacgacccagtcctgttcggcggcagtcatctccgccagcgtgacgccttcttcggcgttgtagcaggtcgcgaagcagtatttgccctggtaatcggcatcgacgttgtcgaggttgccgctgacgatcacctgccaggcgaccttcatcgtgtcgccgtcgatcgcactgaagatggaacgatactgtttgggatcgtcgaggatcttgccgtcgttgggcaggggcaccccatcctcgccgttggcgaacacgtagccggtgcgcggatatttctgcacgcgcaggccgtggaccgtatgctggttcggaagctcgatgatcttgtcgcacttcatgacgtcgagccgcacgcgcgcgacgcgactattggccttgtcgttcatgaaggcataacgcccgtcataggtgccgtcggtaaaggagatgtgcgggtggtggaggtcgccgttcaggtaggtaccgccgcggttcttgaggaattcgcgcgttgccggctgcatcccttctgtcagaaccttgatgctttcgttggtctgcccccagccggtcgcgctgcagcgattgaaaaccggaacgcgcatcagttcgcgcatcgagggcaggccgatgatccgcatttcgccggtctggccgctcgagaagaacacgtagtattcgtcgagctcaccgggcgccacttcggccttctgcaccgccggtcgcgccgccggcgcctttggtgccgctgtcttggtctgagcgtcggcggacgagacgaagccgctgccggcgttcatcgccactccaccggccagccccacgcccgctgcggccgccgtcgttcccagcacagctcgtcggctgacgcctttggtcttttcgttctcgctcatgattgcctcctgggcttccggttcagtgtggtggtggagagatggcggctgaagcgccgacgggcttaccgccggcggtgatgacggtcgccggacccttgccgcctgaacgcatcgaaggcgacgacatggccgcgaatttctcgcgcttgagccggacctggatcatgtgcggacagcgatgatcgtcgtagtagagttcctggcagtgcatgcagtagatgcactcattgacgttgatgtgcccctcgggatggatcgactgcaccgggcattccttcgcacagcgttgacagggcgaaccgcattcttgccagcggcgcagccactcaaatgtccgcatgcgaccggggatcgcgagcgcggcgccaagcggacaaagatagcggcagaaaaaacgctcgatgaagaggccgatgaccagcagggcgactgcataggcgacgaacggccagcttcgtgagaacttcagaatgatcgcggtcttgaacggctcgacctcggcaaatcgctcggccatgtcgacggagtagagcgatagcccgaacagtccgagaaaaatgatgtacttgatcggccaaagccgctcgtgcagtccccacggcaccgttatttgcggcaccttcagccatttcgcggccgtgttggtgagttcctgcagtgcgccaaagggacacagccagccgcagaacgggccgcgtccccagaacaggagcccgccggccgtcgcggcccatagaatgaagatcagcggagcggcgaggaagaattcccagcggaagccggtcaccagcgcgttggtgaaggtgacgacgttgacgacggagagctgcgcgttcgcgtaccagccgagccagaccagaacgaaggcgagatagcctcgccgaacccagttgtacaacacaggtcggcgaacaagcagattctggaagaagaagattccggtgaggccggccagcatgaatgcggtaatggcgatcgacaccgtgctcgatcgccagatccgcatccacagcggctcgtctgcctctggcggggcggcagaggcagcagcggcaggctgcgaagcaggaggcggtgcattctccggcaccgtcaccgcacgctgctcgcggcggatatagcggtcgggcagggcgtagctgagatcgaaggtcaggaaggccttgtcgcgaccgccgaggctccgttgcacgagcaattggagctgccacggctccgtcggatccagggtgaattcgggaggggtgacgaatagggcaacttccctgaactcgggcgcgccggcggcctccaacgcaccaagccgggtatgattgcgatcgcggaagcgggtgctgttgccttcctgcaggatttcgatgcgatcgaagatgccgccgcgcacataggcggaacccttgaaggagtagaggccgttgccggcgacgacgatggcctgctgcccaggcttcaaacgacccttgagacgctgatagccatcgtcgccgagcaggctgcggccgatcgtaggcgcgctcacgagcgccacatagaggtcgatgaaggtctcgctggcctcgcctggttcgggatattggctcgctgccgcactaccagattttgcaaacgcctcgttgacgtcaccgatgccgagatgaagccggcgcaccgagccgtcgccaacgaggctctcccagtcacgcacttcactatgttcgagatcgagagtcttgacgacagggggcagggctgccgaagccgcagcgccgtcgccggcgccgacgcggccgctccggatcagcttggaggcggcgcggacgatactgtcgtgcatcaccagcacggtgacggttgcgccgctcacgatgtcgacctgaggcggcttctcggcgccacttgcgaccggcctcatgtccttgccgatcagcgcgttcacggcagcgacgattctggcctcaggaatgccgaccagcacgatcggctccttgtgatcgacgagcttgatccctgtgatgacacccttcgggtcgatcccagccagcaggtgaatcggttttccggagtagccgactgagttcgcgaaatcggagttgaggaagacaaacccttgcagttgatcgccgcggtagacgggcacgattggcggatcgccctgtggcgggccgaagcgatccgcgctggcgaagaactcgccaggtgcgatcttcggcaggtatgtctgcaagtcaccggccgcgcatgcgggcgaaatatatgtcagacacgccaacagcaagcccgcgagcgcgagcgctgcacgccttgccaaggcgatatcgtcaaccgggcgcttcgacatgtcgattcaaatgccatctgcgcggccaaccgggccgcggatgcgttgcgattcttggtcgatgatttgtcgccgctgacgtgtcacaatcatcgcgcgcgcccgcatctgtcaaccccgacgaaaaggattcgtgtttggggaaccgaagcaaacgactgcattgggaaccaagaccatgccatttctacgcacttcattactgagcgctgagcctgccggtgtattgaagtctctcgacgagctctttgcgctagcgcacgcaatggagcaggaagcggccgacaagtacgacgctcttgcccaggacatgcgcgcgcagggcaaggatgatcttgccgacgtgttcacccggcttgcctcggctgagcgcgagcacgtcgatagcgtcgcacaatggtcgcattcgcgccggggcaagagcccggatcccgcgttggtacgctgggaaccgccggaagcccttgataaggaagcagccgcagaggtgaaagcatcccgcctgatgacgccgtaccgcgcgctcgccatggcggtccgtaacgaggagcgcgcctttgccttctggtcttatctggcagcctactcgcatgatcccgaggtcaagaaggcgtccgaggcaatggccagggaggaactcggtcatgttgccacgctgcgacaggagaggcgccgcgcctatcatcaacaacacgaacgggagagcgccgatgcatccgccgcgcctcagctgcccatcgatgcgcgccgactagagcttcgtctggtggaacagcttggggagattgaacaacgtctgcgcggcccggccgccgtccgggcacgagatatccgccagcaagcaaccaggttggctgacgaggccgccgggttcgggagctttccggccgccatggagcgaaaggattcgctggagatcgccgaagccttggccgacgcctacctcgacggcgccgagcgcgcgagcgatgcggctcgcctcgcgagcctgcagcggctcgcagaacaggccatctcaagactggcttggatgcgctcgctcatggaagattagccttgccgtcgcagcgccgagatcgcatcgcggctcagaagggggcggcggttgccaatgctactggacggtgtcgcagacatccgctttagcaccggcgagtttcgagtttcattcgagtcacccgtgacttcaccccagtgcgtcgatgctcagcgccgcaccaggaagcttgtgcttccagccgagatcgcaggagccgggagttgcggtctgacatagatcaaaccttgcgcggctagactggtcagaatggcaccgggtcacgtgctgagttccgcctcacggctcggcgcatgagcttagggtggcgacctgcgaaatctggttcgaggtgctctagacggacacttcaggaaaacgcggagcgccgacattggagcctctgtcgtgtgtcaggcagctcgcggggggacaaaatgagtgccgtcgtaacagacagtcaagcgcctcatcctgggtcggggttctgaatgttcgaagcgacaggccacaattcgatcgatgcgctactgccgcgagagatggcagaacgcgcggagcagattggtgtcgacaagacgcatctcgaaaccgggagcttgatggcgcttgcggtgctcgcgggtgcgttcatcggttttggttcaatgttctccgttgtggtgaccgccggcgccgaaggtgtgttgccatacggtgtcatacgcctgctgggcggcaccgttttttcgttaggcctcatcctggtgatcgtcggcggcgccgagctctttaccggcaacaatctcatgatcatggcttgtgcgagtggccgcgtcgcaccaggtgctctcctgcgggcatggacgctggtctatatcggaaactttgtcggcgctgccggtctcgcgctgctcgtctttttagccgccggttacgaccacgggagtggagcggttgggctgaccgcgttggcggccgccaatgcaaaggcatccttgtcggcgacccaggcagtcattcacggcattcttgccaacgtactcgtctgtcttgcaacctggctatgctatggcgcacgatcgacgacggataagatcctagccatagttttcccgattgcggcctttgccgcgaacggtttcgagcattcgatcgcgaatatgtatctgctgaccgttgcactcctgcccaagtcaggcgcagacggtacgttttgggatctgatcgggaagacgccctcccattttccgcatttaacggtgcgcggcgccgtgttcaatctcgcctgggtaacagtcggcaacatggttggaggtgtattggttgggattacctactggttcatttttttgcgaaggtcacgaagcaaggccgctactggagggccggctccatgatccctatcgcaatctcgcgtcttgaaacagacgacgaaatcgagatcgtcgagcgtaagggcatcggtcaccccgacaccatctgtgacgcgctggccgagatgctgtctcggaatctctgccgcgagtaccagaagcaattcggtcgggtgctccatcacaacgtcgacaaggcgttattgtgcggagggcaggcggtgccggcctttggaggaggaactgtcacggtccccatccgaatcttcctggctgggcgcgccatcgccgaatttggaagcgtgactgtcccaatcgacacaattgccgtcgaaggttcgaagtcctggctaaaggccaatctgcacgcgctcgacgttgatcgccacgtccggatcgaggctctcgtccgtccgggttcgcacgacctgcggtcaatatactcccggcggcgcatcgaagacattccgcttgcgaacgacacgtcgtttggtgtcggtcatgcgccgctgagcccactcgagcgcctggtgcgcgccatcgagcagcggctaaatggccgtgatcgcggatctgaccatcccgcgtggggcgaggacatcaagatcatggcggtccgcaacggcagccacctcgatctaaccatcgcctgtgccatgatcggaggatttcttgccggcatcgacgactatctggaggagaagagcgcactggccgctagggtccgcgactgcgccagtcagtacggctttccggagtgccacatcgcgatcaatgccgccgacgatccggcatccgggtcggtctatttaacggtcacgggaacgtccgccgaagccggcgatgacgggcaggtcggccgcggcaatcgtgtcaacggcctgatcacgccgtgccgacccatgagcctcgaggctgcagccggcaagaatccggtcagccatgttggtaagatctataatgttctcgcgacgcaattggctgaaacgttggtgtcggccattgcggacattgaccacgcgcactgcctcctcgtcagcaagatcggcgcaccgatatctgaaccggcgctggttcatctcaggcttgcaacgcggaacggtgcgtcgctcgcccagttgagaaacccggtcgaggccctcgtgtcggacggtctcagccgaactcccgaactcgtcgcccgactggccgctggcaccgtggacgtcttctgatgcacgcctgcagccgcgcgggagagtggagggcagaccgggcgcctgggtgtgcgttcagtgttctacgctgcgccctcgtgctcggttaccgcggcgcgatggaacatcgtgcgctgattcataaagccgatccaacgcttaatccacgttaaagagactaatctattctgcgctagcgccgatcgaatgaggaacatcggtggcgcgcttcggttctgacggctggcgcgaacgcgtccaggcgggtcgagcactcgccgtgtggcctccaaccggagcaatcacatgagcaggcgtttccaggatcggcatcatcatcactccgtcgacgaaaccatcgcccagaccttcgacgactatcttctcttcattggtgaccggcactctgaccggttcgcgggctccgatgaccagatgagcatagcgttcggccgcgccggaaacgaccgcctgtccggcggagcgatggacgacgatctcatcggtggagttggcaacgagcatctcgtaggggccgcggggagcgatcatatcgttggcggcgccggaaacgaccaactggacggtggcgatcaggcagacacgttgatcgggggcgacggcaacgatgtcctggacgaaggtgcgggtcatggtgatctcgagggcggccgcggtaacgacgttctaaccggcggtccgggagcggacgcgttcatgatctctcccgatagcggccacgatatcataaccgacttccgcaccggtccggggatgttcgaccatcttgcggtcatggacatcgaaccggagcagttccgcttcaacgatacgcgggacggcgtccggattagttggcatacgagcaagggcgacggttcggtgctgctcgagggtgtattcaaggcggacctcgcacaggatgacttcatgttcgccgacgatcggcacctgattgacccgacgagttctcattccgaccgcgtcgccgcggaacacttcgtaaaggacgagggtaacgaggatgcgccgccgtcagcgggcgagacgccggcgcaattccagcgctctttcgatggcaatctcgtcaagtacggcagcgatggacagaacgacgtgttccatgcgacgtccaagaacgatcactatttcggtttggggggcgatgaccatctctccggcgggaggggcgacgaccatcttgcgggagatgccggcaatgacgtcctggacggcggaaacggacgggacgaccttcgcggtggcgacggggacgacagcctctacggcggagctatggccgacaacctcatgggcggcgcgggcaccgatcatctgaacgccggggccggacacgacatgctcgaaggaggaccgggtgacgatatctacaacggcggcgacggcgccgacgctttcatggtttcccacggcagcggtaacgacactgttgtcgcgggtttcgatccaggaccgggcgccttcgatcacgtcgccttcatggatatcatgcccaacgaagtgagcgtcattgattcgctatctccccacggcgatggacacacgggggtcctggtgagctggggcgacggatcaatctttctggagggcatccaaaagagccagatggcgcaggatgacttcatgttcaacgcggtagaagggggcgcgttcgttcccgacccgtcgatcagcaccgaaggaagccagatgatcttccagggaactcacggcgattggcacctggcgtagaggcggtttctttggggacccgccggtcgccaacggccgcagataaaattgaaaggcgaacgacatcggtgtaatccgcgctagattttggcactagagccgatttatccacacgctatgtgcctaggtttgttcaatcttttttttcatgcagttagcagattttggcactcaagactcaaatttggcactgccgtcatttttgcaactccattttggcactattggcacgtccaaaagaggtgggttttcccggctcccggatggccgttccgttgactttcgggcgctttagggtcgggttaagagcgcggtctcgctaggccgcagcgcgctcggaagtcgtggcgtgctaaccgacagaggtttggcatggtcgactttgacgatcccaacaaccagctttttctgacgcgggtgttccaggccctcgccaatgtcaatacccgcaagatccttgaaaccttggcccatggtccttgctcgcgtggggatctgctgctggtcttggacacttccaccgctcgcatcgtcgaggtgatggaaatcctgcacaccatcgggctggttgcggagaaagagacgcgcgagggcaaagtttacgtgttcaatccgacgggattagacctcggtcggtcttggctcgagcggctttactcgatcgtcgacggtcgagccctgaaatagcgagcccgagcggcagcaccggttccgttacgttgaggaaggcttcggcgaagccgtgaccgaggtgcagaagttccatcaggcgtgacttcaggatttcgcgggccttgagcgagggcaggcggtcgatggaggccatgatccccgcggcggccttatggcgcgagatcgtatccccgacagccaggtcggcagcggtcgaggccccgaggaggtcgaggacaatctcatcgaacgagcaaggccatcgcttgagttgcgaaaatcctgcggcggcgtttttcacggtgatgccgaggaagagctcctgaggaatagctctaaagtaggccatccatccgctgagcttgagaatgtccaccgacgacaggtcgccgagaggacccggcaatctaagatcatagtcaaagatgtagtcggccagctccttggcagcggcgacgatttcatgcggacaggcctttggcctcgcagtccgcatgtcgaagtcacagatctggcaggaccaaacgttggtcatatttctccagcccaacaggttgatgcacgacgggcatctgtcgagcagcacctcgccgctctcgacgtcgcaaggaaaggccgagacaagccagcggttcctgatgcgagcatcgttgccgtccgctgccaaacgagcgggcgcgaccctacgacgctctggcaagaaccaacccacgggcagttcgcgaccaaggaattcgatgcgatctttgaatattttataagcgccgatcgagagcctttggagatcgaacgaacccaaggctgccagttcggcgactgcctcgggtttgcctgcgatcgccgagactgactcccagggcatgtcgagatgaagccggagcagcttgtcggcgtcgatgcgccccatcggagccaaccggaccgcgacggaagcgatggcttcgtcgtcgaactgcgatacggtcttgagccacggcgtgttcggaatcatcgtgtcggacctactcggtggtcgcttcctgttccacgctgagcgggaacgaaggaagcctgctgtagtcttcgcctcgaaatgggttacggccctgcatgatctcctggctgagaaagacgcgatcgaaacccgcggcgatgtcttctttcgtcagttccttcggctcgaccccgccggtccgcatgaaggcgtgaggtaccgccgcctccaccagcagcgaatgtcggccgggacgtccgcgctgtgcgaagaacgtcgcacgcagcatgtggtggtcgtcttcgttgtccttaaaccagttcgattcgaagggaagctcatccgagaaggcggccacaaacgccgcatgttcctcccgttgggcgtcgttcgcgaagccgaagggtgaaaggatcttcatgccgccggaccgctgccccatcgcgtccgccttgaccatcatcttcgtcaggaccgggggtcccacgacgaacaagggcgcgttgcaggagttctcgaacgccagaatgaacctcgccagcttcttcacaccgtcttccgcgagattctgcgcctcatctaggaagacggcgtccacttcgttgtcattgagattagcgatgagcgcgtcggtgccttcctcctcgccgagtcgcaggctgagccgatcattgaagatcttaaagttgatcttccgggccaatatccgcggcgtcgatccgcccatgaggtcgacgtacaggtagcgctttccgttgccctgaagcagctgaattttttccttcgatacgggcttgccggtgcgttctgtgagcattcgcttgacgatctcactctttccgcaacgcgaccagccgatgagatacgtgctcgagttttcgcgcaagcgcttggcgaacgcgagcgacaacaagaccatctcccgcgcttcttcggccttcgtatgcctcacgaagatgcctctaatgtcgtcgagcttgctcaacacaagcggagaattgaggatattttccagatcggacatttgcgcttactgcgacctgatgatcggcgcgtccaccccgaaccggagcttcttgcgcggtgcggacgtatcctttacggatgtctcttccgcgcgagcagcttgaacgggaggcggcgggacaacctcttcggtcgcggtggccggcctgaagattccggtcctctcgatcaactcatcggtgacggcgagcgcatgctcctcggcgcctcgaccgaggacaccggctatacggggatagtacccgttcgagagcacggctttcgccggaggccgctcgccggtcgggaccgcgcccatagctttcagtgcttcctcgaggaggtggttgaatccgaccttgtgggagggatgctctgtgggggcatgtttctttgcgaggcgcagtttgctcagcgcctcccactggaattttgtgaggccgtgcgcctcctcgtcggtcgacatcaccacgaactcctccgggaggtgttcgttaccggggaagcggctagtgtgatcgatcaccacgcagcggcctacgttcgccagcggaatgcgcacggtgactggcgtgttcgtgcgctttctctttcccatgctgcccgatcgggctcgcatcgcctggatttgcggtgactgatagacgaggttgttccagaggatgccgtccttgcccgcggtaagcttcaactccaaactcgggatcaagtcccacttcttcgcttcgtccacggtgagcggctgcgggcggttcgagtcgctcgacgcacctcggagccagcgctcttccggagtgtcccagtccattccttcctgcttacgccgggcgtagacctcgatcagccagaggtggaacagcatgatgaagtcgtcgatcgtgatgcacgcgtcgagcaggggcttgcgcgcgcctcgcttttgcgggctggatccagtcgaccccttaagccacgacacgaaatcagactcgagcgttccgaaaaaccgctccacatagggtttggtgtccggctggtgcggtaccgccatctcgaacccgatcctgacgcgggccaaggccagcgccatctgttccgaaacgaactccttcccgttgtcgtaccggacctttcttggcttgccgtagctcaaaagagagccgcgaatatgcggaaatcgcttatcgacgtaagtcttgaccttgatcccgtgatcgatcgcggccagtgctgggtaaagcccgccaggttcgaacgatggaaagaatccgacagggtacccgctgtaggtatccaaaccgaggcaaatccagaacctgtcgatcccggccttcgaccagacacgaccgaacggggtctcgcccaagacgcccgcgaaatcgaattggtggtgatcgtactcgacgacgtccaggatgcgtttcggacgctcgaaacttccctggccgccgaactggagatctgcagcctgtacaccttgctcctttgcgagcctgatccacgcgtcgaagcgacggtactgaacctgtaccgtcgtcaaaccaacggtcggaagctcatcgagcaaccgcctctccgaaagctcgccattctcgatgagctttttgatctcctcgttgcggatccggatctccgcgttgcggccatcgatcctctggttcgccaccatttgaatcttggtcgggccgaactcggccgagatttcgaccaggtaacggatggtcgcggagatgatggaaaacacctccttgggcagcttctgctcgcgggacttgatcgcattcttgtgcacgaaggtggcttcctgcatgccgtgcaccagttcggcggccacccagcgaagaaccgttcgcgtcgtcttcttgggcttcttgatctgcttcccttgcggccgcttcaggttctcgaggtcgatcgtaccgtcgacccgttctatgatcgtttcagcgtttgcatggttctggtagaacggcttcccgggcggcgcgataagcatctcgttgatgaacgcgccgacgtaacgccagatgccggccgcgcgtccgcgcggcttggcgttgagggtgtggtaaaccttgccgatcaacgcgcgtgtttcgtcgatactcttcttctcgtcgaccagaggcggcttcctcagagggttgtagtagcgcccctcctggaatagctcgatcagccgggtcgttgttaagcgcgcggtttcgccggtatggtggttgatgaggaggtgggggccttcgccctccatcttcttgaagaactggtgaggtttgctgtcgatgagaacagtctggttgggcgtcaggttatcgaagagaaggtagtcgatggtgggacgcggttcctcgtccacgggcgtggacaaggcggcggcctcgctcgcatcgagaatcttcagcatgagatcgctcccttgtggacgatcgtctcgggtccgatcggggcgaacaggtcgatgtagacgatgcgctccgggatgcgcgacagcacgacgccgcgcggatggggagcctcctcgaagagggcctggcaacgcgacaggggcagggagccgccggcgtcgttcagcgccgtgacgagccggtcgagctcctccggttcgatgtcccaccggtcgttggccgcgatctcgtccacgacgtcgcggtctccccaacgcaagccgatgccgcgctccgttatgacgcgaaaaggaaggccagcccgccggtaggcttcgcggatgcgacggagacgcgcgcggagcaggaccgcgtcatcccagcgcttctgcgctttttcgtcgccgacggtcggccgcggcggacgaagttcgcgccactctttgatttcgtagcggacgaagccggcgtcgtgctcgacgagaaagtcgggcgtgtagatctcgttcgcgaactcaggaaagatgttcatccggatcgtctccggctgggcccagatccgcttgacgccgagcacgtagtcgcagacccggacgaagcgctcttcgatgccgccttcgtggacgatgtgcccgttcatcttcatcgaatagtgaccgccgacgacgtgattgcggcggccagtgatcacgcgccgcgtcgcctcgttggcttcgaggcggaagacctcgacgccgtcgcagagggcggtccagacgcgctcgatcttcttaggcatcggtgtcctcgtcggggcgtttgcgcaggtctgcgcagacgagatcgacctgctcttggacaaaagagtccagagtgctgaggctgcagaattcgcgcgagttgtcgcgatagacccgcgtcgggattccgaacgcgtgatcgatggcaccgaagatgcgctcgacgatcggggagagatggttgtggacggaacgcaccttgtcgcagacctttcttgccgtgtccgaaggactcgcgcagcgatacccagcgagacttttgttcggcggaaaggattcaagaagggcttgcgacttggaatcggacgtgcgattctcctgtcgtccaagagttcttcttggtcgttactgccgagcgatcccggactttcgtccgggatttgcggacttggatctctcggaacggctttgcgggcgtggtccgaagatccttcgatacctgcgcgactggagtccgctccggtcgcgcatagtccgctgactagatcattccgctatccccgtgatgtcgccgctgcggcgtatctcattgaataccatcggccttccggaatcctagcgaaatgaatcccgtggatttcttcgagccgtttcggagcatttcctagaaattcttaggacagctctacgtttgtcgccagattttgcgctcttgcgtttttcctgcattcgtgccgctgcgcacatcacagcatctccggcgcgtcgaagtagcgccacgctgcggcgacgccgatgcccaaggtctttgccaccacttcgggcgccgcaccggagcggaccaggttcgcggcgagagcgttgcgcagtgacgtaggcacggcgtccggaccgactccagtcgcctgtcgcagccggcggcaagccagttgaagcgatcgcgcgctgaagcgggtcccccgcgccgtaacgaacaaaggtgcgctcgacggaagctcgaagggctgtactcgcaggtagcgctccagccactctttggcgtccggtgaaacgatgccgggccgcccgttcaggtgggagccggttaccctgaccgtcgatagccgcgggttgtagtcgcctcggttcaacgcgaccagctcggcggtcgtgagaccggacgatgcagccaagcgaagcgcagcgtgatcgcgcgcgtgtgtccatgactcgtcgcaatcccccgtcggcgctgcgagcatgatctcgatgacgtcgtcgccgacggccgcgcggcggaccctaccgcacggtgggaagcggcagctcagcagcttcgagcagtcataggaacgcttcaggctgagaaagcgggcaaaacttcgcagcgctgagaaacgtctaaagatggtggactgcgccgtgccggtcgcagcccaggtggccgcgatgccgtcgacggccgactggtcgatccgcacgattgcggctacctcgtcggagccgagcgcagccgcaagatcccgaatgtcccttgaataacagtccatcgtcgacgccgaagcatccgcatctctcaagccgtccaaccaggccgagctctccggagcaaatggcgacgtcgtgggcgaccggattttcattcagagctccacgaaatcggcgctttcgatggcgtccaccaccttggccagcaacgcccagatcgactgccgtcggtagtggtcgaacaccttggtgctggcgagccgcggcggggtccctgcgagcgggttggcggtctccagcacgtcgatgccgtagtcggatcggtccgccagatcgctcagattggatatccggacactcgcgatggagcgccgaagatgcgtcgagcctcccggcagaagttcgatatgaacgcggatcatggggtattcctcggcgtatcggttgcgacagttgcgatgggttgtcggacgggcgttcgaccccggaagagatccatcgcttcgtcgccgcttacgtaacgtcgggcaacgagggcctccgcgatccggacgacggcggccgcgtgccgcgtgattatcccggtcgctcgccgctcgagcattttcagtcggtcgtcgacctgcttggcgagcctcgcatctctactgaccatggccagcgcttcgctatcggcgccgcggtagacgagcccaccgagcaggggcgtcgacgtaaaggcggccgcgaggagcgacgtgcagatcgctaggtcgctcaactgagtgccaccggccccagtggaaaccgagccgaggaccaccttctctgcacagagacccccgagcagaaaaacgacatgggtctccagacgatcgagcgtccacactcggttgtcgtcgaaattcaggcgagcatcgccaccgatctttccccggttgagaatcctggcgctgagaggtttgcccccggtcgcgatgctggcgaccaggtggcccgcctcatgtaccgccacccgacgcaagaccgcctggggaagtgccggcccgctaccttccctgacgaggtcgtcgacgttgagaggccggccggcacgccttgcggcgcgcctcgccgctcttgcgacgtccatcgcttcggccggggagatgccttcgagcagacgcgccgcggatgacagatccataccctcgagagccgtgcctcgaagatgatatcgcaggacgttggccaggcctgccgcgtcgggtcggggaatctcgatcgtgcgttcgaagcgcccgggacgcaggagtgcgggatcgatggcgtcgagccggttggtcattcccaacacgcacagcccgacgttgctctcattgtcggacatgacggaatccaaactcgtcaacatctcgcctacgacgaccgaaaaaaagtcgctgttgtgccgcgacagccggtttctagaaggcagttcgtccaattcgtcgaatgccaagagacacccgcgctgccccgacggcccaaagcgggccgcttccgctcgagccctgctgaacacggccctgagcgacttgacgacatcccccaagtgtccttcgcgttcggcgaaaaaatccgagatcttcgcgacgacgaggccggtgcctgccgccaaggcgagagaatttacgaaaaaatttttcccgtggcccggctctgaatgcagaatcgcgccctggtccgcttccgcccactgtatggatcctcgtctccaatcttggacatccttcacgaagttcaggccaaaaattcgggcggcaccgccgaactcgatcgcgtcggagaggatcggcgcaccttcgacatggggcgagctctgccgccggcgcatcgcgagggtcgcaagccgctccagcgcgtcggaagccgtcgatccgctcctgaagatggaaaccagatcgttcagatcgagacctgacgtgtcggcgatgcggctgctcggtatgcgtcccgtcagtggcagcagagttctgagaaggacgcggaccgacttggcgtcgggcggaaccagtttcacggtgacgtcggccgacagcagcagagtggtcggcaagaaacgctgcggatccgtcgatatcccgacgacgctgcgtcccgcgaccaggcacttcgctacctcttcgtttccgacgtgattgacgtcgatcgacttgttcgagccggcgcgtgcgatggtcatgacgcgagcctcgcttagatattcgtcgactgcctccatccatgccgaggagggcacctgaacgacgctcgcgaccgggcgccccgccgcaatggctcgtctaagcgacggaggagcggcccgccgaaaggcctcggcaacgatcgcgccgcgaacttttttcgcattcagccgggcgttaggtcgatcggggccgcgagcgggaacagcatccggctgaccttcgatcgctgcctccaggtcggtgacctccggatcgtcttccggagcgggcaacatatcgtgccgcagtttggagaaccctccggtcatgagcgagacctcacggtcgtcgacgggctcagcggcgtcgaaatgtcgatctcgacctcgttgcggcatgcgagcgatagcactgacgcaaacggatcgagaggtccgggtaccaaagtgcagagatgatggagcgacatcggcccgtcctccgccaaggccgcgagcagccggtgacgcatgtccggcgggaccgaaaagcgtcggtacgtccagatcgcgcgagccgtggagaagcggggctccttgagaatatccgctccggtcaatgtgtagggcgccaggccgcgcgcccgaagttcccgatcgaaggcatcggcttccccgagcgaccgcagcggccgggcgacctcgatgttcagataccgccagccggcatttgtccggaaggtgacgacttgaatatctaccggctgcgcttcggtccccgccgtcccgaggaagccgatttcaagaatttcggggtccaacgttgcctgtagcaaagcgtccctgacgatcccgccagcgtgcggaatcggtcgtgaagcctttggcgaaacgaaatcggcagatcgggggcggatcctgtggtcgaagcgcatggctcatgtccggtcgaaggttgggtcgagtagaagccgttgtcgtgcggcgggggggtgatctcgtcgtccatcgcgtcctcctagatgtcgaacgtgaagcagggatcgaagtcatcgttttcccagcgcgagacagcgtcccagggaccgtatcccttgcagttcgcgatgagcttcacgccctcgaccgccagctcgaagctgacgtgcgtgtgcccgctgatggccgcgtccagaccgagagcgaacacctcggggcagcgcgaagcgtaggccggacccaagagatcctgctcgtccgtggtcgacgccggacggctccgaccgccaaaagcgtggaaggggtgatgggtaacgaggagccgcttcgatgtcttcggcccgccgaacgtggaccagatgaactcgcgggtcttgcgatggcgggcgagcgtgtctcgaggacggagccgccgggcatagcgatccgtccggatccgacggtagtcgttcatgctggcggcggccgcgagcatggacttctccggcgtgccgtacaggtcgaagtcggtccacccgacggcgccggcgatgaggacgccgcctttgccgccgatcaacttggcttcgtcatcaagtacgacgacgctggtgccgagggcggcctcgcgggccttgtcgagctcgcggtcgatgtcccgcccaaagaattcgtgattgccggccaccaccacgaccggatggtcgtcgatgcgctccgccaaccacttcacgccccgcgcgaagcccggcatgagatcgccggcgcaaacgaacacgtcataggtgggccgctgcgaaggagagggcaggtcccagcccctcgcggtttcgatatggagatcactcatggtccagatgcgcacgcgctcactcctttgccgggagcgagcgcggatcgaccgctacgaagacgtcggtaattcggtcataacgaccaagaatgatcggtcccggacgtttaccgtcgaaggaccgcacgacatgcaggttttcgaagccacgcacattacgcaccctcaccccgttcgaatgcgccagacacgcggtgacaagttccgaaccgacttggtgaagacatccctcgcggccgcaccgctcacacgtgcaggccgagccggcctccgccagcgcgatggcgtactggatcgcggcctcgatatccgggagacgcgcgatcgacgaggaacgatggtaatcgagcctcagcactccggatcgtctggagatcgctgtgatcttcagtgacgaggtaccaaccgccgccgcgatccgggcgacggctcggcacacgatctgctgccaaccatcatccacaagcgacaggccggggacatgctcggcgaccgtggcgccgtcgaacaactcgggaaaccgatcgatgagccgttgacgccattcgcacatccggaacctcatcgcggtgcgtgggagcggagtggcgggacccgggcaaaccggccaagacacacgcgggcgtcgacgatcgggtcgcggtcgatgtcgatcgtgacggcgccctcgcaggcgagcgcgaagacccagtcgcggagaccaaagcccagactggcaacggtgcagtcgccgtcgttctcgatggccgcgaagatccgctctcggccatcggcgggaaccaggcgcttacggtaggcccagatcagcctggcgttcgatgacctcggtagtgcctgcacctggtccgacgagagaggcacgatcatcgcccgaagttcgtcggccgcgagcaggaacgttccttcgtcgtcgagatcgcgaagcggaggtccgacgtcgaggatcaaccgagcgttaccgcgcgtcgcaagcaaaagatccagcgggtaggcgacaccgcaaagagtgaccgacgcgacgtgctcgatggccgtcacagcaggatcgagggccaactgaatcaagagatcgaaccggaccgcgtcgccgaccggaatcggggtcgggcttttggcggtcaggaaggggcggaggtcggacggatggccgggaatatcgacgcacatgactgaagaactccttggacgatgaactgcgcgatccgtaccgtcgccctgtcgatctcttcgtcgtcgttcatgttgatcgccgcatttccaatccgatcacagccaaatagctgtgcgcccccgttgagtcaatagatagctagctatctaggagcgcggaaaggtacaatcgtgggcatggaatcagtgcagcgaggagcaggcgatgtgttacgaagctgtgaacagaggcatcaaaatcgtccgtttcggctattcgggaacgggtcttgatggtatgcgtcttttgatagtcagctatccacgattgactttgcggagatcggcgaatgaagcggcccaagatcgatgtgtcggaggcccgagagggggaggagggcaggcggcagattttgctttatttgcccaaggacctcatcaaggctctcaagtcggcggcgatcgaggacggcaagccggcctatattctcgctgagaaggcgatcgacgcttatctcaaaggacgcaaggtgaggtcccgctcggcgaagtgagaggcctctctcgtcggaggaaagggccttccagcggcgccccgcggttcctccgggcctttgcgcgttcatcgggcattgcgtcccgcagcggatgacggtttccgacgacggccggacttgataccgtagatgcgcgagatcgcgcagcacgcacgggatccgcccgcgatttggctaagcccaaagcctcatgacctgagtccgcgcaaatccgtaggtagcgaaccgaggacacgcgcaagggcaacctgtgagtgaacgccgcacttctcaaaacattgcttcaggtgcgtcttaaccgtcgccggcgatatcccgagcaatgccgcggcctcggggccgctcagtccgcttccgatgagtacggcgacgcgggcctcggccggagtcaggccgaaggtgacttggaccgcgtctacagatgcgcgcgatcgcgtgctggggtcgaggatcaagaccaacacacgcgcctgaggaagcatttcccagaacacgaatgcaggaggtggcagcggaacggaaagtaccagaagcggagctgctccggatggacgggtcaggcgcagggggtagccaagctctttgccggcacctagggcaacggccagcgatagcctcaaggcgcggtgcagggcgtttgtttccgtcggcaaggccgcagcgagtcgaaggccaccgttccgctctgccctgaggccgtcgccggagctaatcaaggcttcggccgccggattcgccaaggtgatgcagccgctgccgttgagaaggagagcaggagtgggcagtagctgcagaaccctgcctagctgccgcgtaccatcttcgagatcgcccaaccgcatggtgacgtcgagcgcgcgcccaagatgtgggacgagccgctgaagacgccgcagcgactcgtccatgctatcggcgccgcgcgccgatagcatgaagccgaatcctccaaccccgccgccaaggcgcatcgattgatggctgaattggacggcgtcgacgatacgttgcggagcgagaacatcggtgtaaaacccggtcttgcggatggcgccaagctccgtcaaagagttgacggcgaccgccttgccggagggggcgctcctcatggcctccgaccacagattccattgatagtgcttgtggtaggtttcgagggattccggagacagtcgacccatcacggtgagcggacgaccccgctttggcacctgggtaatgagacctccgatggcgccgaggtgatcggaggttcgcgtcaggacatcgggccagctctcgggattggcgatcgcgccgtagatcacgtcgagcagcgcatcgtcctgcggcttcatgatgtctagctcttcgaaagcccgcaatattcgagcggactaggttaggcggcagacttcattgcagaatccatgatcccccgatcgggggataacagcgacacgatgatcatgccaatctgcgcaactgcaagcaagtgtggcatttggggggccggcatggtcttcagacagcttaaggcgacgatgcgttggtcggcgagcatggcaactttcatctgtggcttggtcgcactcggaccgctgtcgcgcgcacaagagaaggtgaccttcccatctaccgacggcgacctgaagaacgggacgcccaccgcaatcagcggttacctgtacaagccgtctggaccgggcccgtttgccgccgttgtcagcattcatggatgcgatggcgccacgaacgataagggcgaggtccgtccattgtacgggacgtggggtgaggttctctctcagaatggttacgtggtcctgttgatcgattcatttcaaccacgcggccatggcagcctatgcgcgttactgccggtctggtgccgtccggaatgcggttggaattcag

SEQ ID NO: 243 - DNA, 1036 bp, Bradyrhizobium colbertium
cggcagcgtccagtaggtagttcggcagctgcttgcgctgatcgacttcggcgtcttccatcatcatgcgcgcgcagccttgggttcggcatcggtcgcgaccggcttgggacctgcgatggtctcattctcgacaacgtcgatcgagggccgctcgctgctcgcgatcatcttccgtccgtgctcgacggcgatctgcggcatggcaccgttcatgaatgccagcagcgtctgcttgacgatgatgtagggccgacacttcttctcgcgcatcatcttgatcttcaccgcgaagggcgagatgatgccgtaagacaggaagatgccggcaaaggtgccgaccagggcggcaccgataaagccgcccaacagcttcggcgactgatccagcgcgcccattgccttgatgacgcccagcaccgcggcgacgatgccgagcgcaggcaacgcctccgagaccgtcaccaatgcatgataaggtgcgagcttgccctttacgatggtgtggatctcctcgtccatcagcgcttcgatctcgtgcgtgcgcgcattgcccatgatgatgaggcgaacatagtcgcagatgaactgaagcagtgacgggtcgccgagcacgctggggaatgccttgaagatctcggacgaggagggatcgtcgatatgagcctccacctcgttacggcccttgcctcgcagctcgcgcatcagcgcatgcagtgctcccagcagatcgaggtaatagcgctgccccggcaccgcattggtgatggcctgaatgcaggcaaccccgctgtcgacgaccgttttccacggattggcaaggatgaaggtgccgacggcggtgcctatgatgattacgaactcccacggctgcatcagcacggccagatgcccgcccatggcggcaaagccgccgagcagcgccgctaccgtgatgaaaatccccacgaaactgcccaacgcgccgctccatcgccgatcccaccgggaatatctagttggcgacgcttgcgcgaagctggcttcggtatcgcca

SEQ ID NO: 244 - DNA, 30670 bp, Bradyrhizobium colbertium
  misc_feature (23444)..(23453): n is a, c, g, or t
ggatggaatccctattgagtacagaccctagagcggctaggccattgagggttttctgtgcaaggtcgtctcctcgcaatggaagccgctcctgcggatcgttcccgacgacatcgagagcctttcgaaaaccctgaccgagatggtcgatcgcgacgggtgcgatctcgtgctgacgacaggaggaacggaacccgagccgcgcgatcttacgcccgaggccacgcgccctcatcgagcgggagctgcccgggttcggcgaaccgatgcggcagatgagcctgacgcaggtacctacagccatcttgtcgcgtcagctggccggcgcgcgcggcagatgtctgattgtcaatctgccgggacgtccgtcctcgatcgagctctgcctgaatgcggtgtttcccgcaaatccttattgtctggatctgatcggcgctggcgcatcgaggcaagtcccacgttttgcgctgtatttcgtccggagcaggaacggacgtaccctcctgtgtgagccgggtggtcgaaaatttccggccggacgtaatggatcgccttggacacgccacgaggcgatccgcgcaatcaatccgcacctgatctactgctcgatcttgggctacagacagaccggccctgcggccgagcgagcggcttacgccatgatcgtccgtgccgaaagcggcttcgatcggtccatgatgcgctatgcggcgagcgcgatcgcccggccgctggcgcgatcttcgtcgcggacgtgcttggcggcaccttcggctacgccgcgatccagaccgcgcttgtccagcccgcacgaacgggagaggggcagcggattgacgtcgcattgatgcattgcatgctgaacctactggtcttcgagttgcaggaggcgcaattcccgcgctctgtaccgccggcggctcattgggccggtggcgccgtcgacggccatatcctgattgcgccgatcgcgccgcggaactctgccgcgctctgagaggtgacggggcagagcgaactcgctgatgatcccccgcttcaggtcggtgccggcacgcggcgctaactggaccgcgatgatgcagccgtcgagaatggacagagcggcatcccgtccgcgaatgcatggacgctctcgggaaggctggcgtgcccgccgccgaatatcgcgatcccggcgcggccttcaccgatccgcatcttctgcagcgcggcgtgttcgagacgattgctggcggagcaggggagttcatgggcgtaaatgcgccctggaaaatgtcgggcgcggcagccacttcgatgcagcgggaaatccccgcgattagtgctcatcgcaatgaggtgctctcgcgcgttctcgggctttcggttgggggcaatcgccgacctcgcccgggcaggagcatttggactggcggcggactaagtcgacgtcctctccaaacggggaggagacaattaaactactggataattgctttcgcataacatagcgctgacgaaggacttggtgtggatcgtcttcaggcccctcgacctgcccacgatgccaaagcgcgtcagcatcgaactcaagggtaagaacggtcatgttgacctgacgtttgccaacacgaacgcccacatgttccaacctcctgtcaaacatctgatccaaccgggcatgacagtccatcagacgggcgctgcggccgcgatcagggtggcggcgccggagttcgcggtcgccgacggagtttcaggccggacttcctaaagtgaagctcgcgttcgcggctgcagccaggctgatcgagttctaccgtttaaccgccggcggactgctgcaacatgcgaacacggcgactcccgagtgaaatagccggtaggcgcgccgctctcgagccaaggaggctttggcgtcaggttcgattcaggagagcatcggcgccggcctgtgcctgcttttcgagttcgtcgcgcattaggcgatagacgagtggcagcaccaaggggttagcgacgcgccgctggaatagagcatcttgaagttcccgggatcgttttccgcactcggcatcgtcgcatccgctggcccgaacgctttctaggaatttctcggcttcgccctttagggtctcataagtcgcagcagaatccgactgcctgaagtgctcgcggatcgtccagaagatcgcaggcgagatcgtggcggcgacggccgcgaagtcgatcagcttgagatcctccacgaccgacccgacgatcatggcgacgaacgtaatgcaggcgccgacgatcagataggtaccgtacttccttcgcagcgccgcgtcgtactgcaggttcatgcgctggcagacgagacgggccatggtgtgccgcgcggtcgggggaattcccacataccagcctcgtcgctccatcgccgcgcggaggcatcgacgacctccgcgtcttcgcgcttgccggcgacgaacgggtcccaaggcatcttcaggacgccgcagtcgaattcctcgctgatcttcgcggcgaccttcagcagtcgacgttgcgtccggtcgatccacgtcacgtccaaggcggtcgcgatcagaccgtagagcgccacgtagcgccgggccgcctgatgcgcaaatgcgagcatggcaccggcgacgggtacgacgacggtgaggatgatctggagtatctgatagcgggtggcatacgaatagacgcgctgccgggccttcagcagccgctggaactcgggagcgtcctgatcgtgcgcgatctcgttcatgctgcgctcccgctcattcgatgacgacgtagaacggcttgctcacgccgacgaggacatcgtcgctgcgccggacgacgaatgcttcggccatgtggctgccccgatacatcaactgctcccatctgccgcccccttgttcgatatctcgaacccgccccggcctgccttcttggacatcgcctcggcggtgttggtgatgcgccaatcgacggaatattccggcggcacgggggtaccgtctgcaagcgaggcgcggaagtacaggctgccttgacccttaagcaactggcccgcggccaccatccgtccaccctgcacgtggctggcggagcgccactcggccgtcacggcgatttccgccggatgcgcgacgctgcgccaaggcggcgcctggatgtggggcggtcgcgcgaagccggccggaaggatcgacaatccgtagtcgcggaccatgtcaactattcccccgagatgggccgcggtcgagtccaggaagcggccgacgagggaggtgcccgcgctttcgctcatcccgtccgctgcggccttcaccacatctgccttggcgaactccggtccgaacaccttttgccacgccttgatggattcctggcgcccttccatcgcgtgagcctcgtcgatccatttccggtagcgcgcgatgaccgtgcggaagttcgaatattgctcgtcggtgccgaagagcggcgaaaaatcctcgctctggagtttcgggttcgtcactgtcggcctcgtcgggtacatccggagtcgattatcgagacggcccatcagcgtcttgagggtggtcggcacgtcggcgaactcgtcggtgcctttttcaaaccactggatctcgttaccgagcagggtcgtgaggaggacggacgggcaggtgaaggtctccttgatgtcgcgcagatacttcacgaggcgcgtcaccttgcggaaggaattgttccccgaatacgcgttcctctccttcatccactcggtgtattcgaccggcgacgtaagttcgaagcttcccttgcggttgcagacctccagactgccttcccacagccggctgacgacgcagggagcgaggtctaccctgcggtccccggcgtaggtgatcgtgatgcagtagtcccacgtcttcgtcttgtcttcgtaggtcttgctgtcagagaagacgcggccgaggctctccacgtagtcggccgcggtccacccatcgaccggatccaccatgacgagcaggtcggcgtcgaactcgccgccgtcgacgggacggatgatcgtctggtgcgcccaagatccctgctcgacgaagctgcggaccttcggcttccagtcggaatcacggacgaacgacctgagcgccgggatgctggcttccaggagatcgatcctggtcttgttgaggttgaccgtatccttcagggattcgtcaactagcgagaccagcttcatgtcgcgtccgccttggtcggatagtaccgcttgaagtcgtcgtgtccggccagcgcgtccggtcgatacggagccgatcctgccgagcactgcacgaccgacggaagctcgaaccgccggccgaccgtcgagtggaccttggaagcgttgccgatgtcgcgaatcttgacctcccagttctgacggccgagcagatggcgcagccacctccagttaggcaacgagccggccatggcgtcgatggtgtcgcgcatgccggcgatttcgcagtgctgcacgccgccggcgtctgggcggatattcagcgcctggccgacgtcaccggacccttccatcttgattccgtcgacgtagatggggccggtgatcaggccgtcggggaccgagatcgcttcccggcacatccattccagcgcgacatcggaaagcagggactcgggctccggataggagccgccgacgtcggaatgattgccggcgaaaagccactggcgcagccgttcgtgcccggggaagacaggggggccctcgttgccgccgccccagccgacgcggtcgaagtccttccaccgctcgtcgatcgcgttggcggagcgcgcgaacgcgacgtgtcggctgaggagccggtcgaagttggctcccttccactctgccttgtgcgagcgggattctccgggggtggggtagtcgacgatcgtcttggtcgtggacttgttctgccagtaccagaacgcgccgagcgcgccagcgacgatgacgatctgcgcgagaaagccgcagagcatgaagccggcgcccagccacgaacacagcagcgcgatcccgacggccggccggaatccgccgacgaacgccgcggcggcgacgccggcggccagccccgcctggatgacgaagtagcgcaggccgctcgcgccgagggccgccacggtgtcgaagaccccgatgaagtagggtgcgacgttggagtcactgccgtctccggagccgtatttgatctggaagcgccgcgccagttcgaggcgctcggcttcgtagtgctcgcgcggatggccggcgccgtgctctagcacggtgtcgaccgcctccctggcgatgtccttgacctgcttgcggtagcgcatcaacggtccgtccgggcccttggtcggcacgccgcagagcatcaggaggttggccagactgcggaccgtgtaggcgccgcggctgaagccgaacaacatgatccggtcgccgggttcgtagtggttcacgatgaattcgtagcagtcggcaatgttgcgccgtcagtgccgtggtgccgctgtcggtgccgaggcccgcgtcgtaaaacacgacctgccgcgacggatcgatgccggtctcggcgtgatcgcgcgagatgcggtacatcttgtagatgttgctgatccgctgctctggacgggcaccaccgtcctggccgatgccgtcggagaagacgacgatgttcttgggcattgccatacactccggtgagcgcacggtcttggttccgcgacgctttctggtacgattgaccggccggtcgacctcgtttcggcgccgtcacgctaggtatgccgccggggtcggtcgtttcggactctccggcgaaattttcgtccgactgtccgaaaaggcgatccagaccggcatacaggggcagtagccgctaaaacctatgagcgacacggaagccgtgagcggtacccgaccgcaggatccagagcatctcgctgccgaggaggtgctgaaggcgctcgaggttttttccgccgaggacaagttgcgtctcaagctgatcgagcgacggcgccgctccggcaccgatttcggtgagggcgaactctaccacgaagccctctgcctcaccctgatcggcaggcggaagtgcccgatcgacgttcccctgatcgccttcctcgcgaagacgatgcagaacctagcctaccaccgtcgtgcgaagctgaagcgcgagcggaagaacgcgaaatcgaacgcggaggacatccaggatctgcaggtcctcaccgaccagcacaatccggaactgtcgctcatcgaacaggaagataccgacaccgtgaccgcgatctacggatgcctcgacggagacgaggaagcgcagttcgtcgtcatggcgctcgcggacggaaaacgaggaaaggaattgagggatgagatcggcatcgatcaggcggcgtacgactacgccatgcgacggatcaagaaggccgtgaagaagaggttcccagaagggctttcgtcatgaccaggaagaatcgcggacgcaacgaactgcagcgcatttccgacgccttcgacgaggacatcctgaacgcctcgccggcgcaactgcgggagctcttggccgaagaaggcctggaccagaccaagatcgtcgcggaaatggacgccatacttgagcaggcgaagcgttcctttggaagggccaagctcgatcaggccaagaccgcgatagccgcccgcgggtcggagccctcgaacgtttccgcgatcgatagggagtgtgtccgaggcaagctcggagctatacgttccggcgccggcgaaaacatggaaggcatgatgacggcggcccgccaaggaaagaagctctcggcgcgcgacgaagagggcgccctagacgacctggcccaactggaagcgctagagaacgaaggcgacccgggggaatgaccgcaatcactcccgcggaacgcatcttgatcgatctcggcatatcgcaaccgaaggatatcgatctggacgccatcgcgtggaccagaggcgcggtcgtcaactatcgtccgatggacggatgcgaagcgaggatcatcggcacgaagcgcaaggccgtgatctcggtgaacagcctcagcatgcccgagcggaggcggttttccctggcccacgaactgggccactggcatcaccatcgcggccgcattctcttctgcggcaaggacgaagtatgcaactttcgcgacgacgccctcaaccccgagcgccaagccgacgacttcgcctccgatctcatcctgccggacttcatggtcactccgcgcgtgcgcaagatgaagcgacccacattgtcggccattcgcgaactcgccgacgagtttcgcgtcagcgacacggcgacggccgtcaagatcgcgtgcctgaatcggttccccataatcgtgatctgtcacggcaagacgcgtcggcgctggttcaggcgctcgaaaatgattcagaactggtggttttcgtcggatacgctcgaccgcgaaagctatgccggacacatgctgttcaacggcgaggccgagcagaactttcccaggaaaacgcccgcggaagcctggttcagcttcaaaggctgcgaccgttcggaggtcgaggagcagtcattcctgctgccgaacgacgagatcctgacgatcctcaagttacccgatgaagcagtcgcttagaccgcgtccgtgtcaccacacagcatcggccgcttgagtttgctagatcctcgccgaaaacttcgtgaaagcggtcagcgtctgcatcgtcggcgaaatgtcgcgctgatagatctcggcttttaggaacgcgatctcgtcatcgagcgcggtctcgcagacgtcgacgtaccagctcttcggacgaccgtccgcgccgtcggaccagcggtagccaaggcgcttcagcgaatccttcaattcaaacggcgactgctcggcccaaagccggaccgtcttcttccgtgccgtctcaagcaggagtgccagcgccggcgcgcccgtggtcggaagctcgaaggcgagcacttcgagcagcgcgtggcagtcatcgacggtgcggtgcgcgtggtggaagtagccggcaccgttcagcaggtaacccaactgcgcgccggcgaatccgtgcttgcgcccagtcgatctcgctcatgctgcaggcccaggccttgtgctcgaacactggcctgtagcgctcggcgaacttcctgtcgaacgcactgttgtgcgcaatgacgatgaccgcatcgtccgcgaaggccgtgatggccgagtcgtcgaatctttggccggccaccatcgcgtcggtaatgccggttagtgccgtcacttccgccgagatgggagcgctaggctcgttgaacgcggagagcgtgtctcgcaacccgacgatccgcccgtccgtcgtgtagtcgaacttgaccatcccgagctcgatgatctcgtccttggtgtgatcgagaccggtcgtctcggtgtcgagcagaacgcaggtcctgacctcctgtcccatgctggggacctatctcgggcgcgcagccagacgccgcaggatccggtagtccggcgaccgggccagcgcgtcggctatcgccgccagatctgctgtaccctgaaacatctcggttcggaggggttgcggcagtgcgttcatccgccactacaatacccggcgcgcccgcgatgagatactgcaaaaacaggcgatccaagtgcttttcgggaacgttcagcccgctgcgggcaatatccggcggtcacccggatcatccgcggacggcttaagagtgtgtctcctacattcaagcgctcaggaaaagcccagagggcgcgcgccttgtggctccggatcttcctccggctcgtcctcgacgtcgctcttcagattccgcaacatgtcccgacaattgacggcgacgcagtccgatatctgctgatagaccggcgacttcttgagcgcgttcaattcatcgacgacggacggcagcgcatccagcaccgcctgggaaagctccccgacgcggcgcctcacctgagcgccggagatctggttctcctccgccatgcggtcccagtggcgcgcatggatgtagcgaccgcggttcttgccggcgatcttcatggctaaattccgggtcacgtccggatagatgtcgccgttcatcacgtcgtagagcggcgccatggtaacggcgccgccgggtagcagcagcagcgaatagttcttcgagtgcgcgtcgacgtttccgcagaggatgttgaagacgaagaagtcgaggaagcgcgcggcgttggccgcgccgttgtccgttttccggatgacgtcgaagcagtccttcatgctcggcccgcgcagcctcgtcgccgggttggcttcgtatttcgtggatggaatgtggccggtcgcctggcagaaatcctcctgatgcagcctgcgtaggctgcgtccctcaggaacgcggtcgtagcgcctcaccagcagatagtcgaggtcctcggccttgccgatcgtgcactcggcgacgggtagcttcaccttcgccgccaggcgaagacagaaggcctcgttctcgaccgcgctgtggaagtgcttgttggccggtttgaggatgtgcgtcgtcggcgcgccgtcgagcgcgaggccgatgcctccgtccggataccgggcgacgggaagcttgtcctgcgcgccggcgagcgacatgtggatgccttcctcgccgaccagaagcggcttctcgggaaggcggcggatggccgcggccagctcggcttcggaaagccgcctgtagcgtggcgtccgcttcggccgctggtcggcgggccgcaagacttcgagcgcaccggggagatcctctcccaactcctcaagaagcgcgaacacgttggcttccggaatcttgaggatggtaccgaccgtcttcagcgtccgaccttcgggcaacaggttcaagaaccatcggtacaccacgtccggttcgtggacgggcttcgcaagcggcatccgggtcgagacggcgaacgcgttcggatccttcgtccacgcctcgtcgtagacgaactcgatgtcttggatctcctccgagcgccggcgcagcagcccgacgagcagaccgccgtaccggacttcgagggtctctccggcctcgcccggcttcggtttgctcgtcatggtgtcggggagaagttgtcgggatcgaatgcttcggattcctcggccgccggcggtggcgtcggcacgggactcatctccggcgtcagtcggatgccgagcgcctgcagcaggcggaggacgaggccgatctggctggtgtccttgccgttttcgatatcgacgataaagcggacgcctacgttggccgccaaggcaacgtcctgctgccggagccccaaggaggcgcgccggttccggatcagttcgccgagttctgcggtggatgttattgccatgccaattttcccgagcgggaatatagattgggtaatcggaaaatgacaagcttaatttcccgagcgggaatttttgcggttttttgaaggaaccaggacgcgaaatttcccgagcgggaatttctgacagtgctgggaggcaagttaccgcagaatttaccggtcggtaaatcggcaatttcaaggagcacgcctcgccgtggctcctaggcagaataacgatcgagtgctaggagcggagagccgcagcgacccctgaccgcttaggctcagtgaacgcgcccctgcagttgtttaatgatctcccgcagatcgtccgcgtattcctcgaccatccgaagcatctcgtccggactcggcagcgccggtttcggtggcctcctgctaggcagcctctcgttaggtgatttcatcctcaggatcgaccggcggcccgccgggacgattgacctggatcaaagatcccgcgccctcgctcgccataacgctattatgagaccagccaccgtgcctccttcgcgattgcgtcagcagcgttaaggccaacctcaccaaaccgtcagctagtatggtgggcggtcgcggcctttacgagtcgttcgacactctgtcctagcttgttgatcggctaggggtttttggatggacctactctcgcgaacgcgtgacgccttctgagggcgcgtacgagcgcagccacgcggctgcggtcgagcgtatcggtctcgaacacaagaaatacgcgggcaccaccacgcacgcccttcgtcatggaaggttttggagccgcgcctgaacgcgatgccgcccagtcgctggtccgagatccttgccgagctggcggggcccgggagggttctccagcccgagcagaacgccgctgcggtccagatcatgtcccgcccgctggcgtgcctggtcggcggtgcgggcaccggtaagacgttcacctgcaagctgatctgcgacctgtggacccgcttcggcggggacgtgctcctgtgcgccctcgccggcaaggcggcgctgcggctgtcccgttcgaccggccggctggcaaaaaccctgtccaggaccttggctaagctcgccgagcgcgacgacctcgaagccactctcgtcgatgaaaacgcgtctgaggacgaaaagcagaaggccaagctgaagctgggcggcctcagccggatcgccgacagcacgctggtcgtggtcgacgaggcctccaggtcgatctcccgacgttcgaacgcctggtcaaacggctccgccccggctgccggctgctcctggtcggcgacgaggcccaattgccgccgaccggctttggcttggtttttcacaagctcgtcggcgatccctcggtcacctcccgcctgatgcaggtcaagcgggcgccaccggcattcccgcggcggcctccgcgatccggacgggcgggatgccatacttctcgcccttcgatggccctatccacgggatatcgttcgtcgacccctcttcggaaagcctggctggcgccctcgacgacgtcatcggccgcttgggtggtcctgccgacgttctcgtcgtgaccgccatcatcggcggtgcggccggcgtggaagccgtgaacgagcgccagcacaccccgccacatcgccactgatcgcgaggagtttcgcggcttcttcggtcgacgcttctcggtcggcgagccagtgatcttcggccgcaacgactaccgtgccggcatgttcaacggactgcttgggcatctacgcacgcattcatcgacgacgacgagcgcgatgcgcgactgacgtttccgaacgcggatatcaagatcgagcgacggaacgggattccggcgccttcgtcttattgggaagcggtcgatctgcgcaacagcctgggcggaaacgacatctcgaccttcggccgttcgctctagacccgcttcttggacgctacctctcaacgaaccggtccgtggcgtagagcgtgctaccggtctcgtcccgagccgtgaacacgacgtccttctgctcggcgtccgccgccgtcaaggtgacgcgcaaggactccgaggcgtcggcggcgaccttgatgggagcgacaccatcactgcccacgatggagagccttgcgtcgatgccgccgacggagagcgtgtagcgatgagggctcgccgacttgttgagcagcttcacggtgtaggcattgcgcaacgacccgtccgatagccggacagctacgggatcgcgatcgtgctggaccgacaatgtcgcggtggtcctcatcgcgaatgcgaccccgatggttccggccaacgcaaggcaggccgccgtcaagccgactgtcttgggccgcagcagacggttgcgaagggactccttgctgcggccccgctcgatgttcgcccagctttcgtaatcgatcaggcctctcgggcgcctgagcttcgccatcacgccgtcgcaggcatcgacgcataggccgcaattgatgcatgcgaagttcggcccctcccggatgtcgatcccgatcgggcagaccgccacgcactggccgcagtccacgcaatctcctgccgcctcaccccgcaggcgcaactcggcggccttcttcgcggaggtccgctgctcgccgcgatagtcgcgatagttgacggtgtaggcctccggatcccagatcgcaccctgcaggcgcggccaaggacacatgaaggtgcagacctgctcgcgcgcgaaacccgcaagcccgtacgtcgtgcccgtgaacaccgcgatccaggtaagggcgttggcggaaaagttgccggcagccaagtcgcgcagcaggtccggcgcgtcggtgaagtagaagatcagcgtgccgcccgtcgccagcgagatcagaagccacgtcgcgtgctttgcgacgatccggacggctcgtttcggcgtgagcggcactccgatattcttcaggcgctggcgccgatcgccttcggtcaggcgctcgacgagcaggaacagatcggtccagaccgtttgggggcaagcgaagccacaccagaggcggcccgccagtgcattcgtgaggatcaggatggtcgaagcgagcaccaacaggcccgtgacgagatagagatcctgaggccatatctcgacgaagaacgcgtagaggcgcccgttggcgaagtcgagcagcaccgcctggtcgggcgcgttcggcccccgatcccagcggatgaacggcgtgacgtagtagatcgacagcgtcagcagcaggatgccccatttgatccggcggatcggcccctggacggcctgcggcaccacgggcaaaccggccgccgccgcagccttcgcgcgcgccttcgcatgatcgatctcgagagtgaccgccataccgtcagttcaccgcggcgaagcccagcgaggctcgaacggccggttcgatgcggtcgggcgtccagggggctcgaatgtcatcgtcacgtcgacggaaacggcccgtgaaacctcggacgccgccacctgcgcccctcccttcgggaacgaggtcgcgggacatcccggcgtcgtcgccgtcattgtgatgcggactgcgcctccgacaacgtcgatgtcgtagacaaaaccgagatggacgatgttcctcccagttcgggattgatcacgacgcgcagcgcgttgcgaacgcgtgcgatggactgatccgtcatgacggcgccctcactgtcaactcgtaagtggtcccgtcgtggcgaaagccgcgcttttcgagctgcgagaacaggaagacgggctccctcgggaggggcgaggtcgcggttgtcgagctccacgacaggctcgggccaggtggcgaagtgcgggttctctccggcgcgagatccggtgtccgcctttgctccgacaggtgtgaacagcacttcccaatcctctccgtcgaggacgcggtcggagtgggcaaacccttctcggacatgacggcgaagagggggaccggcttgaacggcgcatagaggcgaagcccctgtcccacttccaaaccctcgagcgcggccatgatgagcgagaacggctcgccgccgcgcaggatcgggcggacatcgagatccaggtactgggtcatggcgatctccttctcaggtggtggccgacagcagatgaagcgtgacgttccgtcgcatctcgggaactcaggagttcagttcggcgaatgggccggcgactggcgctcgcgtgggcactgcgcctagaacgtcttcgcgccctccgattgacgcgagccacggtatcccgatgttgagggaaggtcgttgcgccatcgcaaagaatcggcggaccccgagggagcgggcctcgcgcccggagcaaggccgcttcagcgccgatcgatcagcgaaacgatcgaaggccgtctaagctggagaataggatttcgagtgaggtcgtcgcctcagaaagaggtcgtttttgtttgccggtcaactattaatatttccaaacagtagaggcacttgggttaggcaagtgttcatggagagggtcaaatgggcattgcagagggcgccgaccgtaaaggctgaagtcgttagcgatcctccatcatgagcgggcatccggtcgttcgcggtacccgcgtgcatgccgaaaccattctcgcgtatctccgcggtggccacaccgcccaagagattttcgaggattattctagtctacctgtagacggcatcgacgcagtcgttcgctgggccgaggcgacatatggtgcggactggaagtccagcccgtcgccggcagtgcgttgaaggatcgtttcctcatcgatgagttgtctgacctccggcatggtcgcggcggccaagacccggggctctttcacgccgatcatgtcactcatatcgcaaagaagggctggcaggactggaatcttgtcccgttcgccttggagaacgactacatcatcgtaaccaacaaccgccgagcccggcgatggcgtgcagcgggatgccacgcgcgagcaccgcttcgccgttttgcctggcccatccggcaagcgccagcgccaatactgcgccgaacgccaccgtcgcgcatagagacgcgaggccgatcaggaggaacgtgccgggcctgtcgggcgcggccaagccgtcaaaccgagatcgaccacgaccaggccgaagctggcgaccagcagcacggccccgaacagcagaacccatggtgcggaaggcagacggcctccaatgccataaaccccgcaatcagcgaggccacccgccgtcaacaagccgagagccggcaaaacccatcgttcgcggaacactggcctcgcgacgaggacgggacgcactggaactacattggagtaggtgggatggtagcactctcgctgcagcaatctattcaccgcaagccgcaggtgatcgtcgatgccttcttggcgctagagcgtacagcgaagcgcctgccattcgacttgtacgaaactattggcacctggtccctcggtacacgcttgagagacgtctcggagggtggagccgtgctatcgatcttaactgcgaccgcgtccatcgctgcaccggaggtcggacagatgcagcatccgagtacgtaccggtctttcttcaaaattccgcccataaggcgagcgcccacagattacgccttagctggtccgaatgatctgtgatcctgttaagaagtcctaaagcatcaattctaacttgttgtttccccgagttcattaggatgtttatgggggaagccatgaaccacgaactcatgttcgcggcattgaacgccacgaacgaagccattctacgttcgacgagtagctccgaactttaccagcgagtttgtgataccgccgtccacggtggccacatccgaattacagctgtccttatcccaaatgatgccggatcgctagacgtcgtcgctgcaacgagcgagacgggattcatcccgcagattagcatttccgtcgatgaggcttcggtccacggccacggacttgcgggacgggcctatcgatccgggcgtcctgccctcagcaatgacgtggttcaggacgacacgttgaagccgtggcgagagcattcgattgcctgcggcgtcggttcgaccgtggcggtcccgattatccagcgcgcgcgaagcatcggcgtctttctattctgctttgcagcacccgactctatcactagcgaaataagtgcgctcctcgaacgtgtggtcgagaatgtcgcattcgctctggagaggttcgagggggtcgaacggcaaaacagggcggagctcgcgcagcgcgaggccgagaacaaagaagctgcgttgcaccgtatgtacatcgcgctttgcaagacaaacgaagccatgatgcgcgccggctcacgtgaagagctctacgatcttgtttgcgaggcagcggttctgggcgggcattttacctcgacgacaattgccttgacccaacccgacgatcacttcttgaagattgtatccaccaaaggacaaaacgccgatcgggttcgcagcacggcgttttcggtcttggcaggccatcctcagggaaaggggctaaccggcacctcgcttcgctcgaaactaccctgcatcaagaatgacttcttgcgcgatgcaggaacaagccactggcacgagcttgcagaaaaaggggggacacgcgctggtgcaagttttcctctcttcagggatggcgacgccatcggagtcctgctcttcctcgccagcaaggaaggcatcttcacttgcgaaatcgttgaactactggccaggttggcggaaaacgtttccttcgccctccacaatttcgaccgggcagacgcaaacaagatcgccgaagagcgcatccgcttcctggcgacccacgatgctttgacgagcattccgaaccgctcgatgttcaacacgatgatctctgaagcgcatcagcgcgcgagtagggcaccgggtcgccggttcgcggttcttttcgtagaccttgatcggttcaagatggtcaacgactcgctcggtcacactgccggagatcaattgctcatcgaagcatcaaagcgtatgcgcgcaaatatccgggcggaggacgtgttggccaggttggggggcgacgagttcgtggttttggttgaccagttggccggcaaagatcaggtcaccgcgattgcccaacatcttctggaagcattcgagtcacctttcctcctgtgcagacacgaatgccgcatcagctgtagcatcggaatcgccattttcccggatgatgcgtccgatcccgaggagctcgtcaagcaggcggacaccgcaatgtatgcggccaaggcaggtggaaagaatgcataccgcttcttttcgattgaactgcagtcacaatcgctgaagcaccttgttctcgaagctgacctgcgccgagcgattgaacgcgacgagctgtttctgcattatcagccgaaggtaaattccgcgcgtcgcattgtcggtgttgaggcgcttctgcgctggcagcatccgcagaagggcatcatcgcccccgcagcgttcataccgatggcggaggagagcggcctgatcattccgataggcaggtgggtactggaaacagcttgccggcagagtattgtgtggcagtctctgggattgccggcaatccctgtggccgtcaatctctcgccgaagcagttcactgatcatgagctgctggaatttctcgatcgggtcttgcgcgagacaggcttagctcccgagctcctgcaactcgaggtgaccgagagtatggtgatgcaggacgtcacgcatgcgactggcctcatgcaggccatcaatcgtcgcggtgttcgtctggcaattgacgacttcggcacgggctattcgtctctctccttagtgaaaagtttcccgattgacacgataaagatcgaccgttgcttcgttggcggaatcggtgaaagcgctcaagatcgcgctatttccgcagccatcattacgctcggacaggcactcggtctgaccgtagttgccgagggcgtcgagaccgccgaacaagacgccattctaaaggatttcaactgtcatgaatttcaaggcttcctgttcggtcgcccggtttcggccgatgaaatttcgcggttgctaggtggcagcgatagccagcgggtcccatctccctccctcgtctgggcagacgaaagggaagaacgcgttacgcctgcccttccggcgtttgatgatatcacctagtgcatgtcacgctcagtaaggccgtccgtaagcggtgcgatgaggatgagggcatgcgatcaagctgtcgatcaatagtgaagagagtgggactgattgcgcgaatccgccgtagaacaaggggtcccaaatagcacggtcgggattgtgaccgccgccttgtacccgttctgcgattcggggagtcaaccttgggacttcggggcggtcggagacgtctcgaacgggctggggcggcgccgatgtgggcgggcggggtcccgcccgcaaaacagcgcttcttaagcttcgccgttcatagttcctgtgatcgcaggatcaatcgatgataggatcacgggatcgcaggacgggctcaaggggccttggacgaggagcggacggggtggcgacacgggagagccttctcggaacggggatagcttggccgagttggccgacctcgtccgagtcatgaacagctactactcgaatctgctcgagggtcacaacaccagacctcgcgatatcgaacgcgcgcttgccggacagaagatcgaacaggacaagcggccgctcgccctggaggccaaggcccacgtcgatgttcagcgagcgatcgacatcgcgcaccgaaccggcaagctgcccgtgccggtgtccgcgaagttcatctcctgggtgcacaagtgcttctacggcgaaatgccggaggattccggttcgtcgaagagaaggacggcgccaggattccgaccgttccgggaaagtttcgctccgacccgcatgaggacgtcaacgtcggttggcaccggccgccgtcttcggctgtcgtgcaaagtttcatggactatttcgagaagctttttcgccagccgaggcgcgcgccggctcccgcatcatagcgatccccactgcacatcaccggttcaactacatccatccattcatcgacggaaatggtcgagtcagtcgtctgatgtcgcatgccatggtgctgcgcgccggcatcggcggcggcggactctggtccatctcgcgcgggctggcacgcggactcgccggccgccatgagtacaagatggcaatgaacgccgccgacagccccaggcgaggcgacctggacggacggggaaacctctcgcaggcggctctgatcgagttttcggaatggttcatgaaggtcatgctggaccagatacgcttcagcaaggcggtgttcaggctcgacggcatcgaggaacgttacaaggatctgctggtgcacctcggactggaatcgcgcgccgtcgatctcgtcgctgcggcgttcaggatggggcaattggagcgcggcgaagcggcttccgtactgcgcgttccggagcggacggcgcgcacgacggtctccaagctcacgcagataggattcttgaaatccaagactccgaaaggtgcgctccggacataggcgcagccttcaagcggctttcccaaataacgtctctatcagcgggcattctggtagcgttccgtcggcgcattgtgcgaccacgcccttcaacacccgctccatccgtttcagatcggcgatcttcgcccgcacgtcatcgaggtgggcggcggcgacggcgcgtgcctcggagcaaggctggtcgcgttcgtcgacgaggtgcagcaactcgcgaatctcatcgagggaaaagccgagctcacgcgctcgaagcacgaagcgaaggcgacgctcgtgcgtggcgtcgtagctgcgatagccagtcgacgtgcgcggcggctcgggcagaaggccgaccctctcgtagtagcgcacggtctccaggttgcagcctgtccgccgggcgagttcagcccgctgcaggcccttcaccacagcgtgatcgcgcacctcaaaaattccttgaccctgtagtgactacagaccgcatcttatgtcgcaatgtggatttcggcaaggaactggagacatcggacatggttgcaccgcgatctggaacggcagatacagcgcccgccgcggcagctcctgcattctcgaagcggaccgaggttggacaccagcggctggttgctctgggcggcattctcggtgcgatagctgcctcgtcctgctgcgtcattccgctcatcctgttcagcctcggcattggcggcgcctggatcggcaacctgacggcgctcgcgccgtacaagccgctcttcgtcgccggaacggcggccgtgctcgggtacggcttctatctcgtctactggaagccgcggcgcgcttgtgccgatggcgccgcctgcgcgcgcgccatccccagccggctcgtccagctcgcgctgtggatcgcgaccgtgctcgtgattgccgcctttgccttcgactatgtcgtcccgctgctgcttcgcgcttgataccaagaggagaccaacccatgaagaagagcttgagcgtccttgccctgatcgcctcgatgatacctgcatcgaccgcgttggccgccgaacggacggtgacgttcgcagtcgacaacatgacctgcgcttcgtgtccttacatcgtgaagacctcaatggcggcggttcccggcgtcaagaaggtcgccgtctcgttccaagccaaaactgcgaccgtgacattcgacgacgcgaagacgagcgccgacgtcattgcctccgccagcgtgaacgcgggctatccagcccatctaaggcagcagggcagttaagatgagtgatcgcactgccatcagcgcaggcatggccagcgccgtcctcgccgcgatctgctgcgccgcgccgctccttgccgtcggtcagccgtacgcgggccttggcgcgtgggtagccggtcagggcctggtagtgcttccgctgatgattgcaggcttcggcctcatcgcttggaaattccatcgtcgccacgcagagtccgctcgctgcgaggtgatgattcacaagggaggtgtgaagccatgaacgattgctgtgcctcctcctcaccccgaaacgaagctgtcatcccaacgcccgagatactgccgagctatgccgtacggccgggcgtaacgttcccggactggtcagcggtcacgtcgcacgtaacgagggacgccttgttggccatggtcgggtcaggccacgttctcaatcgctggagcggctacgatcccgccacggatcgcgcgcgcgttgcgctgcttcaactctacctcgaacacggacgagccccggccgcggacgagatcgctaaccgtgcaggtctcgatgagacggccgtcccgctgttgctcgacaagctccgccggcgcgacctggtcgttctcgacggggagcggatcgtcggcgcttatccgtcactgaccaggacgggggccatcaggtcacactggaggggcgcgttctcaacgctatgtgcgcagtcgacgcgcttggcatcggggaccgatcgcgacatctcgatcgcctcgcgctgccgccattgcggcgcgccaatccgcatcaccacacgggaccgagggcaggtgctggccgatgtcgagccgcggacggccgtcatgtggcaaagcgttcgctatgaaggcgcatgtgccgcgagctcgctgcccgacgacgctgttttttgctcggatgatcatctctctgcttggcgtcgcgagcgttccgccgacgagccaggttttcggctgccgatcgaggacgggctggaggctggccgcgctctgttcgggctgagcctcgccgggctcggtgtgacacaacgaccgttcgccgatccggaaacgaagagcccggtagtcgcgaaccgccccttccgcagaagcggtcacaatggaggcgcttacgatctcgtcgtgatcggcgccggctcggcgggtttctcggccgcgatcacggccgccgatcagggcgcccaggtggctctcatcggcagcggcaccatcggtggcacctgcgtcaatatcggctgcgtgccgtcgaagagcctgatccgcgctgccgagacacttcacaacgctcgcgtggcggcccggtttgccggcataactgctgaagccgaactgacggactggcgcagaaccgttcgtcagaaggacgctctcgtttccgaactgcgccaggccaagtacgtcgatctgctccccgcgcacaacggcatcgcctatcgcgacgggccagctcgcctcatcgattgcggagtcgaagttgacggcgcgcgtattgccactggtaagatcattgtcgcaaccggcgcgcggccggcagtgcccgccattcccggcatcgagaccttgccgtatctcactagcacgacggcgctcgacctcgaggagctgccgcgctcgctgctcgtgattggcggcggctacaccggcgcggagctcgctcagatgttcgctcgcgccggcgtcaaggtgacgcttgtctgccgatcccgtctgctcccggaggcagagccggagatcggcgcggcgctcacaggatatttcgaggacgaaggcatcaccgttgtctccggcatcgcttaccgcgcgatccgcaaaactgacggcggtgtgtcactgacggccacgcgcgatggccaggatattgcgatcgacgccgatcaggtgctgatcaccacggggcgcgcgcccaacatcgaaggccttgggctggctgagcacgggatcaccgtctcggcgaagggcggcatcgtggtcgacgaccgaatgcgcacgaccagggctggcgtctatgctgccggcgatgtcaccggccgcgaccagttcgtctacatggccgcctatnnnnnnnnnnagctcgcggcgaagaacgccctcaatggcgacagcttgcgctacgacaatagcgccatgcccgccatcgtgttcaccgatccacaggtggcgagcgtcgggcttaccgaggcggccgcgcgcgcggccggtcataccgttggtgtctcgacgatcggccttgcccaggtgccacgcgcgctcgccgcgcgtgacactcgcgggctggtcaagctcgtggccgacgccggcagcggccgtctactcggcgcgcatatcctcgcgcccgaaggcgcagacagcattcagaccgcgacgctcgcaatccgccaggggctaaccgtcgatgacgtcgcggatgccatttttccgtatctcaccactgtcgagggtctgaagctcgctgcgctggcgttcagcaaggatgtcgccaagttgtcgtgctgcgccggctgagtacggccttgatgcgaccatcgttgcgaagggcgactaaaaaggtcgtaattgccaaaggtcgcgcgcgaagcgctaaaggaatggccgcaggagaactgcctgcggcccgccgacaagagtttgaaccgatgttgaaatgcgcgtaaccccggtgctgtagaaatagaagcacgcgcagagtgcattttgaattccgtagttttacgtgccgtcgcgctccctgggcggcgcttctcaatcgctccttaagcaatcgagcaatttgcctaaagtcgccgcgcttcatttagcgaaatcgaagccggaagtggcgatcgtcgagaggcgcgaggtttttcacctcattgatttggcgcccaccgcagcaaaagacgttgtcgacaggaagccctagagcgctgcgatgcaatcggattcgagaatctatagccctccgcgctggggagtgacgcgatggctcgccgactgcggtccggacgtgctcgaggacattcgggtagcgctgatcggcaatctctacggcacgttgccggtctttatcggcggcatcctgaataccttgttggtggctggggccatagcggcgcgctccccgacgccattgttcgtcgcgtggctcgtgatcgagatcgtgatctgtctcactcggctcgccgtattgatcgtcgcgcgtcgccgcgcgctgaggcatcgccctacgccgaccgatgtcaacttgctcctttcgaatgcctcgagcgccagcgtcggctacggggcgctgatcagcctggcgatcggcgactgggtggcggcaacgctggcctgcgtatcggccggagctatggtcggcggatctgcttccgcaacttcagtgcgccgcggctctgcggagcgatgatcgtgctgagcctcggcccgacgattccgggtgcgctgatcgcagcgcagccactgatgctcgtcctgttcttcccaatcccgatgtatctggcggcaccatggtctgcttcaagttgaaccggatgctgatcgcgaccatgcgcgccgagcgggagaacgaccacgacgagctcaccgggctcgctaatcgggccggactcgtatgcgtggccttctgcgcgaaggcgacctgccggcgcggctcggcggcgacgagtttgtcgtgctcgccgtaggctgcacggccgaagaagcgacggcgttcgggcaccgcctaatcgagactatcggcgcgccttacgacctcggctctggaacattggctcgcgtcggcgtgagtgtcggcatcgcgatggcgcccgagcacggaagcgaggcggccgacctgctgcgcgccgccgatgccgcgctctatcaggccaagttcgacggcgggtcgcggtgtcaggccgcgtccggagacgacctagcgaggctccgctgcctcgtttcgcgcagcgcagccgaacctgctctccaaagcgccgcggcgtagctgatctgtgatcacgccgtcgtccgaaaggacgaaggggagcgccacgtaatgagtgacttcatacatctgcctcatcctcacgatcccgcgccgtgctcgccggcgcgggagatcagcgggactttcaccgcttcttcgagagtggcggcggttgcaccctggacgatgatcctgtcgaggtcgcctgcgatagcgtctgaaggcggtcattcagcgtgttcggcagccgaccgaaccgggcgtgcagcaccatcatgatgttctagatggtgcactccttgcgcacgtgctcgaccattcctctcagcaacgggttctcgtccaaatcgaccgtgatcagcttccttacgcgccccccactgaatatggttgtactaattcttgctgtcgcgagccgtccgcgcgcatagtccgttgataccttcgcccgcagctcgtcgaactcgtgctcgagaaactggtgcgcgacgagcattgcctgcaccgcctctcggccatcaccgccgcaggcttcgatcgcctagtcggcggcgaactcgacgtcgtcctcggctggcgtggcggggtcggacgcaacgggcatgccaagtgttcctcgtctattcgcacggagtcaagcgtccgcagatccgccaagcccaggtgctgtcgatcgaattcgccagtggctcgtcaccaacgatgatctcgaagagatcgcgctggaatcgacacgcccatcgtgatcgacgagttcgtcgacaaggccgacagattaccggcatcgccttgggagggatgcgctcgttggtcggagtcgaggtcaggaagccgaagatactgcccagctcgtcgacctacgagcgagctgcaggcggaccatgcgccgagacccgacctcagcattccggccgaacctcggtcgccttgtcgcggttgccgcggatggagccgcggcggatcggcgacagccccgcacggtcgagatacttttcgagggtcttcctatcgtagggaaactcgaattcctcctggaggtagctcagcagctcgcgcttctgcggcggacgctcgaacttggcgaattcgcggtcgacgaggtcgcgccacttctcggtcatcacctccttcttcggcgatctctcgcccgcttcgttgaggaatttgttgagcgtggtgtagccgtatgggaatttccgcttcttgagctgcttgaagaaggcatgccggctcttgatcggcgacatcttctcgtagagctccatcgtcttgcggcgccattcgggcgtgagccttccgcgctttcggtcgatgaggccttcgcggcctttccggcggtagcgcttgaaccacatgtagacctggtggcgatccaggccgaagtaccgaccgatggcaacctgggtgacgactccttcgtcaaacagcttgacggcttcgggcaggtgctggcgccggagcaattggcgatcggagtgttggagccggcggggctccttgcaggcgcggatgtcggccgccaggttcgagagccgctgctccgcctcgaagaagccgatcgaattgaggtcgcgtagcggatgatactgctccaggcaattcctcaggcgttgggtcgtcgggggtaccgtgaagccggcgtcggcaaggctgcggcctgtcaaaagaagggccgcgccgtcgtccacgggatcgtgatacacggcgttgacgaaggtggcggcggaagcctccatgaagttgtcgcagatgcccttgcgcctggcggcgcggttcaggctcagcttgacagtgctgcgatttaggcgcgcgctcttcggggtgacgaagagatagcgcgaagacttgaacttctccggtgtggcttcgatgtagcgaatcaccaccagccgggccgcctcgatcaacgggatgtcgcggttacgcgcttcgaaggtgtcgcgtacgcacacgatggcttgcccgtcgggcatgaacctatcgcggtggaggaaggagatctcttcgggagacaaaagacagcacgagcggagcgcggccatggcggcgcgtccgcactgaagccagtattccctggtgtggcaagtgtcgtaggtctgcgggtcgagcatgacccgcaggttcgaaacggagaggatgcacgcggtcccgctcacgccgccctcccgacatcattgtctcgcgcgcgctgaacacgctgcaggaccttcaccttccgcggctgcggcttcatcgggatatggtcgttgtagaggggatagtcctccggatccttctccttggtgaggttacggagccgcgcgcggcgcgcggggtcgtcccacacctcgatggcgttgtcctcggaggcgggggcgaagtgctgatagacccaccgagggtgtccaccgtcatgcccatcagcttggccgttgagtggatgtcgacgccgatgatggccgaccaggtcgcgagcgtgtgacggaaggtatggatcaggatctcgtggtcgagcccagctgcctcgacgagcttcacgaactgctcgtggatgctcttgtagggctcgccgtcgcgcttgcggatgatgtggcggtggccttccttgtcatcagccttcttccagcggtgggcatgctgcagcagccgctttagcattttggagctgggatgcatgttcttggtgttctgcggctgggcgtagcccgtccggtgcaccatgccggtctccacgtcgatgctgccgtgcttgggatggcgcttccaggtcgaacggaacatgttctcgctgcgccagccggtgtagatctcgacccggaacgcgcgtcccattccgttcgagtggtccttggtgaccttgtcgatgaagtttaccacccggccgtcggccttcacccagtcgcccttctccttgtcccagacccggccctcggtggcgacggtcttgacccaggtgccggtctcgcggttccagacgcggccgcgggtcacccagagcagccgcgcggcttcgctgcgcagcaggtacgcggtgcgccggaccttgtcggacgggatgtcgacgttgggatggaaaccgaggttgttgttctcgtcgtactcgcggacagcccgctgcagatattcgaggtccttcttgatcgtcgtgtagctcaggccccggcggccgcgctccgcggcttccgtcgagatcgcgatgcaggccttgaagtagccggcgcaggccttcttcgacatctgtccgtaggtgaggcggccgaaatagagcccgatccgcagatagacgcgcgccttcgccttccactcgttgtgcgccttcgccgaggcgatcaccggcgggcgcggccccaaatcgtcgaggagggccgcgccgatcagcacctccttgaccggaatggtgtggaggcggcggcggtagtcctccagcgcgtccgaggtcaggcggttagccgcatcctccaggacccactgccagttccgcgcgagctcggtctggttggccggcagcccgtcggctgccgtcagcttgtcggcggcggtctccgcgcgcgcggccgccagcgcgcgtttgccggccttgtccagcgtccgcaggccggtccggttgattacgacctcgacgatgtcgtgggcgtcgtcgtgggaaactccgttcgtaagagtcatgggtctgtctttcattgacttgaagtcaatgataggtgcaactcagaacccaattcaagtgtcttcaagtcgatgatagcgacaaaggttaccgcaggctttctccgatcgctaagatcgcgagctccgaaaactgccggatctcgacataatccacgttggcgagccggtcctcgcccgggaacgcctcctcgcccaacgtcgcccgttcaccgaacagcatctcggattgccattgcagattcatccgcagatggatcgaagcggcgcgccagggtgcgtagatcttgacctggagacggctgttcggcacctccgcgggcaccgggatgtgcggctcgggcggcttggcgaagtcgccccggtcgggcctggggaagagcattccggcgcaggcgcgctcgatgatcgtggagagcaccaccccgagggtgtcgacgggcgtgatcttcttggtgaacatcctggcgaagtagcgcggcgtcagccctggccgcttgccgggcggaaaaccgaggacgtcgaagcggtgggggtcggtcggcagcaggggaagattccagtagtcctgtatcgtggtcggcgagtccttcagcatcgtgcccatcgacatcgcgaggagcagcatcgcggcgtcgcgggccgtcatgtgcttgccgccccggccgcggcccgtcacctcgatgaggccggcctcgtggaggcggcggagcgccacgcgcaccgtctcctcgggcttcttgaccaccttcgcgaccgccgcgaccagttggggggatttcgccatgttccttctccgtcctcaaaaccatagaattatccgctgcaagcgtaaaggacctactttcaaacgggtccggataactatattgggcgcgatctacttcaatccggcgccttgcggcccgatttggcgattgtggtcaaatgcggcgacgatctcagaaaatcgttttgtggcagtaggttaggctgcaatgccggcttagtaccggcgtcttatcaggcgtcgaatatttgcgattttgcttcgattaatacttccgcggccaagtattcatgcgttccgaatactttggacggctccggcgcgatccgctgcgatccgccaattgtggcggcgcggcccgccttttgacagtatttaggtgtgcgtggccgctcggcgcagctcggtgaaacactctcccctggttcgccggcgcgcggaaggatcggccggagcgggaccgccctcccgacggccccgaaaaccggccggcgacggacgggtttttccggaaccggccccccccttcctttcaaggattcgaatgcatgcacccggccgttgtgggccggcttttcctgtcgaagggatttttcccaaggattcgaatgtcggagaaagggcggtgggcgggccggcggcgaggcggacttccggtcaggccgatcccggagctgcggcggggcagccgcccgacgggcctcccgcccggaccacctcgatgggcggtcagcgctcgacgcgatctcttcgcggcggccgggatcccgggcgtcgtcggtgtcctcgggaggccgtcggcgagggcggctggccaaattggaatgcggcgccacgtgctgaccgctcgccgggaccgaccgcagccggccgagctcgtcggggcggtccggaccggcttgggccgcagatcaccggcgccggcgcg

SEQ ID NO: 245 - DNA, 17878 bp, Bradyrhizobium colbertium
cggagatgtgtataagagacagctgggtgcacggaggaacctgatgccggcgaggcgttggtcagcgtcatgtctgcgccgggcccaccggagtgctgggccatgacgcacgactctcgcaaccctggaccgtcgctcaggctcgtcggaaaggacgacagcggcccgcacccaacaggctcggtcgccagggatgtcgactggtccatcctgatggcccgtgcccaggaaggggatcgagccgcctatcaccggctgctgcaggaaatcacgccgtatttgcgttctcttgcggcgcggcggcaccatgaccccagcgatgtcgaggattcggttcaggacgttcttttgaccgtccattcgatccggcagacctacgatccagcccggcccttcgcgccgtggctggtcgcaatcgccaaccggcgtttcattgatcggctgcgccgtcagggccgcagcagagaaatacctttgaccgccgagcatgaaaccttttgcgagcctgcagcgaacttcgaagagagaccggacgagcgagcgctcgagggcatggtcgatcacctccctcctgcccagcagaatgcgctccggttgctcaagctcaaggagttgtcattaaaggaggcggcagcattgagcggcatgtccgtcacgtccctcaaggtgaacgcccatcgcgcgctgaagagcctgcggagaaagctgctcgatcggagcgaaccgtgatcaagacacccgatctcattgcttccctagcggcaaatgccacgccggtgcggcggttgcgaccgccggtcatgcgggcggcatgatggctcctgcttgcagcggtcgtcctgacgctgctggccgtcaaccaggggattcgccccgacctggtccagcggctgcaggagccagcctttgtcgtcggcatggcggccgcggctctgacaggcgtactcgccgccatcgcggccttcctggtcagcctccccgaccggtcacggctctggctcctgctgccgatccccgcgctgatcctgtggctttcgaacgtcggctatcagtgcctaacgcaatgggttgcgatcggacctgacggcataagccttggcgaagccgcgcgttgcttcgccacgctcgtgctcaccagcctgcccttatcgctcgcgatgctggtgatgctgcgctacgccgcgccgctccgccccaccgccgtcgccttcatgggcagcctggccgtcgccgcgatcacggcgacggcgctgtcgctattccacgtcatcgatgcgaccgtgatgatcctgttgtggaacttcggcacggcggtgctgtttgttgggctcgcgggcgtgttcggccggaaaatgttccgatgggtggcgccgcgaacgctttatgcaaaggactaagctcattggcgccgcaatcgcgcgagctccgcgagctgcagcccttcgccgagtaaatagtcacgcaagaacccaagcgggctcacaagccgcaaggctctgccctcgcggccttgaacaccttgaaaaggatgaccaacatgacaagtcccgtgccactgtttccacggcagcctgtaccgccgctccacgtcgagattgcctccgccggctcctttgaccttgcaggcgagaagccggcgcagttcacgcttgtcgtgttctaccgcggcttgcattgcccaatttgcaagacccagctgcgggaactggaatcaaagcttgacgagttcgacaggcgccgggtcgccgtggcggcgatctcatccgacacgaaagaacgggcattgcagaccagagaaacctggggattgacgcggctgcgcatcgggtacggcctcgacctcgctcttgcgcgccgctggggattgttcatttcgtccgggcgcggaatgacgtccaccggtgtcgaagagcccgcgcgcttctctgaaccggcgctttatttgatacggccggatggcacgctctacttcggcagtgtccagaccatgccattcgcgcgcccgcatttctccgatattctggcggccatcgactatgtcctcaagaacaactacccggcccgcggtgaagccacggacgtgtagagaagctgatttcacgccgacccggcagggcggcctcgtgagatcgcgcctcggcgcgaggccctcctagacggagaaggccatgagaattgctttcgcttggttcttgccgacggtggccctccagttggctgcgggaccgattcctgctgctgcccacacgatcaccgagttcgttctagctactgccgccagccgtccctccgcaattacgagaggaccggacggtgcgctgtggttcaccgaggcggcgggccggatcgggcgaattaccaccgatggcgagctcaccgagtttccgatcaaggggggcggcgtcgtgaatgccattacaacgggaccagacggcgcgctgtggttcactaactttacctcgaagaagatcgggcgcattccggcgacggccacggctgaaaatctgctggtcgtcgaattcgcggtccccgggccggctggaccgcttggcatcacgagcgggaaagacggcgccttgtggttcaccgatggagctggcggcaagatcggacggatcacgacgaccggcgaggtcaccgaattcgccgtcatcccgatgaaggctcgcgcgatcacggccggaccagacggcgcactgtggttcacggatgctcgtgacaaaatcgggcggatgacgacggaaggcacggtcaccgagttcacgatcccgacggagaacagtggccccgaaggcataacgagggggccagatggcgcggtgtggttcaccgaatccctcagcggcaagatcggacgaattaccaccgacggcaaaatcaccgaattcgcgcttcccgatcccaatgcgcagccgttcgggatcacaacgggaccggacggcgccttgtggtttactgaggccagttgcgttcgcaagcgaggttcgcgctgtgtgatcggcaacaagatcggccggatcacgacgaccggcctggtcagcgaatttgcggtcccctcggacggtagcggaccccacagcatcacggctggaccagacggcgctctatggttcacagagtactacgggagcagagtcggacgcctggtgcttccctgatcgtcacaacggcgtgcaatgtcgtgaactctcgctgcgagcccgtttgcggtctgcggcgggctcagccactagagctgagctgtactgcgcctacccggccgcgggtcgtgcgccgcagcaatgcgcctgcaagaaagccgcacgtgccaatagcccacatgcattgagacgaaggtccgggcgtgtttgccttgaccgagagcgagattcgctggaaaaatgctcagatgagcgaacgtttcgatcgaccctagtacggcgatgatgagaccgggccaaaacgcaagacgaaagctcgtggatcctgcagacggaatcccagacagcaggatacgggcgccagccccatcaccatggtgccgctgatcgtagtcgccgcgatgatcgcggatcccactctgtcgtcagcgtaaacaatcagcagcggcagattcccaacgatcgcgacagccatgatcgcgatacggccccgcgtcaggttacaatggccggatttcaaaaccttgggtcgtagtccaggcggtcagcttcgccacactcgtgaacgttgatcgattatcgaaccgcccaacatgcgaggcaacttgagctagtcactccatctttttgcttgcgactgtagctgcgctaccgcagccagcgacgcgaaccagcagattctcaccctcgcttgcgcaacaggcggcacatgctgccagtcgcgagggcatcttgaggtagccactaactctgcggctcttcctcccgctcccgaccgcagcgttctgccaccaaaggaaatggctgagcgggcggaatagtcgcacccttccggtgttgatccttatgctccgacaacgacctcggcgggatcgtccaatgaatgccttccgccgcaacctcgaacctcttatcccggcagtcggccgctactctccagcgctgactcgcacggtgagatcgcaaatggtttcgttctggacagccttgagttggcggcgcgctccggacgactgtttgtcggggccaattcccagaggtgcgctgccgacgttcaacggaatcggggaccacgatgatgactgagcgcaacatccctgtcacggaagacgaactgcatgcctatgtagacaatgaactatctgcaaaacgccgcgaggcggtgcgtgcatggctcgcttcgcatccctgtgatgccgagcgtgtttgcgcatggcgtgcgttaggcgccgagttgcatcggcgctatggcggcgttgcaagcgagcccgtgccacatcggctcgctctggaccatctggtggagcctcgcctgcacagtcgtatcggcccggtcgcggctgcactgctggcgttcattatcggcaccagcgcaggatgggcaattcatcaggcgtgtgcggtcgaggtaagctctatcgagggactcccgctgtcggcaatgagaacgtgatgcgtctgagcggtcgtcgctctgtgcgacgagcagcgaagcgtgcacgtcagcacccccgagtttctcacgcactcggaccttgcgattcgccaactgctttccgccacgccttagcctagactgtgcgacggcggcgatatgagacctgatatgctcaatacgccgcttagctctcgtattcgatcgcaccggtgtggcggtcgaccttcagtctttgcacaagcgagttgtcgagggtgacgatgtcagcggtgatgttggcgtcgtcgcttttgacgtctccgattttgaggcgcttgttgtcgaggcgattgagctgcatgtcgaggtagccgcgcacgtcatcgatcgacaagttcatgacgggcgtgacgcgggagccgaatagtgcgcccataccagatctcgctccgcctcctcccatcatgtctcggtccatcatcatgccaccggcgctcgagcccatcatgccaccacccatcattccgccgcccatgcgctgatccatcataccggaacccatgttgcccatgcggtcacgcatcatactcatgcactgtgcgtggtccgacgccccgtgcatcatgccccgttccatactgctctccatgccctgagcgtgcactgtgcccgctgcggtcatggccagcgtgagcccagccgcggctgcgaaaagaatgctgatcctgcgcatttgtttgtcctcctgtcggttccactcggaaccacttggcttcaagcctcggttcaactcctaacccagtgatagagatcgggcgatatcgccacttccttcagagcctcgtatatattctcgccgacgcgcgctcgtctgcgcagcggatgggctgggccactccacatgtcaggcagctttctggcttccctcctcgggacctctcgcaacgggagcgcggaccctgttgccccactcggtccacgaaccgtcgtagttcttcacgtcgtcgtagcccagcaggtacttcagcgcgaaccaagtgtggctggagcgttcgccgatgcggcagtacgcgatcgtgggcctgcccacacttactccctttccttcatatagtgctgcgagttcgtccggcgacttgaaggtaccgtcatcgttgcaagccattccccacggaatgcttttcgcacccgggatgtgcccgccgcgttgacaggtctcgggcaaaccgggcggtgataggatcttgcctgtgaactcgtcagtgcttcgcacatcgacaagcgtgtgactattgttctcgaaggcctgttgaacctcgggcagaagcgctctgagcgagttgttgggttctgtggcacgatagcttgccctcgcaactgtaggcgcctgcatcgtgatttcgcgtccttcggccaaccatttcttgcgtccgccgttcatcagccgcacgtcctgatggccatagatcttcatctgccagagtgcccacgcggcaaaccagttattgttgtcaccgtagaggatcaccgatgtgtcgttgccgataccggaatcggccatgagcgtctcgaaggcatcctttggtatgatgtcgcgctccaacgtgtcacacagttgcgtcgtccaattccaggctaaggcgtcttttatgtgcccttgatcataggctgcggtgtccacatccacctcgaccaggcggacgccgggatcggtgccgtgttccgcgacccacgcagtttcgacgagcatttccggatgtgcatattgagccatgagtattctcctgttgtgcttgcattggcatcacggcgatagccgcgcctccaccgcaggccgcgccatcaccttgacgtgtccccctgccccaaaagctatgcacctgtctgatctcctcgatatgttgctcagccaacttttcatccgattgtcgacagcgctggaaaggcctccagcagccagatggaaaagtttgacaaatatccagtgatcatggcgacgcccatgacgatcatcacgccgcccgcaaacagctgaagaatgtaaccaattcggccgattgacctgagccgtgccaagaggccgtcggtaaaggcggctgcaagcaaaaacggcactcccagcccaaatgaataaatggcgaggaaggcgatgcccttgccgatcgtggccgacgcagcgctgaccgtgaggatcgttccaagcatcggaccgatgcacggcgtccaaccgaaggcaaacgctgcgcccaggacataggtggcaagcggccgcccgcgaggaaggctcacatcgatccggaggtctcgttgcagccaagaagggcgcacaagtccgactgtgaatagtccaaacgcaatgacgattgcgccgccagccaggttcagctcatagcgataggaattgagcgcctggccaagagcagtagcactcgcgccgagaatgacgaagacggtcgcaaaccccagaacgaaaaaggcactgagagtaatagcttgagcgcgcgcgaccaacgagttgggttttgattgtgagacggattgacccgcaatataggatacatagccgggaacgagcggcagtacgcatggagacaggaacgaaacgagtcctgcggcaaatgcggcggcgattgcgttggccgttaattctgtcatagctgaactcttgcaagattccggctattgtcgatgatctcgcacctcgcgaatccatgtctgcagcgtgttgaggtccgttgcgccgcgaagaatctgagtgccaattacaaatcctggcgtcccgttgatacgcagcgcttgggcaagtccgagatttttctcaatggaggcccggatcttcgggtcatccatgtcggccttgagacggcccaagtccaagccgaccgaggcagccacgtccagggtcttgccttgatcaaccgtgccgcgcacctgatagagggcacggtgaaaggcaacgtacttgccctgcctatcggccgcgagtgcagccttggctgcaaaggtcgagtttggcccaagaatggggaactccttgtagacgatcctcagctgaggatcgttctcctcagccttcgtgaccactggcgccacttggcggcagtagggacagttgtagtcgaagaactcgacaacggtgacatcgccattgggattgccgccaaccggactgtcgggatcgcggaacacttcatccgctcgagcctgcagaactttctgggcctccgtctgctccgctgcccgagcccgcgcttccagttgattcaccgactgcactatgatctcagggtgcgccatgacatagtcatgcacccgccgatcaaattcgtcctgcagcatctccgctccgttgccgaagagagacgatcttagcgatcggaagccgggatcgaatgcaaaccaggcgccgaagacaccgaggacgaggagcaccagcagcatccgtccggtggtgcgggagattcgaggtttgctatccatgtccatacccccgcgtctcaagggtgaccatttgagcggtcttccggcgatgtgaatgaggcgcgcgcgctcacatccgccttaaccttctgaaggtatccaatgatatcccgccgggcgctggcatccggcacgcgaacaggcattctagcgccggcaatgaacttgcggggatcggcgagccagcgatcgaggttggctgcggaccatgtcagccctgcgccagcaagggcgggcgagtacttgtatccggttgccgctccggcctttcgatcaagaacgccgccgagcatcggacctgccttgttgctgtcgatcgcatgacaggcggcacatcgctcgccgaagagtcgttgccctcgaaccgggtcgggttcggcggcgacggcaaaccgggagaggtctttggcgctatcgggatttacagagcgaaagaacgtgtaggagagcgtgatcgtgtcgatgttgcgcgtctccgagtcagatgccatgtcgggatcgacaaagaagacgacgggcatgtcgaccttctggtgagcattgagccgctcttcgtcgaagcaaaagcattggatcttgttgaagtagattccggtcgtcggcggcgtcacgttgaaggttgcgtgtccgacgattgcctggtcggtcagattctcggccgtaaagaataccagctgttgctctccgagatggaccttcacctcctgctgaagcggctcgaaccgccaaggcagccccagcgcaacattgctgtcgaaccgaacggtaatcacgcgatttgacacttttccggaatccgtttccgctctctgtgttgttccgccaaacccggtcgccgcgcagaaccaacggtaaaatgtcggcgaataggcaacaaggacgagcatgacgctgatcgccaagaggcacggcacaacgatcctcagatgagtgcgctgccgtggattgagtgaaattcgaaagcgcttgagcatgggatcaactatttggccatgtcgccgtggcggtgcgtcattccgggcgtatcttcagcttgcatggcgccgaccttggcgatggggacggtcacctctcgcgtgcccgccttttcgaaattcaacgtcaacggaaaggtttgcccctccttgagcggctgctttagtccgaccaccatgatgtgcaggcctcccggactgaaagtgaccctggctcgaggcgcgacttcaaccgtgcgcatctcacgcatgcgggacacgccgttttcctcgctggcgctgtgaaattggatctggtccgcgaccggcgtcgtcgcgctaagcaggttatcgccagagccgccattgttaatcagggtcagatagacaacgccgcttttcgccccggtgggtgtcgcgcgcgcccacggacgctcaacgacgatcgtgttttgacctgacgtttgcgcatacgcctggccgccaaacaataattgcagcagcaggatcggaatcagacgggtgtacttcattcgaatctccatcctcgcaccgagccactcatttccttgcgcagccaggctgcgatcgcatccccgccctcgttgccctcgatgacgttgacgaattttccctgaggatccatcaggtagaggtatgcgctatgcgagacgagatagtcattgccgctgcgttctgtcttatccagagcaacgtacacgcggtactccttggtcacgctgtcgatctgcgcctgggttccagtcagcccaaggatccgtggatcaaaagactgcagatagtcggccatgacgtcacgtgtgtcgcgctgcggatccaccgtgatgaacaatggttgaagccgacttgtatccgtgccgaatttctcaagagcgacgctgacgttagcaagcgctgtcgggcacaggtcggggcaaaacgtgtagccaaagaatatgaggagccactttccgcggaagctttgatcggtgacgctctcgcctttggtggacaccagcgtaaagggcccgccaatggcgggggttccggttctgaccgccttgccaacgatcgcctgccccgacgtgggtgccctcggcacgggactcgtgacgagcagagccccaacgagcgcgagacctccagtagccgcgagtgcaagaattgaaatcagtagtgtgtatgtcgacttcatcgtcagctctctagagccgttgacgtggcgctatggctcgtcagacggaaaagggtggccttggctctcttccaactgaaattgagtttgctccggtgtccaaaatgtcttcagatacgtgatcaccgcacgaatctgctctggcgacagttcgctaccgaagtcgggcatagtcagttttttggtcttattgaatggatctcgccagcccttgctcaccatctcgtacagctctgcatcggaatgccgccatgtgtgcccttccgcattgtgcggcggcgccgggagctctccctgcgcgtcacgcttctgccaattcggtgcaccctcggcattggcgccgtggcacgacgcgcaatattgctgatagagcgcatgcccgtctgtcagctctgtcccgcgagcacccgcttggcttgccaacccgaacattaccgccaccacaattctatgcattcacctgcgtccatgtgccgccctgatcttcgctcttgtacagacgtcccttcgcgttgatgacgaacagatcgccggaaggtgtgacgacaattccgataacgtcggcgctcggcgacttcagttcgtcccagtcctctccgccgtcaccactgcgaaacagtccttgcacggtcgctgcataaacatgatcgggctgtttcggatcgtaaccaacgctgtatgcttgtccgccgagctttcctgcgtcctgccagagacagaaacaatccatgacgcgacggacgccgttcgcggttgccgcaaacagccagcccgtttgcatgctgccctccatgttggagtggatcaggtgccgtagaccctgttgcgacgcgcgctccatcaggcgccacgatttcccggcgtcctgactgcggtaaacgccttgatccctgaggacggcatacactgtctctgcctgcgtggtatgcgcggcaactgcgatgacatctcgactgggcaggccctcgttgcgttcgatccaggttgcgccgtcatcgtcggtccgcagcaggcccactcccggtccagcaagatagagaacgcctttcgctaccggagaggccgccagactcgaaatccggccgctctcagccggtgcaaccctgactttctgccagctcccgccgccgtcggcgctgcgataaagcgctcgcccgccggccttccaaagggattgggccgcaacatcataggccaatgctacaatgttgccatcatgttgatccgcccaaacgctctgggaaagtccggtgaggaccagcagcccgatcagcagcgccaccgcgcctacgctacgcaagcctgtcatttcttctccatttggttcgatctggcgggcgcaatcttggttcgccactgcgcaatctccgtcattccttatgatcgggctgcgacggttcgttcctccgccactgctcgttggggcgactgttgcccgtcatgccattgcagtgatccatcatttggctcatctgcttcatcatacccatcatgccgcccccgtcgctgtctcccatcatcccacgacccatcatcgagccggatgagcggtgattgtcgtccgcatagagggcaggaccagcgatgacgcccccagcgagaacggacgcgaatgcgagcgctagtgtggatttacgcatgggagttgctcctctctctcgactgaacctgtttcacttctgccgttggctcctcaatagccgtgccacggcagcagcttgccccagcaaccgacgcattgttcgtggcggaagtcagtggggaggctgatgtcgtcgcgtccgcctcatcgcgagaggctgccgactgcttttggccgcggcacatcatgcagtagccgaggccgcacatgatgaggcaagggagcgtgctcaagatgatcggcgcaagaccggctgcgaccagccacccccagccgccgaagtaaaggccgagaccaacggccacaaccgccagggcgacgagggtccagcgatttcgcagatagtgacgagccgcgtaaagcggatcgcgcgcgagtgatgcgtcggtcgcggtggtggtggaatgaggtgcagtcatcagcgtttctccatgtgatttactgtcgttagtggtttcaccttccgaaatgtcgatctcacgtctggcacgtcgaggtggttggcttcgcttccgcctgggacagcgtcgcagcgcccccagaagtcacgcacctgataaatgcaaccatctgaggtgcatcccactcggcaggcccgatcaaacggccgatctcgtggccttcgcggtcgatcagcagtgtcgtcggaataccaaccgtgccgagttctcgtgtggcattacccgaagtgtctcgatagaggccgagcttttggattccgacctcggcatagaacttgcgcactacgtccatgccgcgatctatggacagcggcaccacttcgaaatcgcggggttcgaacagggcctgcaatcgatcgagcgccggcatttctttgcggcaggggatgcaccacgtcgcccaaacgttgaggaggacaaccttgccatggaaatcagccaggctgcgtaccttgccttgcgcgtcctcgaactggatcgaagcgatcggcttgggggccgcatgcatgacaaacgtcttgccgtcctgtgccatcgctaccgttgtccaggctgcagcgaccaacgctgccgcgaggcggactcgaacaagttgcaagatcgttttctttgtgcggatcattgctgttgaagccttcggataagagggagaagtttctcctccaagacgtgcggcgtcaccgcgccgatgtgcttgtaggcaatgtggccgtccttggtaatgacgaacgtttcggggacaccgtagacgccccaatcgatggcgacgcgcccactgatatcggcaccggtgtgcgtgtaaggatcgcccatggtattgagccatctggctgcgttgtccggctggtccttgcagttgagaccatggatgggaacgatgccatcggccttcacttgcatgaagatcggatgctcttcgcggcacgcgacacaccacgatgcaaagacgttgacgagcgaaacctcaccccgcagatcctcgctcgataggccgagggtacgccccttgactggtggcaagcggaattgcgggacgggttttcctatcaacaccgaagggatggtgcctggattgcgggtcatgccccaggcaagcgcaacgaccaaaatcaaaaacaccccgagcggaagccaaaagaccagccgccatcgttgcagtggtctgctccgcaggtcagaattggctgtcgtcgtcagtatctcttcgatggccatggcttcctcgatcgtcagagcagccgacgcatcattctgatctactcaaccgagaagacctttgcgggcgcgctgtctttgggaatttcgtatacggtgaaaggtcctctcttcgggccagtcatgcctggtgtgcccgtcggcatgcccggaagcgaaacgccgatgatgtcgggatgctcggaaagcagtttattgagcgtcttcactggaacgtggccttcgaccgcatactggtcgatgaccatcacgtgacagccttcgagacgctgcggaacgcgcaattgctttctgatcgccgaaagatcctgctttgcatccaccgcgatgtcgaacccgttgctatgcagatacttggcgtattccagacagcaatcgcagttcggattccggtagagagtggcgctgggcctgttcgcggcgagcaccggtccagttaccggttgctgatccgtcgatgcgccgccgggcgttcttgtttgccccgtataaattcctgctgccgcgccgagaccggaaagcgccagcaacgctgttatgatcatcatcgttctgcggttcatcctgtagtctccatgattgagtgagttcgagtcggtcttggcctcagcacttttcctcgatcgatcgtccaatctcggccggatcggagaacaccagcgatcctcggtcgccttgcatgccggctgggagcaacaccggttttcccttcgggccggttggtccggagtcgaccttgaggcgcagattaagctcccagaacggacgctccttgccgtctgccgtgctcacgaagaatgtgccgtggcaatgccgaaccgcggtaacccgcgcttcaggaccggcgttctcaagcggttcgggggcctgtccacgcgcctcttcggccggaatcagtccttgtgcaacgacggacttcgcaccgttcggcgccatcgcaagcttgaggaaggcgatcagatcgttccgctgcttatcgtcctgaatcccacgaaacgtcatgtacgtgccaggaacgaacgccttcggatcggcaagccaggcgtagagcgacgcttcctcccagacgaaatcctgcctcgttttgagcgcgttcgaatatcgcgcgaaatctgctaccgaagccggtttcttgccccagaggccagcaagacttggccccgtcagatgcagattgggctcgagggagtggcaggccgcgcatgcgccgtagatcatcgcgccccgttgcggattgccgtctgcatgcgcgcgttcgagcgcggccgaagtaaggactgcgatgatggtaagggcatatggtgccttcatcgaatctctccgcacctaggccacgcgaataacggccatcattcccccctcctggtggtcgaggatgtggcagtgaaacatccagtcgcccgggttgtcggcaacgaacgcgatgtcggcttgctcccgcggcgggatcaggacggtatccagccactcgcggtagcgcgtcggcctgccgttgcgggcgatgacgcggaacgagtgaccgtggaggtggacgggatgataccaagcggtgtcgttgcgcacggcgagaacgtatgagcggccgcgcgacagcgtaagcatcggcgccagattgtggccggtcgcggcgacgccgttgatcgaccatcccatcccgcccatgccgccgctcatgcccatcatcatgccgcggccacccatcatcccgccttgcaggaccgcgctgtgcctttcggcattgacgaggtccggctccggcatcgtgttcgcgcgcatgcgagccggcggatcgagcgggcgctctcgcaggcgcggctctccgctgtagacgaggtcgaccagcctgtacgcgcgcccttcgtagaaggtatcgcgcacgaaggctttactgtcgggctcgccgttcatctccagcacaatgtccgcccgcatggcaggtcccaacacaatctgacctttcggaggttcgtgcggctcgatcggctgaccgtcgagcgcaatgatcaccggtcgatgtttccgaaactcgagtccgaaaatccgtgcgggtgaggcattgatgagccgaaggcgcagtcgctcgccggcgcggacctgaaatgtctcggggacgcggccgttgatggtgacggtgttgccgatccgacccgccatcgtcgcttccatacggttgccgaagtcgtcgacgattgacgcatcgcggttcagtcgccagtcaccgaggacccagaccacatcacggtcgacctctaccggttcggcttcctcaatgatcaacacgcccgcaagccctcggccgacctgctctgcgctatggtgatgcgggtggtaccaataggtccccgcatctggacattcgaattcgtaggcgaatgtttcaccaggcccgatcggcttctgggtcaagaatggaaccccatccatgccgttggggacccgcactccatgccaatggatcgtcgtcgcctggggcagctgattatcgagaacgacgcgcaagcgctcgccctgccgaatgcgaatctcggggcccggaacgctggcgttgtaagaccaaacatcggtgtcattgtaaggagcgccaacgagctgcagtcgtttcggcctggccgcaagcgcgagttcccgaccgggcatggcagcgcctcggctgccgcccgaaaatgcgacggcggcaagagccgagctgccaacaagaaacgtccggcggtcaattttcaggtcacgaaggaaggacatctgtcgccatcctgtgcattggagcgtgactgcgtgcagctcttgaggagcggcatgcatctccggtgcgagcacgcacacgatgtgtcattgcaccgcacgcatgctcgtgggctacgtcgctcgctggcgacgcgcctcagctcaggatggtaggtctaggaggataaggatcgggaggaatggtccgccccaccctatgggacacggcgatagatccctgcaccgtttcgggcgaccgatcagcagccacggttccgggcaaaacggccactatgccactgcaactgatcgaacacgtggcagccggcatccccgccttgctgccctcgcagtcgccgcatttgccggaggaatgcatatcgctcgacatcacgaccgccgctttgccctggtcaggcgaagcgaacatacggccggtgcccggtcccagcgtgagggccaaggtcaacaggatcgcagcaattcgacggcccatgtcgagcatggatagatagataacagctcgcttggcgaattgccagtctcgcatcgtgcctctcagagcctgatggtcaattcgggttgaggcacctcgatccgagggggaaccttggttcagccaatccggatttgggtatctgacagaattcgtagggaggcagatagagattcttgggcgccggtccacggcggactcgcccggcggcatcgtactgcgagccgtggcaggggcagaaccaaccatcgtaatcgccctgattgggcagcgggatgcagccgagatgggtgcaaatgccgatgacaacgacctaggcatcatgccccggcttcacgcgctccgtatccggcgcaggatcgatcaggttatgccagtcgacgcgacgagccccgtctatgtctttctggccgcgatgaaagatgaagatcggcttgctgcgccagaacaccttgatgatctggccctccgcgatgggcgacaggtcaacctcgatcggtgcgccggccgcgaccgtcgaggcgtccgggttcatttgcgagatcagcggaaccagcgtgacagccgcgccgacgcttcctgccgccgctgtcgcgacgtagagaaaatcgcgtcgagagggctcggctggcgaaatcgcgctcatgtgtcagtctctcatccacgcgcctttataagtgtaatgccgttgcagcattgggcccgtgcggcaacttgtcgttccagcgctggaatcgcctcgcaaagattcgaccggccgtctgtcgatcactacgatgagcgcgatggaaccagcatcatgctcaggcaaagccgggctgttgggaccggttagttgcgagcaaatcgatgccggtcgtcattcaagatcggacgagtctcctgctgcggcgcccgccacgaacgcatccgtatgccggcgtcggtgatggcgctccaggccgatattatgatttcaagctgcaacccgatctgattgcaaccgttctcgaggacttcgctccccactctggcgaggcaggggtgcaaaggtttttgccttgctgcgccacgtcaacaggccaaacgccctgtttgagaccacggattgtggactgacgcaaacgctctaccggtcgaaaaacagcgcatttccggttaagtcgggctgggtgggag

SEQ ID NO: 246 - DNA, 1895 bp, Bradyrhizobium colbertium
agcggcatgcggtcaacatcacggggcgcaacaccgaggcacttctgatcaacggacagctgcctggccccgttctccggttcagggaaggcgagagcgtggtgatcaacgtgaccaaccgcctcgacgaaaacgcctccatccattggcacggtttgatcgtcccgcccgagatggacggggtgcccggtatctccccaggctatggcgacggcataccgccgggccagaccttcacctatcgtttcaagttaaagcaatccggcacctactggtatcacagtcattcttccggagagcaggagcagttgggcatctacggtcctatgatcgtcgaacctcgcgaccacgagccgtttaggtacgaccgcgactacatcatcatgctgtcggactggagcgacgacgcgaaaagcgtcatcaagaacctgaaggccgacagcagctggtacaatttcaacaggcgcacgctggtgagcctcttccaggagctgaacaaggcgccttccgaggaggctcgccgggccatcatcaacgaccgtatcgcgtggtcgctgatgcggatggaccctaccgacatctcggacgtgtcggcctataccttcctggtcaacggccggacaccggagcagaacttcaccgctctctttagaccgggcgagcgcatccgtctgcgcttcatcaacggatccgcgatgacgtatttcgacgtgcggattcccggactgaagatgagggtcgttcaggccgacggcaacaacgttcagccggtcgtggtggatgaattccggatcgccaacgccgaaacctacgacgtgatcgtgcagcccaccgaagaccgggcctacacgatcgtcggagagtcgctcgaccgcacgggcttcgctcgcaccacgctcgcgaccagaccccgaatggtcggcgaactgccgccccatcgcctacggcccctcgtttcgatggcggagatgggcatgaatctcggcccgaagggcggcgaccgcggaactccgcatccggagcgggacatgccgggccatgtcgcgcccgaggatcctgtcgcaatggcgatcgggatgggcgacacgagcggaatgtcgggcgagggcagctccaagatgcccggaatgcaacacggcggtgggacgaagcagccgatgtccggaatgtcgatgacgccgaaacagtcgaagcagccgccgaaaccgaccccacgcagcaagagcccgggcatgcccggagtggaccacggaaagatgcccggcatgagcgacgctctccccgagaggtcggattcatttgcccaaatgcaacaggcgccaggccataccgccatgcctggaatgggtggtggccgccggtccgctccgatcgtgcagcccgagcgcgttcaggaaggaccgcaggcgtacgtcctccaagggggcgaagacatggagagcgttccgctggcgggcggacatggagcgcccgacccgctcctgaacgatacgggagcacctgtaggcacaaaagtcctttcgtatcgcgatctcagggcgctccgcccttatccctacaagccgtacgaccgcatcgtcgagatgcgcctgacgggcaacatgcaaagatacttctggtcgatcaacggccgaaagttcagcgaagcggagccgatcgtgctgcgatacggcgaacgcgtccgattccgcatcatcaacgagacgatgatgaatcacccgatgcacatacacgggacatggttgctgcccgacgtcggcaacggcgctcgcaatcccaagaagcataccgtcaacgtcaagcccggcagcaccgtagatgtggacgtgccggccgacgccgagggtccttgggcattccattgccaccagctctatcacatggaaaccggcatg

SEQ ID NO: 247 - DNA, 1772 bp, Bradyrhizobium colbertium
cccgggggattttgaccgacccacggggcttaaactgccattcaaatttgcccgccatcatcgtctccaacaagccggcaaacggcatgggatgagtcgaacagctttttggacgggagccgcgctcgggggacgaggcggcataagaacaaaggggatgcgtgatgtttcagggtactttcgatctggagacggcaacgccgatcgatgcgagcgcgctgtcggacgtgctgttcgagcgcggaatctactgggcgagcggccgctccgggatcgtcgatctcgtcgccgcgcacaaatggttcaaccttgccgcgttgaagggccgcaaggacgccgtagcgctgcgccaggaagtcgccgggcagatgtcggaagccgagatctcggccgcacagcgcgaggcgagggcctgggtctccgcgcactgatgagaatcgcacctgcccccgtagtcgcacggggcggccagttgcgctgaagcaagtgtcttcgtcttgccgcgcataaactgggtggtatggacacgaatgaacgatggctgccgattcagatcgctcccgatgagtgcgatctggagctcggacgtctcgacaagaccggaatcttgccctggtcctttccctgccggcggacggacggcgtgtggttcaatgtctgggccggcgaggccgtgctgatatcgccttcgcattggcggatctggcgatctggtatctgggtgcgggcaggcacgcgcgactcgcggtgagctcagtgtggtcaccatcgttctcaggtgaaagaacgcctggaacttgattgattctgctgccgatggcggagagggagggattcgaaccctcgatacagcttgagaccgtatgacgctttagcaaagcgttgccttcagccactcggccacctctccggtgcgagccttatgcatctaattgctcgcgcgggtcaaattggaagcgcgtgtttcgctcgaattcccagtgaatttcgaaacataggggtgctctgagcggccaagagcgtggcgccgccaaggcagatccgaggcctgtccatgtgagcatggatacaggatgctctgtggagggagacttccttgctcccctcgatgtccgatttcccttgaagttcaatggtctgcgagaaggctagggaagattgacctccctgcgtcttgtcttgcgagctgccggcgcgatcccgatcttcgccatctctataaagagtcattgccggcgcgccaaaggcattgcggcgactgcgcttaccggggcgaaggcgctgatgtctgtccattgagtctcttcgtgattccacgattcgagcgcgtcaaagccactccaggccgatgtcttcagaagcggcgccccatgtggggaactttgatggcaaatggaaccgcttcaaaaacgttagtgaaaacagtaggttgcaagcgcgatctgatcacatctgcgtgttatttgtgcaacacccaccggaaaacacgcttcctcggcccgtttgggagcgttctcttgttgtgtgtgcaaggccgttcggtaattgtgactgagcgacggaggggggcatcccgaggtcgtcccgtttaggtctttcgcttaagtccctcgcgttcatgcgggtgtgtccgaaggcgcgaaggggcccaaagcggtgatttagagggggctggggaattgaccatccggtcagtgaccttccctgaaagagcaacttggaggtttaacatgaagttggttaagagccttttgctcggctcagcggcgggt

SEQ ID NO: 248 - DNA, 89294 bp, Bradyrhizobium colbertium
  misc_feature (24490)..(24499): n is a, c, g, or t
  misc_feature (74118)..(74127): n is a, c, g, or t
  misc_feature (79333)..(79377): n is a, c, g, or t
acggtgaccgtcaccgtcaccgacggtcacggcgcgagcgatacggtcaacctgatcttcaacctgtccgaacaaggcccggtcgaccttgccagcacgaccggcaaggacgtgctgttcgggtccggctaccaggatcagttcgtgttcgaggccaattcgaaccacgacacgatcctcgattttgcgcacggtcaggaccacatcgacctgacggcggtcgtggcgacagatatcgacgcggcatggatagcccagcacgtggcgccctcagggacggataccctgatcacgctgagtgcgacggacaccatcctcctgaagggcgtcgcgaacgtccagccaagcgacttcatcgtccatgcctgactgaggcgccgcgatcgtccacacaccgatcggagctgccgccgtagtcaaagcgtgatatcgaatcctcatgaaacgtctcaaactcctgcggctttggtttgcgcggaagctcggcttcgcacggctgatgtgcctggcgctgctggtcctgttcgccggcgcccgtctctgggatccgccgccgatccaggaattgcggctgcgcaccttcgacatgtttcagttgatcgatccgcgccacaaggcggcgcggccggtcaccatcgtcgacatcgacgacaagagcctcgccaggctcggccagtggccgtggccgcgcacgcgcatcgccgacatgatccagaacctcaccagcaacggcgcggtcgtgatcggcttcgacgtggtgttctcggagccggaccggctcaatccggatctggtcgcgagccagatgcgctatctcgatgacgccacccggatcaagctccgcgagctgccgagcaacgaccaggtcctcgcggatgtgatcaagcgctcgcgcgtggtgctgggcgagaccgggcttccggaggtcttgtccgagctggacaagtcgcttccgttcacgggcgtggcgaccgtcggcgaggacggggccgaacgcttcctgttcgaattccccggcttgttgcgcaacgtgccgatcatcgagaaggccgcggccggccgcggcctgttctcgatcaggaccgagcgcgacggattgattcgccgcgtgccgatgatcctgcgcgcccagggcaacatcatgccctcgctcagcctcgagatcctgcgcgtcgcgaccggcacgccgacgctgctggtccgtaccgacaaggccggcatcaggggcgtccgcctcaagggcgtggaaattccaacggaccggaacggccagctctgggtccactatgcccgccgcgatccctcgatctatgtctcggccgccgacgtgatcgacaataccgtgccgccggccatgctcgcgggcaagctggtgctggtcggcacctccgctggcggactcaacgacatcaagaccacgccggtctcccgcgccatgccgggggtcgagatccacgcccaggtgctggagagcgtgctgagcggcgcggtgatctcgcagccgaattatgcgttcggtgtcgagctgatcgcggcgctgatcatcggcctgctcgtcatcatcttcacgccgaatctcgggccggtacgcctcgtgctcgccggcgcgacctttgccgccatcctgatcggcgtgtcctggttcttctatacccagtaccgctacctcatcgacttcacctatccgctgctgtcgaccaccgcggtctacctgacgctgatctttgcgagcttcgtgcgcgagcagcgccagcgcgtgcagatccgcggcatgttcgcgcagtacatgtcgccggtgctggtcgagcagctggcacagtcgccggaaaagctcgtgctcggcggcgaggagcgcgagatgacgatcatgttctcggacgtgcgcggcttcaccacgatctcggagagctacaagcacgatccgcaaggcctgatcgcgctgatgaaccgcttcctgaccccgctgaccgacgtcatcatcgagcgcaagggctacatcgacaagtacatgggcgatgccatcatggcgttctggaacgcgccgctcgacgacccccagcacgaggtcaatgcctgcgaggctgcgatccagatgctggagcagatcgatctggtcaacaaggagcgcgagcaggaagctgccgacggcggccacgtctacatcccgctcaatgtcggcatcggcctcaataccggcgtcggcgtggtcggcaacatgggctccgacctgaagaagaactattcggtgctgggcgacagcgtgaacctggcctcgcgcctggaagggcagaccaaggaatacggctttccgatcatcgtgggatcccgcaccgcgctcgcggccaaggacaagttcgcgatcctcgagctcgacttcatcatggtcaagggcaagaccgagccggaggtcatctatgccatcgcgggccgcgaggatgtgatgcattcgggtgcattccagcgcctgcgcaacatcaccatcgagatgctcggctgctaccgcaaccgcgactggcagggcgcattggacgcgatcgagcgcggccgccgcagcgaagacgccgacacgctggagaagctgttcaggctgtacgaggcgcggatcagggaattccagatcaatccgccgcccgagaactggaccggcgcctatgcgctgctgaccaagtagctgtgtgatcgaggcatctccggtgcctcatgctccgtcattgcgagcgtagcgaagcaatccagtgatgcatccgcggagatattctggattgcttcgctgcgctcgcaatgcgagtttgatgcgcctgtgtgcgccaaacatcagcttttgtaggggtgggcagagacgcgtcagcgccgtgcccaccatctctcctcgcattggcccgaagcggcgggcgcgcttgcgctttgcctacgcagcgacagctgtctccgctcccgtcactccaccccgatcgtcgtgagatcctggaaccagtgctgcgcctgcacgaaccgcttgatcttcggcgacagcgcgtgagggttggtgtcgtggacgacccagaccagcgtggcgtcatcgacgatcagcgcatgcgcctgcgccaggagcgcgtcctgcttggtggaatcgaaggtctgcttggcctcgtcgatcagcgcatccaccttcgggttcttgtagccgccccagttgacgcccacgggcgcgatctgcccggaatggaagaagcggacgatcgcatagagcgggtccgaggtcacataggcgatgttgttggcggtgatgccggcattcatctcgtccgccgcgcccttgcgccaatgcgtatagagcgtctcgagctcgaccaccttgaagtcgatgtcgatgccgatctccttgaagctctgctgcaggaattcgttcatcggcagcgacagcatctggccggtgccgccttgcgcgatgatgaaggtggtcttcagcggcttggccttggagtagccggcttcctcgaccagtctcttcgcggcggcaagatcatacttcaattcgaagctgggcttgccgaaccatgggctcgacgggtcgacctgtcccttcgcgggcttcgccaatccgttcatcaggcccaccaccgcgtcgcgatcgatcgcgaggttcagcgccttgcgcaggcgaatgtcggtccagggcgagcccggcagcacgctgaggtgataattccagacatgcggcgtgacgttgtcgaccagcttcatgccggcggctttcagctgcggcaccgcgtccggcgccggcgtctcgatcagatcgacctgcccagcaagcagcgcgttggtgcgtgtcagcgcctcaggcatcggcaccagcacgatcttgtcggccttcggaatgcgcttcttgttcctgtagtcagggttcttggtcagctcggcgagctcgcgcggcaccagtctcgtcaatttgaaggggccggtgcccgagggctggctggcgaacttgtcccagtccttgccgagcttttcatactgggccgggctcgacaccaggaaccacagcatctggtacgggaaaaaggaatcgaccgccttggtggtgatctcaacggtggagtcgtcgatcttggcgtagctggcgacggaggggaggcgcgtcttcacctgcgcgctttgccgcttgtcgaactgcggtgccttgtcgttgagcaccttgtccagattccagatcaccgcatcggcgttgaactcgctgccatcgtgaaacttcacgcccttgcgcaaagtgaagcgccatttggtcttgtcggcatcgtccaccttccattcggtggcgaggcccggcaccagcttgccgggccggtcggccacgtccatctcccaggccaccaagggatcgtagatcgtgtaggcggtgaattgataggcgcccgcgccgcgatcgggttggcccgtggtcagcgggatgtccgccatcgagatgccgtagcgcacaacagtttcggcgcacgccgaaactgcggagaacgccagcgcaagcacggcgagacaggtcgatagacgaagacgcatggcccaaagctccaaggggaattgaagggggagttcgggccaaacctgcaatcttgatgccagaataggcagcgccttggttttgccttccggcgatccacaaggacttgtcgccgcaggggcaatctgcagaaaaagtttctccttggcataggcattgcataccattgcatcaaaattaatcatccaagccggagaaggacgaggcgatgtttattaagaagaatacgcgtgcggcactgttcgcggtgcttgctctaacgacaaccgcggcctggccgcgcgtcgcaagcgcggagaccgtgctgcgcatcggcatgaccgctgccgatattccgcgcacgctgggccagcccgaccagggcttcgagggcaaccgcttcaccggcctcaccatgtatgacgcgctcaccggctgggacctgtcctccgccgagaaggcaagcgtggtgattccgggccttgccaccgagtggaaggtcgacgatgccgacaagaccaagtgggtcttcaagctgcgccccggcgtcaccttccacgatggctcgccgttcaacgccgatgccgtggtgtggaacgtcgagaaagtcctgaagcaggatgcgccgcaattcgacgccagccaggtcggcgtcaccgcctcgcgcatgccgacgctggcttctgcgaagaagatcgacgacatgacggtcgagctcaccaccaaggagcccgacagcttcctgccgatcaatctcaccaacctgttcatggcgagcccggcgaagtggcaggcgttctacgacaaggccgacggcgccgacgccaaggcgaagtcgcaggccgcatggaccgccttcgccaaggacgcctcgggcacagggccgtggaagatggcgagcttcacgccgcgtgaacggctggaactggtcaagaacgcgaactactggaataaggatcgcgtgcccaaggtcgacaagatggtgctcctgccgatgccggaggcgaatgcgcgcactgcggcgctgctctcgggccaggtcgattgggtcgaggcgcctgcgccggacgcgctccccgagctcaagcagcgcggcttcaagctctacgccaacgagcagccgcatgtctggccctggcagttctcgcgcgtcgaaggctcgccctggaacgacatccgcgtgcgcaaggcggcgaacctctgcatcgatcgtgaaggtctcagggacgggctgctcgccggcctgatggtgccggcgaccggcaccttcgagcccgggcatccctggcgtggcaatcccaccttccagatcaagtacgacaaggcggccgcacaaaagctgatgcaggaggccggcttcggccccaacaagaagctgacggtgaagactcagacgtcggcgtccggttcgggtcagatgcagccgctggcgatgaacgagtatctgcagcaggcgctggccgaatgctatttcgacgtgaagctcgacgtcatcgagtggaacacgctgttcaccaactggcgccgcggcgccaaggatcccagcgccaatggctcgaacgcgaccaacgtcacctatgcggcgatggacccgttcttcgcgctggtgcgcttcctgcaatcgggtatggcgccgccggtctcgaacaattggggcttcatcaacaaccccaaattcgacgagctggtgaagaaggcgcggcagaccttcgatcccgccgcgcgcgattccgcgctcgccgagctgcacgcagcctccgtcgacgatgcagccttcctctacgtcgcccacgacgtcggcccgcgcgcgatgagcccgaaggtgaccggcgtcatacagccgaagagctggttcatcgacttctcgccggtgtcgatcaagcagtagtcgaagcttgctcagtgcatcctctccccttgtgggagagggtgggttcgcgacagcgaagccgggtgaggggtctctctccgcggagggactctctctcgtttgaaatggtgtagccgcggaaacaacccctcatccggcgcttgcgcgccaccttctcccgcaaggggagaaggaagaaagaaacaacgtgctcgcctatatcgcccgacgcatcgtctatgtcgtccccatcgtcatcagcgtggcgctggtgtgcttcctccttgtgcacatcacgccgggcgatccgctcgtcgccgtgctgccggccgatgcctcgcaggagctcgccgcgcagctgcgcaccgcctatggcttcgaccgcccgctgccggtgcagttcgggctttggcttcttcgtgcccttcacggcgacctcggcaactccatcgcgacggggcgtccggtgctcgccgaggtcatgcgcgcagtgggcaacaccgtcacgctggcgattgctgcggccatcatcggcttcaccatgggcattctgctcggcttgatcgccggctatttccgggagacctggatcgacaaggtcgcgacctcctttgccatcgccggtgtttccgtgccgcattactggctgggcatgctgctcgtcatcatcttctcggtgcagctcaactggctgcctgcggtcggcgccggcccgagcggctccaattcctgggcctgggactgggcgcacctgaaatatcttgtgctgccggcgatcacgacctcggtgatcccgatgggcatcgtcacgcgcaccgttcgcgcgctgaccggcgacatcctcagccaggacttcgtcgaggcgttgcgtgcaaagggcctgcgcgaaaccggcgtgttccgacatgtcatcaagaatgccgcgccgaccgcgcttgccgtgatggggctccagctcggctacatgctcggcggctccatcctgatcgagaccgtgttctcctggccgggctcgggcttcctgctcaattcggcgatattccagcgcgacctgccgctgctgcagggcacgatcctgatcctggcgctgttctttgtcttcctcaacctgctggtcgacatcgcccaagccgcgatcgacccgcgcatcaagcggggctagcgggatgagatcgagcccagctgttgccgcgaagccggtgcgctccctcccccgcgagcgggggagggttggggagagggtgtctcctcgcgcgaggacccccgaacctgtcatcgggcgcgcctgcggcgcgacccgttgggcgcgacctctcccgcaaccgggagaggtgcaccgccttgttggcttgtgtcgattgaaccaacatctttcgggagccgactgatgagcgagcttccgttgtccgccaccagcgacgccgcgcttcaggccgcgcccgcgaccaaggcacgcggctattgggccaccgtcggccgccgcatcatgcgggacaaggtcagcatggcctgcgcgctggtgctgctgctgatcttcctctcggcgatccttgcgccatggctcggcctggaagatccctacaagggctcgatgatccgccgccttcgtcacatcggcaccccaggctaccccctcggcaccgacgagctcggccgcgacatgctggcgcgtctcgtctatggcggccggctgtcactggtcatcggcatcctgcccgtgatccttgctttctgcatcggcacctcgctcggtctcgttgccggttatgtcggcggcaagctcaacaccgcgatcatgcgcacagtggatgtgttctatgcgttcccgtcggtgctgctggcgatcgcgatctccggcgcgctgggtgccggcattctcaactccatcgtgtcgctgacggtcgtgttcgtgccgcagatcacccgcgttgccgagagcgtcaccaccggcgtgcgcaacatggatttcgtcgaggccgcgcgcgcttcgggggccggcgcctttaccatcatgcgcgtgcacatcctcggcaatgtgcttggttccatcttcgtctacgccaccagcctgatctcggtctcgatgattttggctgccggcctctccttcctcggtctcggcaccaagccgccggagccggaatggggtttgatgctgaacaccttgcgcaccgcgatctacatcaatccctgggtcgccgcgcttccgggcgcgatgatcttcgcggtttcgatctgcttcaacctgctctcggacggactgcgcagcgccatggacatcaggaactaatgatgatgagagcaagacaggccgccgcagcttcggtgccacacctctccccgattgggagaggtgggaggtcgcggccatgagcgagagcacatccgtcgagatgctggagccggtcgaggaccgcggcggcgtcgcgcagccgctgctgcaagtcaacggcctgaccaagcatttcccggtgcgcggcgggttgttcgccgccaagcgcaccgtgcgcgccgtcgacaacgtttccttctcagtcgcgaagggcgagaccgttggcatcgtcggtgagtccggctgcggcaagtccacgactgcacggctgctgatgcatctgatgccgcgcgatgacggcgacatcatctatgacggcatgacggtcggccagtcgctgagcttgcgtgagctgcgccgcggcatgcagatggtgttccaggattcctacgcctcgctcaatccgcgcctgacgatcgaggaatcgatcgcgttcggccccaaggtccatggcatggccgatcacgcggcgcgcacgctggcgcgcgagttgctcggaaaggtcggcttgcgccctgaaaactttgccaatcgctatccgcacgagatctccggtggacagcgacagcgcgtcaatatcgcgcgggcgctcgcgctgtcgccgcggctggtgatcctcgacgaagcggtctccgcgctcgacaaatccgtcgaggcgcaggtgctcaatctgctcgtcgatctcaagcgcgagttcggcctgacttatcttttcatcagccacgatctcaacgtcgtccgctacatctcggaccgcgtgctggtgatgtatctcggcgaggtcgtggagcttggtccggtcgaccaggtctgggatcagccggcgcatccgtatacgcgcgcgttgctggcagcgatgccgtcatccgatcccgatcgtcgcaccgagacgccgccgatcaccggcgatccgcccaatccgatcgacccgccctcgggatgccgcttccatacccgctgtccgtttgcggagccgctctgcgcaaatgcgacaccaaaactcaccgcgctcgatagaatgggccacgaggccgcgtgctacatggcgataccgggttcgggccatagccgcgcgcccaggggagaaaccgcatgacgagacccacaccgaaagagatcaagccgatcgcgcaaattgccggcgttcccgtcgatgacgagattgcaacgcgcatctccaatgccatcgggcctgccttcgaaggcttcgccgccattgccggtacgttgccgttcgacctcgagccggccggctatgtgctcgcccagacgcagaaggtgtcgaaatgagcaccgaacccgcattgatgacgctcaccgaggtcgcgcgtgcgatcgcggcgaagcgggtgtcttcgcgcgaagcaacccgcgcgttgctgcatcgcatcggacaatggcagccgcatctcaatgccttcatgtcgatcgaagcggaggcggcactcaaggcggcggatgccgccgacgccgagctggccaagggcaatgtccgcggtcctctccatggcgttccgctcgcgcacaaggatatgtattacgaggccggcaaggtcgcgacctgcggctctctcatccgccgcgatttcgtgccgaccgtcacttccacggccttgcagcggttgaaggacgccggccaggttcgcctcggcacgctgcatcttgccgagttcgcctatggccctaccggccacaacgcccattacggcccggtgcgcaatccatggaacgtcgcgcacatcaccggcggctcgtcctcgggctccggctccgcggtcgccgcgcgcctgacctatgcggcgctcggctcggacaccggcggctcgatccgcatgcccgcgcatttctgcggcgtcacggggctcaagaccaccgtcggccgcgtcagccgcgccggcgcgatgcccctgtcgcaatcgctcgacaccgtcggaccgctggcccgcaccgccgaggattgcgcgttgttgctggcgttgatggccggcccggatcccgccgattcgacctgcagccacgagccgctgtcggactacgtcgcggcgacgaaaggctcactgaagggcctcaagatcggcgtgcccgcgtccttctatgtcgatgatctcgacggcgaggtcggccgcgtgctggacgagaccatcgcggtgctcaagcgcgagggcgccgacatcgtcaaggtcgagttgccggaccagcggcaattgtcgtcggcgagccagctggtgctcgccgtcgaagcggccgccttccacaagcgctggatgatcgagcgaccgcaggattatggcccgcaggtgctgatgcggctgcagaacggcctcgccgttcccgccatcacctatctcgaggcgatgcgctggcgcgggcctgcgctcgccgcgcacaacgcggccactgccggcgtcgacgcggtgatcgcgccggcctcgcccgtgccggcgccgacgatcgaggagagcgacgtcggcggcggcccgaatgcgccggcgctgctgcagcggctgacgctgttcacccgtccggtgaacttcctcggcctgccgtcgctcacggtgccgtcaggtttcaccaaaaccggcctgcctgtcggcatgcagctgatcggccgctccttcgatgaggcgaccctgctcaccatcggcgccgccttccagcgcgtcaccgaccatcacgatcgattgccgaaactgccgtcatgaccaagctcgtcgagatctcaggcctcaacatccgcttcaccggcgagcgcacggtctatgccgtgaacgacctcagcctctcgctgggcaacagcgaggtgctgggcctgctcggcgagtccggttcgggcaagagcgtgaccttgcgtgcgctgatgcggctgttgccgaagaagcgcacgcagatatcaggcacggtcaacgtgctggggcaggacgtgctcgccatgaacgacgagcaactgtcgtcgttccgcggccagaccgtctcgatgatcttccaggagcccgcgctcgcgcttgatccggtctacaccatcggcgcgcagatcgccgaaagcgtggtgcgccacgagggcaagagctttgcggaagggcgggcacgcgcgctcgaaatgctcgaggtcgtgcgcatcccctcggccaagcggcggctcgacgcctatccgcacgaaatgtccggcggcatgcgtcagcgcgcgatgattgccttggcgctggcctgccggccgaagatcctgctcgcggacgagccgaccacggcgctcgacgccaccgtgcagatccagatcctgctgctgctgcgcgagctgcagcgcgagttcggcatgtccgtcatcttcgtcacccacgacatcggcgtcgccatcgagatctgcgaccgcgtcgcggtgatgtatgccggccagatcgtggagcagggcacgctgcgcgacatcgtccgcgcaccggtccacccctacgccaagggcctgctcgcctccaccatccacggcgctaagcggggcgagcgcctggagaccattcctggcacgccgccttcattggccgagaggccgcacaattgctcattcgcgccccgctgcaaattcgtcgagccgcgctgcctggagcaactgcctgccaacgtggaggtcgggccgggctgggcggcacggtgcgtgctggcggagccggcggtcgcgtcatcgtaatgcttgccgcgcaatcgcctccttcttccgcggaggagtgacgagcgtgctctcacttcggaattgctctgtgacaacaccgacttgtcgcagcccgccgcgcgcggacagctgagcgcgcctctactgtgcatggggttgttctcgacattttgtcggggcagccagcaaccggctggccccagcgcgcattcacaccccattcatcccggttccccttccatgccgggcatccacggagagggacgtcactcatgcacatttccaacgaaggcctgctcgtcatcctgttcgtcggcctggtcgccggctggctggccgggaaggtcgtgcggggcgccgggtttggcatcatcggcgacatcgtgatcggcatctgcggtgcgctggtggcaagcctcctgtttccgaggctcggcattcggctcggcaccggcctggtgtcggagatcgtctattccgcgatcggcgcggttatcctgctggtggtggtgcggctggtgcgcggcggcggccggctttagccccgcattggactggaacttgccgccgctctttccgcggaagaggctgaaagcctgcaagaaaaagccgcaagcctgtgaaaatccggacttgcgccgaaggctgccaggggtagatgtggcgcagcggggccccggattatttcgaccgtgtcggacggccggaaaacagatgttaatccgaggcgagtacctgttaaatcgctcttgaaatcagggctttgcccgttacctgaaagagaccagactgatggcagccatccctggcgtccgccgttcagagctcggtgacgccttgcgcgcctgtcgcacggcgttcatcggcgtcggcttgatgagctgcatgatcaacctgctctatctgaccgggtcgatcttcatgctggaggtctacgaccgggtgctgccgagccgcagcattccgacccttgtcggcctcatcatcctcgccagcttcctctacatggcgcagggcatgctcgacatgatccgcaaccgcatcctggggcggatcggcacctcgctcgacgaggccctcaacaagcgcgtcttcgacaccatcgtgcgcctgccgctgatcgtcggcaatcgcaacgagggcctccagccgctgcgcgatctcgacaatgtccgctccttcctgggcggcatgggcccgagcgcgttcttcgacttgccctggctgccgctttatctcgccatctgcttcgccttccacgtcctgatcggtgtcactgcactggtcggcgccatcatcctggtcgggctcacgctggttaccgaattcatgtcccgccagccggcgaaggaggcgatgggcctcgccgcccagcgcaacgatctcgcccaggccagccgccgcaacgccgaggtgatggtgtcgatgggcatggccgggcggatgaaccagcgctggagcgaggccaacgaaaagtatctcgccggcaatcagcgcgcgagcgacgtcgccggcggtctcggcgcggtcgccaaggtgctgcgcatgatgctgcaatcggccgtgctcgcggtcggcgcctatctcgtcatccaccaggaggcgaccgccggcatcatcatcgccggctcgatcctctccgcccgcgcgctcgcgcccgttgatctcgccatcgcgcactggaagtccttcgtcgcggcccgccagagctggcaccggctcacccgcctgctggagcagatgccggcgcagccgatgccgacccagttgcagccgcccaccagccggctctcggtcgaaggcatcgcgatggtgccgcccggcgatcagcgcctcgtcgtgcaggacgtcaccttcgcgctcgccgcgggcaacggcctcggcgtgatcgggccgagcggctccggcaagtcgtcactgatccgcgcgctggtcggggtctggcagccggtgcgcggcaaggtgcggctcgacggcgcggcgctcgatcaatggtcgagcgacatgctcggccgccacatcggctatctgccacaggacgtcgaattgttcggcggcaccatcgcccagaacatcagccgattcgatcccgaggcgacctccgacggcatcatcgcggctgcgaaagaagccggcgtgcacgagatgatcatcaagatgcgcgaaggctacaacacccaggtcggcgagcagggtgccgcgctgtccgccggacaggcgcagcgggtcgcgctggcgcgcgcgctttatggcaacccgttcctgatcgtgctcgacgagcccaactccaatctcgacaccgaaggcgatgaggcgctgacccgcgcgatccgctcggcgcgcgagcgcggtgcgatcgtggtcgtggtggcgcaccggccaatcggggtcgaagcggtcgatcagatcctggtgctgcgcgacggccgcatgcaggcgttcggcccgaaggagcaggtgcttgcccaggtgctgcagccgcgcgcgacgccgcccgcaccgatcaagatcgtcagcgaaggcggagtggccaagccatgagcacattggcaataggcggcccgaagcccgccgcggcgaagaccgtgcgcgattcgatcaagttccacctgatgctcggcctcgcgatcgtgctggtcctggtcgtcggcctcggcggctgggcctccacggtgctgatctcgggcgcgctgatcgcgccgggacagatcgtggtcgaatccaacgtcaagaaggtgcagcatccgaccgggggcgtggtcggcgaggtgcgcgcccgcgacggcgatcgggtcaaggccggcgatatcgtggtgcggctcgacgacaccgtcaccaaggccaaccttgcgatcgtcaccaagaacctggacgccgcgcaggcgcgtgcggcgcgattgcaggcggaacagcgcggcctcgaccggatcgagtttccgcaggttctgctcgatcgcgctggcgatcccgacgtcaaggtgctgctctccgcagagaccaagctgttcgacgtccgcgtcaatggccgcaccggacaaaaggcgcagctgcgcgaacgcatcacgcagctcaacgaggagatcgcaggtctcagcgcccaggaaaaggccaaggaccaggagatttcgttggttcagaacgagctcaccggcgttcgcgagctctacgaaaagcgcctggtgcagatctcgcgcctgacccagctcgaacgcgactcggcgcggctcaacggcgagcgcgcgcaatacatcgccgcgcgggcccaggccaagggcaagatcaccgagacggagctccagatcatccagatcgacaaggacgtggtcagcgaggtctcaaaggacctgcgcgagaccaacgacaagatcggcgagctgatcgagcgcaaggtcgccgccgaagaccagctccgccgcgtcgacatccgcgcgccgcaggacggcatggtgctgcaatcgacggtgcacaccgtcggcggcgtcgtcaccgccggcgacaccttgatgctgatcgtgccgcagaccgacgatcttcaggtcgaggccaaggtcaacccggtcgatatcgacaagctccagatcgggcagaagacgctgctgcgcctgtccgccttcaaccagcgcaccacgcccgagctcaacggcctcgtcagccgggtctcgccggacgtcaccaccgaccagcgcaccggtcagagctactacaccatccgcgtctcgatgccgccggaagagatcgcccgtctcggcgacgtcaagatgatccccggcatgcccgtggaagccttcgtccagaccggcgaccgcaccatgctgtcctatctgatgaagccgctgcacgaccagcttatgcgggcgttccgggagaagtgacgcgaaagcgcgtcatccactcgcaatgacgacttgcagatgacgacttgcagatgacgacttgcaaatgacgacttggctgtcagtttgctatactgcgcttgccagcagcaaaccggcggtcgaacaatgcagtccccttcctccattgccaccgaatccttcacggacgcgagccttgccgtcgcccgcctcgaagagatctacgagcgcaacacgaagttcctgcgcgaccggttcgaggcctatgtcggcggcgaagcgatcacgacgcgggtgcgcgctttttatcccttcgtccgcatcaccactgcaactcatgcgcggctggattcgcgcctcgcttatggcttcgtcgccggccccggcgtgcacgaaaccagcgtgacgcggcccgacctgttccgcagctatctcaccgagcagatcggactcttgatccagaaccacggcgtgccggtcgagatcggcgagtccgccgagccgatcccgatccatttcgcctatcgccgcgacatcaacatcgaggccgccatcaccaccagcgagaactcggcggtgacgcggtcgctgcgcgatgcgttcgacgtgcccgttctcgccacgatggacgattccatcgccgacggcacgttcgagctgcagcccggagcgcccgagccgctgtccctgttccgcgccgctcgcgtcgattactcgctgcgccgcctctaccactacaccggcacggatcccgaatacttccagaatttcgtcatcttcaccaactatcaattctatgtcgacgcctttgcggagctttgccagcaacggctccaatccggcgaagccggcctcgatgctttcgtcgcgcccggcaacgtcgtcacgcgcagcggcggcgcgagcagcggcaccgcgcctgctcgtgcgccgcagatgcccgcctttcacctgaccacgcctggttatcgcggcatcaccctgatcaatatcggcaccgggccatccaatgcgcgcaacgtcaccgaccacgttgcggtgctgcggccgcacgcctggctgatgcttggccactgcgccggcctgcgcaacacgcaacggctcggcgattacgtgctcgcgcacggctatgtgcgggaggaccacgtgctcgaccgcgagctgccgctgggagtgccgatcccggcgctggccgagatgcaggtcgcgctcgagcaggcggtcgaggatgtcacggggctcgagggcttcgagctcaagcgcctgatgcgcacgggaacggtggcgagcgtcgataaccgcaactgggagatttccgggcccgatgtgatccgccgcctgtcgcaatcgcgcgcggttgcgctcgacatggaatcggccgccatcgccgccaacggctaccgcttccgcgtcccctacggcacgctgctctgcgtctccgacaagccgctgcacggcgagatcaagcttgccggcatggccagcgaattctaccgccgccgtgtcggtcagcatctcgagatcggcctgaaggcgctggagcggctcaagcagcaggaatcggagcggctgcattcgcgcaagctccgcagttttgccgaagtcgcgttccagtagggtgggccttcaaccccgctgacaaggccgagaaatttccgcactgtccgcgatggggccgaccgggacgtttcgatgccgctgacacgcgacaggatcatcggccatgaccgcgaacggctggcctttcgcttcaccatgctgagcgacggggaggtcgtgcagtgccagatcagcgacgccgcgatggacgagctcgcaggcatgcagggcaccgaaagcagcgcgcgtcaggcccagttcctgtccctgcgtgaaaccatcgagcggatcgcgtcagacctctacgacgaggcgccgcgggtgaaggggcatgtggtgcggatattcacgcggcatttggggcggtaaggtcgaaggtcacggcgatcaccggtcctccccgtcatcctgaggtagtggaagtgtgtccctgccgcgccagccgctcacgcctccagctttctcagcagcaggttcagcgccgtcgcggcgaaagcctgcatgtttgcgagccggtcgttgcttcccgtctccagcgtcatcacctctgacgcaggccccgcaactgccatgcagctatggccggcggcatcgccgtagcggttgccggttgggccggctgcgccggtctcggacaggccccagtcgctgttgaagcgcgttcgcatctgctcagccagcaattgcgcatagggcgccgaagacgaccgaaagcccttcatgccgtcatccgaaatatccatcagcatgcgcctggcatcgcgggtgtataccaccgcgccgccgaggaagtaggcggaggcgccgggcaccgcgagcaggctggccgagatcaggccgcccgtggaggactcggccacggcgatggtctgtttgcgggcgatcagctgtgccgcgaccttttccgcgatgccgacgagttctttcatctctggtacccctcattccttcgcaaccgagctcgtccttcctagcatacgacgggacgcctgaccgagttgcgggcggcgggcaggcctgcttcaatggcgggacaagaagagacatgaggaaacgtgagaaggcagacgtcatgacgtccccgatcgccggcggtgtagattgcgacgtgcatccggccttgccgcatctgaccagcctgctgccgtacctgaacgactactggcgcgatcaggtgacgacgcgcggcatggtggacctcgtctcgcaatcctatccgcagaactcaccgatcacggcacggccggattggcgtccggagaccggcaagcccgctgagagcctgtcggacatgcagcgccatgtgctcgatccgttcaagctcaagcatgccatctgcaatccgctgtacggcgtgcagatggtgttctccgaggacatgcaggccgccttctgccgcgcgctcaacgattggctggcgaaggaatggctcgatcgcgatccgcggctgcggggctcgatcgtgatccccacgcagagcgtggagaaagcggttgccgagatcgagcgttgcgcacaggacaagcgcttcatccaggtgctgatgctggtgatgggcgacatgccgctcggcaagcgcgtgctgtggccgatctatgaggcggcggagcggctcgaacttccagtcggaatccacgccggttccgcctatcacaatccgccgaccgcggtgggctggggatcctaccacatcgaggattatgtcggtcaggcccaggccttccaggcccagctcacgagcctgatcgtcgagggcgtgttcgccaaatatccgcggctgaaaatggtgatgctggaatcgggcgtctcctggatcgcgccttatctctggcgtctgcacaagttctggcgcggggtgcggatggagacgccctgggtcgatcgcgcgccgctggagattgtgcgcagcaacatccgcttctcgttacagccatttgatgcgccgccggaacctgagacattaattcgcctgtttgagcatatgcagtcggacgaattggtcttattctccaccgactatccgcactggcagttcgatgaccaggacgcgctgcccgaaggtctgtcccccgatctcgtgcgcaagatcatgatcgacaatccgcatgcaacctatccccgcctgacgtgagcccgctgccaaaggaggcaaggcgatgaatattcagttccgcgagagccaagaagctgaatcccccctgaccgtcaaacccgcaatcgcggactgtgacatccacccggcacgcgccagccgcaccgagctctatccctacctcgccaaacgctggcagcatcacctcgaagtctacggcgtccatgcctatcagggcatgatggagggcccgccctatccgaaggcgcagcccaacgcgtcgcgccgcgatgcctggccgccggaaggcgggccgcagggctcctcgctgtccttcatgcagaagcagctgctcgatcccaacaatgtgcagctcggcgtgctcaatccgctcaacaccgggcagggcatccgcaatcacgagctctcggcggccttatgctcggcgatcaacgactggcagatcgacaaatggacctccaaggacaagcggctgaaagcgtcaatcgtcgtcggcaatgaggacgggctctcggccgccgctgagatccgcgagcgcgccggggacaagaatttcgtgcaggtgctgctgctcagccgcaatgtcgagccgctcggccagcgccgctactggccgatctatcaggcagcggaagaggccggccttcccgtcggcgtccacgccttcggcttcggcggcaacccgatcacgccgtcgggctggccgtcctactacatcgaggagatggtcggacactcgcagtgccagcaatcggcgctggccagtcttgtcctggagggcgtgttcgagcgcttcccgaagctgaagatggtgatgatcgaggccggcttcggctgggcgccgtcgctctgctggcggctcgacaaggtctggcagcggctgcgcagcgaggtgccgcatgtgaagcggccgccgtcggaatatatccgggagcaggtgtggtggaccacgcagccgatggaggatccggagcgacgcgaggacctgttcgacgtgatcaaatggatcggctgggaccggctcctgttcgccaccgactatccgcattgggactatgacgaaccgtctcgcgtcttgccggcgggcgtcagcgaaactaatcgcgaggcgttctacctcggcaacgcgaagaagctttacggcgtttcctgatggcaagacacgtcatcgcgccggtcgacgagcttccgccgggcacgcgaaagtttctggagatcgacgggcggccgatcgcaatcttcaacatcaagggcgagtatttcggcctgatgaaccgctgcccgcatcaaggcgcggcgctgtgcgaaggtccgctgatcgggctggcgcagtcgagcaatcccggcgagatcgaatacaccaagttgggtgagatcatccgctgcccctggcacggctgggagttcgacatccgcaccggccagtcctattgcgatccccgccgcttccgcgtgaaggcctatccggcccatgtcgagccgggcgcgagcgtggtgaaggggccttacatcgctgagacgattccggtgagtgtcgagagcgactacgtggtggtcgagctgtagggcaaccgcgtcgtccttcgggctcgtctcttcgaggcgccccccggaatgacatcccggcggggcaagccgctgctttttcaggccttattttgcgttgcagcgaggagccattgcctgaaggcggcaagcttcggcgcctcgcggcgcccctccggtgcgaccaggtagaacccggcatcggccggcagtgcgatcttgaaggggacaacgaggcgccccttggcgatgtcgtcctggacgtaggacgtccgtcccatggcgacgccgatgccgtcgatcgcggcctggatcgtcatgaagatcatgtcgaaggtgatgccgggctgtcttgcgatgtccgagggcaggcccgccgcagtcagccacagccgccaatcgtcgctgttcgcgttcgaggtgtgcagcagtgcgtggttgcgcagatcctccggccggcgcagcggcttgtcgccgcgcagcagtgacgggctgcacaccggaaacagctcgtccgccatcagccagtcggcgcgcaggcccgcccactggccgcggccatagcggatcgcggcatcgacgttgtcgcgctggaagtcgaccaggctggtcgaggtggtgatgcgcacgtcgatgccggggtgctgctcctggaaatcggcgagtcgcggcagcagccattttgccgcgagcgaggccagcgtcgacaccgtcagcaccttgtcgtcgtccctgcgcagcaggcgatcggtggcgaggcgcaggtcgttgaaggcggcgcggacgcccggcaggtagtcgcgcgcctccggcgtcagcgccagtgcgcggttctgccggacgaacaggcgaatgccgagctcctcttccaggcgccggatctgatggctgatcgcggtctgggtcacgttgagctcgctggccgccagcgtgaagctgagatggcgcgcggcggcctcgaacgcccgcaatccgttcaaagagggcaatctggcagtcatccggcagcatgatgcatgacgttatttcatgcgaaaaggtgcaaattgtcgtttgtcgcggtgcagcaggaggcagatatcggcggtcaggttagctcaaggagctgagaatgtctattctgacccagaattcgatgacaaatcatcatgcggccggcctgctccagcagatcggcgagatcctccacgtctggcacgagcgctatcgcacccgccgcgagctcaccaactggaccgcgcgcgatctccacgacgtcgggctgtcctggtccgacatcgcctacgaggccgacaaacccttctggcgggcctgataggccaccaggccggcgccgcctgagcacaggggcgccggcggtccccctccggatggacgtgtcatgagcacccttcgcctcgaagacctccagcaatattccgagactctgcgcacccggctcggcgaggtgatgaatgtccgcttcgtcgagcctcgcgatagggacgagatccagcattatttccgctcgctctcgacccgctcgcgctacaaccgcttcttcggtgcgatcagcgaactgccgaagggcctgctgcaggagttcctcgaggtcggcgagcgcgatcgtttcacgatcgttgcgacaatgatggtcgacggcttcgacactatcgtcgctgaagcgcgctatgccttgaatgtcgggaccgcgacgctcgagttcggcctctcggtcgacgaccgctggcaaggccacggcatcgccaccgcgttgatgaacaacctcgaatgccgcgctgcagcacttcgcgccgaacacatgttcggcgacacgctgcgttccaacgaggccatggtctcgctcgcgcgcaaatcgggctttggtttcgtcaaccatcccgacgactggaagctcgtgcgcttcgagaaggagatcagcgtctcgccggaagacattccgtgcgcgaactggcgtctcgctgctctttcccgtcaggccgacagcccctcagcctcggcctgacatgactgcggcccggcctggtcatcccagagccgggccttttttgccttcgtggtctctctctccagcgtcattccgggctcgatgctgcgcattgccctggaatgacgggctacttccccgtgaacaccgccttgcgcttctcgatgaaggcctgaaccgcctccttgtgatcggccgtcgtggtgaggcggaccagccgttcggcttcgtggtcgcgcgccgtttcgaaatcgaacagcagggcctcgtcgagattgtccttcatgtagcgcagggccaggcgcgggccttcggccagcgacttggcgagcgcgaaggcttcggtctgcaatttgtcgtcgggcacgacgcggttgacgaggccgatcgcttcggcgcgcgcggcatcgacgcgatcacccgtgaacatcagttcgcgtgcccgcgcggtgccgacgaggcgggtgagcagccaggcgatgccgtaatctccggagagcgcgatgcgggcatagccggtcgcaacgaaggcagatagcgcggcaatgcggatgtcgcaggccatggcgatggcgagcccggcgccgaccgcgggcccgggcagggcggcgatggtcggcttgcgcaccgacaccagcgcgccggtcagcagccgttgtcgctcctggagatcggcgaccctgtcgtcgaaggacatgtcgagctttgccttgtcgcgatgcgcgcccatgcccttgacgttgccgccggcgcagaaggcctcgcccgcgccggtgagcagcagggcgccgacagcgggattctcgccgcaggcccggatcatcgtgcgcagcgcgggcgtcagcgcatccgaaagcgagttgcgcgcctccggccggttcagcgtgatgatggcgacgcggtcgcggatgacgcagaggagctcgtgggtaccggtgtcgatggtggtttccgtggtcatggcttctcccttccttcgtcattgcgtgccaacgggtccgcgcgaagcgcggcccgannnnnnnnnnacaatccagaatcttccgtggggacagtccggattgcctcgtcgcttcgctcctcgcaatgacggatgttgttggctcggttcaaaacttctccacccagggtcgcagctccagctcccagctccaggcgctgcgcggctgctgcaacacattccagtagctctgcgcgatcgcgtcgggatcaagcatcgaatccggcttgtccgccggttcgcttcgcgcggcactcctgatgccgccgtcgacgacgaaatgcgcgacatggatgcctagcggcgacaattcgcgcgccatgctctgcgcgagcccccgcagcgcgaacttgcccatcgcgaacggggccgactgcgcataccccttgacgctggccgaagccccggtgaacaggatcgcgccatgcttgttcggcagcatgcgcttggctgcctgctgagcaaccaggaagccgccataggcgctgaccgcaatcgcctgcgcaacgtcggccggaatgaggtcgacgagcggcccgcgcgtgcggccgctggcgttgtagacgacgaggtccggcgttccgatctcgcgctcgacgagcccgaacagccgctcgacctcctcgggatcggtggcgttgcaggcataggctttcgcgccggtctcggcgcagagcgcgcccagcttctcgatcttgcgcgcagcaagggcgacgcgaatgttctgggctgagagcagcctcgccagcgacgcgctcaggccttcgccgacgccgacgatgagggcgatcttgtatgttgggtgttccatggcgcgatctctcggaaaggggagccgttgatctaggcatggtcggtgcggacaaccagccgaagcgttgggccgcgcgatcacagttccgcagagcgaattgctcctccgcggcgatcatgccgccctgacaatttgcggctttatcgctatccgcgcctggagcatgatcgacatcatcgagcgcggcaagccctaagaattgccgtcggacggaaacgaagaggacgatcatgcacaagccggtcacagcgcagccacaagatatcgcggccgcaccatccggcctgctggcgcccgatacgtcaggcatgaatttctaccgtgccgatccggcgctgacggacctgctccgcatccatctaccggaccatctgttccgccacatcgagccgcatctcgatcgtctcggcgagctcgccggcggccggctcgacgaatgcgcgcggcttgccgaccggcacacgcccattctgcaccagcgcgacaagttcggccgcgacgtgcagtggatcgaataccatccggcctatcgtgagctggagaacgccgcgttcggcgaattcggcatccacgcgctctcgatccgcaagggcatcatgggctggccggacaaatatcccgtggtggccaagcacgccttcaccttcctgttcaaccagaccgaattcggcatgggctgcccgatcaacgtcacggatggctgcgcaaagctgctggcgaacttcggcagcgacgcgctgaaagcgaagtatctggatggtctgacctcgaccgacatgagcaagctgactcagggcggccagttcatgaccgagaaggagggcggctccgacgtcggcacgctgaccacgcgcgcggtgcaggagggtgaccattggcgcctctatggcgaaaaatggttctgctcgaacgccgatgccaaggtggtgatgctgctcgcgcgccccgaaggggcgggccccggcacgcgcggcgtcggcctgttcctgatgccgcgcttcctcgacgacggcacgcagaaccactaccggatcgtgcgcctcaaggacaagctcggcacgcgctcgatggcatctggtgagatcaagctcgaaggcgccatcgcccatgccgtcggcaagctcgaccgcggcttcgtgcagatggcggagatggtgaactcgtcccgcctctccaacggcgtcaaatccgccgcgctgatgcgccgcgcctatcatgacgcgatgaccgtggcgaagaaccgcgtggtgttcggtcaacgcatcatcgatctgcccctcgggcgacgacagatgctgaagatcatgctgccggtcgagcaggcgctgtcgatgagcttcttgacggcggatgcgctcgatcgcgccgaagcgggcagtcaggatgcggcggcgctcctgcgcatcctcaccccgacgctgaaattccgcgccacgcgcgatgcgcgaaaggtctgcggcgatgcgctcgagatgcgcggcggcatcggctatatcgaggagttcgccaccgcccgcctgctgcgcgatgcccatcttgggtcggtctgggaaggcaccggcaacatcgtcgcgatcgacgcgctccgtcgcgcggtcggccgtcatggagcggaatctgcgctatcagctgatcttcatgcccggctcgatgacagtccgtccgtgccgcaggcctggcgcgacaggctgcgcggcctggtcgatcgtgccgtgggttttgcgcgcgaggtcgccggaaaggccgagaacgaggcggatgcgcgtcgcgccacgagcgtcctctatcacgtcgccagcgccgtggcattcgcctgggaggcgcatcgcatccacgccatgcgcggcgacgcgcgccgcttgctgctgtcacgcctcgtgatcgatcatcgcgtgctgccgagcgatccgttccggctggcggaaaataccgcgcaagcgcagattgccgcgctgctgcttggcgacagcgcggccggcatgagcgaggttggcgaactggttctggcggcgtaggctgcgctccacgtcaaaccataaaagcgcgatagggagtgctcgatgaaggccgccgtcctctacgaagtcaaccagccgctcgtcatcgaggacatcagcctgccgaagcccggcccgcgcgaggtgttgatccgcaccgcggtcgccgggctctgtcactccgacctgcatttcatggaagggctgtatccgcacccgctgcctgcggtgctcggtcatgagtcggctggcgttgtcgagcaggtcggctcggatgtgacttacgtgaagccgggcgatcacgtcgtcacttgcctctccgtgttctgcggcacctgcgacaattgtacaacgggccgcaccgtgctctgcaccgacaccacggtgaagatgctgccgggcgcctccaaccggatgcagtggtcgaagcccgagaagctgcaccagttcctcaatctctcgtccttcgccgagcagatgctcgtgcacgagaacgccatcgtcaagattcgcaaggagatgccgctcgatctcgccgcgttgatcggctgcggcgtcatcaccgggtacggcgcggtggtgaacacggcgaaggtgacggccggcgagaccgtggcggtgatcggctgcggcggcgtcggcatggccgcgatcaacggcgcgcagatcgccggcgccggccgcatcatcgccatcgacaccaatccggccaagctgcagctcgcgaccaagctgggcgccaccgacatcatcaatccggccgacggtgacgtcgtgaagcaggtgcgcgatctcaccaatggcggcgtgcatcattccttcgaggtgctcggccgcaaggagaccgccgagcaggctttcgcgatgctcgcttccggcggcaccgccaccatcgtcggcatgatcccgttcggtcagaagatcgagctgcacggcttcgacttcctgcgcgagcgcaggatccagggctcctcgatgggctccaatcatttccgcgtcgacatgccgcgcctggtcgatttctacctgcgcggacgactgcacctggaagactggatctcggcgaaattgaagctgtccgagatcaacgagggctttgccaacatgaaagccggcaagacgctgcgcagcgtgatcgtgttcgacaactgaggcatgatcgccgtcatcgcccgcgaaggcggcgattcgcattgcgaggagcgcgcagcgacgaagcaatccaggctcattctgcggatgtatttctgggttgcttcgctgcgctcgcaatggcgaagaccgctaatcatcgaacatcctcggcggcttgaacccgccgaattcgcgctcgatcagctctgcgagcttcagtggcgtacggtcctccagccaggggccgacgatctgaacgccgaccggcaggccgtcgggcgcaaagccggtcgggatcgcggtcgagggtagaccgggcagggtcgcgatgcccggccaggcgagctggtcggtgtagacatgcgccgtgccgtcgatgctgatgcggcgctgctcctggtccggcgcatggtcgtgcggaaaggccggcgtcggcatcaccgggcagatcaccgcatcaaagctcttgaacagctcgcgccattgcgcgcgcaaccgcgtgcgcccgccgtttgcggcctgccagtcgcgatggctgagcgcgatgccgcgcaaccgctcggcggcgagactgttgtcgctctccggcagcgcggctgcggccgccctggcgccggcatagatgtcgggtgcgaaggtcgcgcccaggaacgacatcagcatgcgcatatagagccgagacgacgcggcaaaatccggcagcagcgggctgctgcgcccgatcttcacgcctgccttggcgagcttgtctgcgagcgcgttgatgctgccgcgtaccacggcgtcggtcggcatcaccggatcggtgtcgatcaccagaacgcggaaatccctgaatgcggtgtgcctggctggcggcagttcgagacggtaggcgatgccggcatcgagcggatcgggtcccgccatcacgtcgagcacgagcgagagatcgaccgcgctgcgcgccatcgggccgatcacggagaggtcgcgctcgaacggcagaggcggcagtggcggcggcgtgtggccgcgcatcgcaacgaggttgaaggtcggcttgtgggcgtagatgccgcaatgaaaggccgggacgcgcagcgagccgccaatgtccgagccgatcgacagcggaccgtagcctgcggcgagggctgccgacgagccgccggaggagccgcccggcgtacgaccgagatcgtaggggttgttggtggtgccgtagatgtcgttgtagctctgccagtcgccgagcccgagcggcacgttggtcttgccgatcacgatcgagccggcgtccttcacccgcgtgaccggcagcgcgtcctccttggcgatgaagtccttttgcgcgggaatgccccaggtcgtcggcaggccggcgacgttgtaggattccttcaccgtcatgggcaggccgagcagcggcttgcgctcgccgcgcgccagcgccgcgtccgccgcgcgtgctgcctcaagcgcgcgatcgaaatcgcgcacgcagatcgcgttgatcctgccgtcgtgccgttcgatgcgctcgatcgcatcccgtgtgagctcgaccgccgagaccttctttgcggtcagtgcagcagacagctcgaccgcgctcttgaaactccattccgatttggccacgccgcatctccctttctttgtcgaaggatgatgcgcagtctggccgaatgccgcaaccgacgtttgatcgcgcttgccatgcgacggactgcagaagctacgccgccccgatcacgatgcccaccgccagcacgatggcgccgccgagcacgatctggaacacggcctggaggaacggcgtgtccatgtagcgcgagcggatgaaggcgatcgcccacaattcgaagaacacgacgacgcaggcgattgccgtcgcgatccagaacgcgttggcccagctgtcgggcaccagatagggcgcggtgtggccgaggccgccgagcgtcgtcatcgcgccgcaggtgatgccgcgcagccagggcgagcctcgtcccgtgagcgaaccgtcatcggatagcgcttctgcaaagcccatgctgatgccagcgccgatcgaagcggcgaggccgaccaggaaggtctgccagttctggtgcgtggcgaaggcggccgcgaacagcggcgccagtgtcgaaaccgatccgtccatcaggccggcgaggcccggttgcacatattgcagcacgaacatgcgccgccgcgtccggtcctcctcggcgcgcacgtcgggcttgaggatctcgtcggtcagcctggctgcggtatgctcgtggttcttctcggcttcggcgagatcgccgagcagccggcgcacgttgacatcctcggcctgctcggccgccttggcgtagaagcgctcggcctcgagctccatggtctcgacttccttccggatcgtgtcgagcggcaggttcttggtcagccagatcgggcggcggcgcaggaagcccttgacgtcctctcgccggatcggcggcagatgctggccgaagcgctgctcgtacaattccagcagcatgtgacgatggccgcgctcctcctcggccatctgctcgaacagtttcgccgagtccgggtagcgctccttcagatcctcggcgaaggtcatgtagatgcggctgtcctcctcctcggaggagattgcgaccgcgagcacctcgcgctcggtgagatcggcaaaagtcttcacggcgggcctgttctcaatttagaatggttctaaattatacaggtcgcgggcgttcccggtcaaatcaggccgtgccggccctggcgaggaaatcgagcagcagccggctcacctcggccggctgctcctgctgcacccagtgtccggcgccgtcgacgagatggcagccgagcatctttgtgcaggcgcgcgcctgcatcgtttcgaacacgcccggacgctgataagtgccccaatcctgcttgcctgcgatgaagcaggagggcacgtcgatgctgcgccccgcgaacaattgcatctcgttgttcagcgtccccgacgtgccgtagcgataccattgcagcccgccctggaatccggtgcggcaatactcggcgctgtaataggcaagctcgccctcaggcagccattggttggcggcgatcgcggccggcgacggcatctccttcgcaaccgtctccgccatcgtctccttctggtccatgacgtaataagtcggcagcttcgccagctcctgcgccgaccacgattgcagcggatacggcttgttgtcggcccagtccgcgctcttgtgatgataataggcacggaggaaatcatgcacgccttgcggcgcctgctgcatgtcggcattggcctcgcgtgtcgaatagtaccattggtagtgtttgcgcggccgcggtagcgccgcgaggtcgcgatgcacggggtcttcgatcgcaggcgtggccggcgcatcgactgtgccaaacggcagcggcggcgggcccccgaacggcgcgctcatcatcgtcaccgaacgaaacacgtccggcctgatcagcgcacaccacgccgcgaccgggctgccgaaatcgtgcccaaccacatcgacctgtcggtaaccgaaggccgacaccagggcgaccgcatcgcgcacgaggttgaggagcgagaacggcgcgagatcgccgtcgtaatccgcactccatccggtcgtccggccatagccgcgctggtccggcgcgatcacgtggtagccggccgcagctagcgccggcatcaccttgcgccaggagaaggcaagctcgggaaagccgtgcagcaggaggacgcaaggtcggcccttggtctcgaagccggcctccaacacatgtacgcgcaggccgttgatgccgtcgacataacgcgagcggatgccggcgggcaggggaatgtcggggagtgcggtcatcgtttcctccgtgaggccgtctcttaccctgccctggagggggagggtcgatcgcgcgaagcgcgagcggggtggggtgatctctcaacacggggagcgtctaacgcggatagaccaccaccccaccccggttctcattccgcttcgctgaatgcgaactgatcgtccccctccaggggaggatgggagttcgcggcgcgagccgcgctggattacaccgcagcgcagacgaacccgttgcccttgcgcctgatctttcccaccgacggtgacggaaaatgcgcggtgcagcacagcgtgtcggtgtcgcaatagcgctccaggaagctgcggcgcgtcttcgccgccgcggccggatcgacgtcgaacttgatcgacagctccggatggagcgtctgcagcggtgagtgcatgaggtcgccggaaaacaccgcatcgtccttgctgcggcccatcgtgatggcgatatggcccggcgtgtggccgggcgtcggcaggatgcgcacgtggtcgccgatctggtgatcgttgccgacgagctcgtggcgccctgcctcgaccaccggcaatacgctgtcgacgaagggcgggatctccgtcttcgcgttctgcgccgaccagtgatcgaattcctgtctggcgaagacgtagcgcgccttggggaaggtcggcacccagcggccgttcagcagccgcgtgttccagccgacgtggtcgacatgcagatgcgtgcacatcacgaagtcgatgtcgtcgactgtgaagccggcggcgccgagcgcacgcagataggcgtcgtcggtcttcatgttccatttcggccgctgcggccgcggcttgtcgttgccgatgcagctgtcgatcaggatggtgtggtgcggagtcttcacgacgtaggactggaagcagagcagcagcacatcctgctcgtccagcgcccttgcctcgcgcatccagccccggttctcggccagcacttccgctgtcaatcccggcagcatctccagcgccgggacgaacgatgtttcctgctcgatgacgcgatggatggtgagatcgccgaccgaaaacttgaggctcatgagaactccgcgggttatgccgccggcgggaccgagatcttaacggaaggccgctccagcatcttctggtggaaggcatcgagcttcggataggccttgcgccagccgcaatcggcgaagcggaagtcggcatagccgagcacgcaaacgaggccgatctgcgagatgtcgaacgggccgttcagcacctccggcatgttctcgaaacgcgccatgccggtccaggccctgttccaatggtcgtccgaccaggcctgccattgcaggccttgcgggcgcaccatcttctcgtagcggcacagcagcatggaatcgagcatgccgttgatcagggagtggttggtcttcgccttccagcgccgcgggccgtaatccgggatcaggctgccgccggccatctcgttgagatattcgacgatgacgtaggaatccaggatgacgtccccgtcgttggtgatcagcaccggcagcttcttcagcggcgtgatgcgcgaatagtcctcgttggcggtgcccggcgtgaccgccgcgggcacgaactcgatcttgtcgatcaacccgagctcgatcgcggcaatgcgcaccttgcgggcgaagggtgaggcgggggagaaggtgagcttcatggagagtatcccacaattgaacgttttgcttcgtcattgcgaggagcgaagcgacgaagcaatccagagtgtcgccgcagagggattctggatcgcttcgcttcgctcgcaatgacgtggagagggccggagcgccctaagccgcgatgatctcctggcgctgctcgccgagcccttcgatgccgagcgtgacgacgtcgccgacattgaggaaggtcggcggcttcatgccgaggccgacgccgggcggggtgccggtggtgacgatgtcgccgggcaagagcgtcatgaactgcgagacataggagatgcacttggccatggagaagatcatggtcttggtcgagccggtctggcggcgctggccgttgacgtcgagccacatcgacaggttctgcacgtccttgatctcgtccttggtcgcgagccacggcccgagcgggccgaacgtgtcgtgcgacttgcccttggtccactggccgaggcgctcgatctggaaggcgcgctcggagacgtcattgcagacgcagtagccggcgacatggttgagtgcgtcggcttccgagacgtatttcgcacgggtgccgatgatcgctgcgatctcgacctcccagtcgagcttggtggagccgcgcggcttttcgaccggatcgttcgggcccgacagcgaagtgttggccttcatgaagatgatcggctcgctcggaatctcggcgccggtctccttggcatggtcgctgtagttgagaccgatcgcaacgaatttcgagattccggtgacgggcgcgccgaaccgcggcttgccggacacggcgggcagcgaggcgggatcgagcgccgccagcttcttcagcgattccggcgaataggcctcgccggtgaggtccttcacatgcgccgacaggtcgcgcaattggccggatttgtcgatcaggccgggcttttccgcacccttctcgccgtaacgaacaagcttcattctcgtttctccctggaaattggaccgatcggttaacagcttcatggaacagggcggccggaaattcaaccgttcagaacagggatcaccccagcgccacgaacctgaacgcctcgccctcgcgcctgatgtgtccagccgaaaagtgcccgccgatcaccagcgtcggcgtatccgcaaagcggccgaatagggccgccctcgtcgcggcggattgcgcctggtcggaatcggcggtcgaggaccagtcgagatgcgccatctggcagggatggtgcgcaacgtcgccggtgagcagggcctgctcgccgtccgactggatcagaatgctcatatggccggggctgtggcccgcggtcgggatcatgctgatctcgtcgcagagccggtgatcgcttgagaccagatcggccttgccggcatcgacgatcggctgcacggaatcggcgaacacggcctgcttgtcgggctcggtcgaatggtcgcgccaatgttcgtattcgctcttgccgaagacgtagcgcgccttcgggaaggtcggcacccatttgccgccggacagcttcgtattccagccgacgtgatcgacatgaagatgcgtgcacaatacggtgtcgatgctgtcgggcggaaagcccgccaccgtcatcgtctccagaaacggcgtgctgcggttgttccaggtcgggacgttgcggccctgcttgtcgttgccaaggccggtatcgaccacgatccgcttgccgggcgtctccaccaccagcgaatggatcgacattttcaaccggccttcttcggtggcgaaatgcggggtcagccagggcagcttgcagatttcctcattggtcgcgagcggcaggatgaagcgggtcgagccgaccgtctccaattccaccactttggtgattttgaccctgcccaccttccactgcatccgctatcctcccttcttgctgttatggtgccggaacatgcggttttccgccaccaagcgcaatggatcatctgacgcgatgcggcgttatcgcgggaaccgaggaagacgccgaagagagagccatgcccgaactgacgatttccgctgagaaggtcgccttcatcatcgagaaggcgcgcgaattcgacgtcaaggagggggagtccgatccggattccggctcgaacccgagcgatgacgatgcgctcgatgttctcgaggatgatggctccgaccctgtggtcaacgagcttggaagcttcatgatcgccttgaacgaggacgagcaggttgatctcgtcgcgctgacctggcttggtcgcggcgacggcacgatcgatgattgggacgatctgcgggcccgcgccgtcgaggcgcggggtgagtatcgcagcccgcgacgtgaaacggtgcactatctgctcggcgatcccatgctgggcgacctgctcgccaacgggctcgaggagttcggcatcgactggaccggcgagcgcaccacggccgattcgtccggtcccagccagcaggacgaagacgagccgaccaagcagcggtgatgctggacgcgtgctctctccccgcaggggagagagcaggggcaggtcagagcgtccccgggaacgcaccaccatccagcaggatgttctgcccggtgatgaagccggccttggcgccgcacaggaaggcgcaggcatagccgaactcgtcgggctggccgaagcggccggccgggttgagcttggcgcgctcggccaggatctgctgcggcgtgacgccgcgcttgtcggcttcgccctttgcggtggtggtgaggcgatcggtctcgaacgggcccggcagcaggccgttgatggtgacgttgttgatcaccgtcttgcgcgacaggccggcgatgaagccggtgaggccggcgcgcgcgccgttggagaggccgaggatgtcgatcggcgccttcaccgccgccgaggtgatgttgacgatgcggccgaacttgcgatccatcatgccgtccacagtcgatttgatcagttcgatgggagtgagcatgttggcgtcgatcgccttgatccagtcgtcgcgggtccagttgcggaaatcgccgggcggcgggccgccggcattgttgatcaggatatccggctcggggcaggccttcagcaccgcctcgcgtccggccggcgtcgtgatgtcgccgacgatctcggtgaccgtcacctcgggataggctttgcggatctcatcggccgttttcttcagcgcttcggcgcctcgcgccgtcagcgtgacatgaacgccggcctccgccagcgagaaggcgcaggcgcgcccgaggcctttgctggatgcgcagacgatggcgcggcgacccttgatcccaagatccactgtttcactccgtgatgtcaggcagttttggacggcggccaccttagccaactgtggcgccgctgataagggagacgatcgcgccaaaatgcatgcgcctcgccgctgcgatgcatatgcattccatcagatgcgccgctcctgcttgagccggtcgatcgcagcggcggcctccggcggcagcgacttgaagcccatctgaccggcggccgaaaacatcggccgcagatgcgagcccgcgagaaacggcggctggcggttggccggcacgatctggtcgaacaccagcaccagcgtggtggcgacgaggcccaccctgatggcgccgagcgcggcgccgccgagccggtcgccgatcccggcctcaccgatggtgtcgttcagcgcgacgcggccgatatggccgaacagcatgccgacgatcacgaagatgccgaagaaccagatccagttctgaagcatcggcgagttcggattgcctgcaatctgcggcgcgatcagcggcatcagcgccacggcgatcggcgcggcgatgagataggcgaggatggtcatggcgctgcgcagcaggccggtcctgaagccgaatccgaccgcgacggcgagcgcggcatagacggcaagatcgaaactgttcatgggcacaaccctgccacgatggaacgatgaacgccaagccgatcattccggtttcggatcgttaaaatcgtctgtattgatggcggaaagcctagaggttaccgccaatgtcagacttgttcgacgtcagtcaagaaaccatcctcgtcacgggcgcgagccaggggctgggccggcaatttgcccgggtgctcgcggcgcatggcgccgccgtcgcgctcgccgcccggcagaccgagaagctgaagagcctggaggaggagatccgcggcaagggcggccgtgccgttgcggtcgcgctcgacgtcaccgacacgggctcgatcgccaaggctgtcgatgccgtcgaagctgcgctcgggcccgtcaccgtgctgatcaacaatgccggcatcgccatcgagaagctcgcgaccgagcagaccgaggcggactgggacgcggtgatcggcgccaacctcaagggcgcctatttcctcgcgacggaagtcgcccgccgcatgatcgcgcgcaagcagcccggcaacatcgtcaacatcgcctcggtgctcggcaccggcgtgctcaaggcggtctcgccctacgcgatctccaaggccggcatcatccaggcgaccaaagcgatggcgctggagcttgcgggccagaacatccgcatcaacgcgcttgcgcccggctacatcgacaccgaaatgaaccatgcgttctggtcgacgccggccggcgagcgcctcgccaaacgcatcccccagcgccgggtcggtgccgagtccgatctcgacggcgcgatcctgctgctggcgtcacgggcgtcgcggtacatgacagggagtgtggtgacggtggacggcggattcctgctgaattgagcgcacttcgcctcccggcctggggaaaaggtcggaatttgcgacagagttcccgaaagggactctccgcgaggcgagatcgttggcactcgcacggtacccatccgcaccgtcattgcgagcgcagcgaagcaatctggagtctttccgcgggaggattctggattgcttcgcggagcctgtcatcgggccgcgcttcgcgcggacccgttggctcgcaatggcgcaagagaggaagctatcgcatctcctcccggatcatgtccgccgccttctccccgatcatgatcgtcggcgcgttggtgttgccgccgatcaacgtcggcatgatcgaggcgtcgacgacgcgcaatccctccaccccgcgcaccttcagcgccggatcgaccacagccatcgcgtccgcccccatcctgcaggtgccgacggggtgatagacggtgtcgacgcgcgcgcgcaggatggcgcggatatcgtcgtcggttctcacgtcggacgtgaacatgtccttcttctgcagtgcgcgcagcgcaggcgtctccatcagccgtcgcgtcgtcttgaagcctgcgaccatcgcctcgacatcctcttcctcgccgaggaaattcggatcgatcatgggcgctgcgagcggatctgcgctcttcagccatacgctgccgcggctcttcggcctgagcaggcagacatggcaggagaagcccgcctccttgtgcttcttgcggccgtggtcgtcgagcatggcgatgacgaagtgaagttgaatgtcgggtatgtcgaggtcgggccgggtcttcaggaagccgccgcattcggcgaaattggtggtcatcaagccgcgccgttcacggcgatatcgctggattgcgcgcagcagggacggcagccgtccgagcgaggcgtgaacgaagtggggatagtcggaggcgtagacgaatacgaaatctggatggtcctgcagattgcgcccgacacccggcagatgatgcacgaggccaatgccgtgcgctcgaagcgcatcgccgtcgccgacgcccgacaacatcagcaattgcggtgactggaaggcgccggcggcgaggatcacctcgcggcgggcgcgcaactgctttgtctgcttgccctgcagatattcgactccgaccgcgcggctgccttcgaacaggatcttcgtggcgtgcgcgcccgtctcgacgcgcagatttgtgcgcttggcaacgtggggatcaagataagcgcgcgccgcgctccagcgctcgccattgtgctgggttacctggtagctgccgagcccttcgtggtcctcggcattgaagtcctcgcggatgcggaactgcgcctcgcgcgccgcctgatggaagacgtcatggatcggattgtccgagcgcagcttgttgacatgcagcgggccgcccttgccgtgatattcgccgtcgaaatcggcgttgttctcagagcgcttgaagtaaggcagcacgtccgcatacgaccagccggcgttgccgagcgcggcccaatggtcgtagtcccatttgttgccgcggatgtagaccatcgcgttgaccgccgatgagccgccgaggcccttgccgcgcggttggtagccgatacggccgttcaatcccttctgcggcacagtgtcgaaggcccagttggccgcgctgtatggcaaggcgagcccgaatggcgtggtgatccgccatgtgtcgttgcgtccgcccgcatcgagcagcgccacggatgtcccagcatcctccgacagccgccccgcaaccgtgcagccgccggagcccgcgcccacgacgacgaaatcgaatgtgtcagtcaatgttgtttcccccgttacgtcattccggggcgatgcggagcatcgaacccggaatctcgaggttccgggttcgctccgcgccccggaacgactcctcccctacgacataaaccgcatcaacttctccagccctgcgatcttgccgccgtagggcggatagagatcggcgaggcggttgaacttggagcgatagaacaccggcttcagcttgctaaaggtcttgaagccccattcgccgtgataggcgccggtgccggacgcgccgacgccgcccatcggctggttcacttgcgtgaaatggaacaggcaatcgttgatcgtgacgccgccggagacggtacgcgccagcacctcgtcccgcgcgcttgcgtccttgccgaaccagtacagcgccagcgggcggtcgcggcggttgacgaaggcgatcgcctcggccggatcgcgcgcgccgagcaccggcagcaccgggccgaagatctcctcctgcatcaccgccatcgcttcggtcgcaccgatgatcagcgtcggcgggaatttgcggtgggccttccagttgggatcgtcaggtttcgccggctgcaggattttcgcaccacgctgcgccgcgtccgcaacgaggccttcgagccgcgtgtaatgcctatcggagatgatggaggtgtagtccttgttggcgggatcggcgccgaacatgcgccgcatctgcgcgcggaccttctcggcgaaggcctgcacggagctctcaggcaccagcacgtagtccggcgcgatgcaggtctgcccggcattgagcagcttgccgtaggcgatgcgctcggccgcctcgtcgagatcggccgaggcgtcgatgatcgccggcgacttgccgccgagctcgagcgtgacgggcgtgagattgcgccccgcggcctccgcgaccaggcgcccgacccgggtcgagccggtgaacacgaggtggtcgaacggcaggcttgcgaaagcctttgcgatctcgtcctcgatgccggtcaccagcagctccgtcgcgtcgaaccgtcgcgcgaccgtctccttcagcagcgccgagaaatggggcacaagctcgctcggcttgatcatgacgcggttgccggcggcaatggcgccgatcgcgggcgcgagcgtcagctgcagcgggtaattccagggcgcgatgatgccgaccacaccgagcggctgcggcatcagccggttgcgcgcgggcaggaactgcagcgcggtcgcgacgcgctgcggcgtcatccaggctttcaggtgctttgtggcatgccggatctccgagaacaccagcatggtctcggcgatggtggtctcgaccgcgcagcggtggccgaaatcggccgagatcgcctgccggaagcgctcctcgttgtcggcaacgaccgcgcgcagccgcgccagccggtcgagtcgttcggcgaggcccggcgccggctcgtctcgcgaccgcgcgaccatggtgtggaaggcctcttcgagggcccgtagcggggcgctcgtcagggatttgtccacggcgttcctcctggaatggcgttttcagccttaatcttgttgccgcaggctggccgtttgtggaacttctggcaagagcgcgcggaacagaccggaattgtctccattcgcgtgtcataaactcgaaaaaaacgttcccgcagccctttccaaaggcacctcgccttgatacatacgcctcgcaaccgacgggctttgccccgggattgccttccaaggaagcctttgggacggaccaaccaagccacgcgaacagcgccggcctcaattgaccgtctccggacttttttattgaaggcgtgcaaatgtttaacgcggggtggagcagcccggtagctcgtcaggctcataacctgaaggtcataggttcaaatcctatccccgcaaccaaattcggattttaccggatccgagacgaaaatggcccgcttgatgcgggccatttttgttttggggacagcacgtttgttttggggacagcacgcggggctggaggagcgatgcctgctcgcttgcccgacggctctgacaaatcccgcagccaaaacaacgggatcgctactgtgcatggggttgtttttcgccccttttcgacagggctgatcatctctggcccgtacgccacggctaggtcagaaacgcccggaaccgccgcaacgcgatcacgaagaagacgctgccgatcacggcgagcgcgaggagctgcggccacaccgattccaggcccgcgccgcggaacaggatcgcctgcgccagcatcacgaaatgcgtgttgggcgccgccagcatgatgtcctggacgaattgcggcatgctctcccgcggcgtcatgctgcccgagagcgtctgcagcggcagcagggtcatcatcaggagcagtccgaactgcggcatcgatccggcgacggtggcgaggaagatgcccatgctggtggtcgcaaacagctgcagcgccgcgccgagcaggaacagcgcgaccgagccgtcgatcgccaccgccagccatcccttcaccacgaagacgatcgacaacgcggaggccgccagcaccaccagccccatcgaccacaccttgctgaccatgatctccagcggcgtgaccggcatcaccagcagatgctcgatcgtgccgtgctcgcgctcgcggatcagcgccgcgcccgtcaggatgatcgagagcatggtgatcgaggtaatgagctcgtcgacggcgccgaaccaggatttcttcagctccgggttgaagcgtgcccgcaaggccagctcgatcggcgcggtctgcgcattgcgcgcccgcgccaggaactccgcgatctccgcgttgacgatctgctcgatatagccgccgccgttgaaggcctgcgagatccgcgttgcgtcgatgttgagctgaatcgccggcgacttccgggccaagaggtcgcgctggaactccggcgggatgttcagcgcaaaggtgtcgagccccgcgtccatccgccggtccatttcatattgcgagatcaggcgcggctcggaaaagtacggcggcgtgaatgccagctcgatgcggctcgaaaccggggaacggtcctcgtcgacgatggcgatcgcggcgcggttcagggtttccggcagcgccttggccccggcatagatcgcgagcgtgaaggaatagaagatgaggacgagcagcatggggtcgcgcacgaggccgcgcaattccttgacgccgagctgaaacacgttgtcgaagcgcatggtcaccgggcctgtttcttcagcagcattgcgccggcgatcaccagaatgggcaccatgacggcgagcgccagcagatcgttgtggagcgtgtcgaagccgaggcccttggagaatgtgccgcgcgagatcgtgacgaagtaggtggtgggatagagctgtccgatcgcggctcccaggccctggagcgacgagaccggatcaatcaggccggaatattggatggcgggaatcagcgtgatcaggacggtgccgaacagtgcggcgatctggctgttcatgaaggccgagatcaccagccccatgccggtggttgccgtgacgtagagcagcgcggcgagcgcgtaggtcgaaaagctcccggtgaaggggacgccgaagacggtgagcgcgaagccgaccaggagcaggaaattggcgaatgccagcacgatgtaaggcagctgcgtgccgagcaggaactccagccgcgtcaccggcgtcacgtagaaattgacgatggagcccagctccttctcgcgcaccacggccagcgcggcgagcactgccgggatcaggaccagcagcagcgggatgatgcccggtgccatggcgacgacgctgatgacatcaggattgtagcggtagcgcaactggagttgataggcgccggcgaccgccgcctcgccatagagttcgcggcccttctgcgcgagccacgtagcatgaatcgcctgtgcgtaggaccgcagcgtttcggcccgcgtcgggttggcgccgtcgacccaggcgccgatctcgacatggcggccgcggctgacgtcgcggccaaatcccggcggcaactcgatggcaaggccgatctcgccggcgcgcatgcggcggtcgagatcggcgtagtccgcgatcggagctttctgggtgaaatagcgcgagcccgcgatctgcaggctgtagtcgcggctgatcgctgtgtcgtcgcggtcgagcactgcgaaagtcaggttctcgacgtccatgctgatgccgtagccgagcacgaacagcagcagcacgctgccgaggatcgcgagcgtggcgcggatcgggtcgcgccgcagctcgagcgtctcgcgccgggaataggcgagcatgcgcgtcggattgaaagcagcgttgcggcgccggggcggcgcggcgactgccggcgggggcggcggcggggctgcagcctgctgccccgccggctccgctgtatcggcgatcgccccttccaggcaggcgatgaaggcctgctcaagcgtctcggtgccgtgcgcagccacgattgctgcgggagagtccgacgtcagcaccttgccggcatgcatcagcgagacccggtcgcaacgctcggcctcgttcatgaaatgggtcgagacgaagatggtgacgttgtccttgcgggagagctcggccaggatctgccaaaagcggtcgcgggcgacaggatcgacgccggaggtcggctcgtccaggatgaggatgtcgggcgcatggatcatggcgaccgcgagcgacaatcgctgcctcagtccaagcggcaacgcatcgggcagggcgtctgcgatgtcggcaagatcgaaccgggcgatcatctcgtcgatgcgggcggtgatggtgtccgccggcagctcgaacaggcgcgcatgcagatcgaggttctgcgcgaccgttagctcggaatagagcgagaagccctgcgacatgtagccgatgcgccgccgcaccgacatgtcgccggcatcgatggtcttgccgaacagccgcgcggtgccttcgctgacgggcaagagaccggtcagcatcttcatggtcgtggtcttgccgcagccgttcgagccgaggaagccaaagatctcgcccttcctgatgcgaaagctgacgtcgtcgacggcaacgaagctgttgaagcgccgggtgaggtgatcggcctcgatcgcgatctcatcatgatccgggccgcgcggcggaatcacgacgtcgctatggttgccgcgatccgcttccggcagcagacggatgaaggcctggtcgagcgtatcggcgccggtctgtcgcttcagttcggcgggcgtgccggtcgccagcacgcggccggcattcatcgcgatcaggaaatcaaactgcgcagcctcttccatgtaggcggtcgagacgatcacgctcatgccgggccggctgttgcggatcgcgctgatcaattcccagaactggcgccgcgacagcgggtccactccggtggtcggttcgtccaggatcaaaagctcgggatcgtgaatcagggcgcagcacaggccgaccttctgcttcatgccgccggagagtttttccgccggccggtcggagaagggcgtgagcccggtatcgcgcagcaggccggcaatgcgcctgtgccgctccgccctgccgtgtccgaacaggcggccgaagaagtcgatgttctcgaacaccgacagcgtcggatacaaattcttgccgagaccctgcggcatgtaggcgatctcgggacagacggtgcggcgatgccgcgcgctggccatgtcgccgccaagcacgtggatacggccctcctggatcgcgcgcgcgcccgcgatcagggcgagcaggcttgacttgccgacgccgtcggggccgatgatcccgaccatgcagccggacggcaggtcgagcgtgatggactccagcgcccggctcttgccatagctcaggcccacgccgtccagatgcaccaccctgccggcggcagccggtgcttcggctgcggcagtcgtggtcatcgcgtcagcctgatcttgaggttgtcgggccattgcgcgcccgggtcgagccgcacataggccatgccaggcaggccggtcttcacatgctcgatgtgctggcgcagcaaatcgggggcgatgtgcgccttgatgcggaacatcagcttttggcgttcctcctccgtttcgacggtcttcggcgtgaattgcgcgacgtcggcgacgaaggtagccttggcggggatcacatattgcgggatggcgtcgagcacgagccggacttcggcgccgatcgcgacgcggccggcagcggccgtcggcaggaagaatgtcatatagacgtcgccgagatcgaccatgttgagaacgcggccgccggcggcgagcacctcgccaggctgcgacacgcgatattgcacgcggccgtcgcgcggcgccttcaacacgctgtcgtcgaggtcggcgttgatgctttcgatcgcggcctttgccgcatcgaccgccgcgccggcatcgatcaccatggcgcgggaggaactgatcgccgcttccgatgccgcgacctgggcctgcgcagctgcgagcgccgcctttgccgtggcgtttgctgagcggtcgtcgtccaggacctgctgggacacggcattggacttgatcaactgctcggagcgatcgagcttgcggctcgtggtgtcgagttgggcgatgcgttgatcgaccacggcctccgccgccctgcgttcggcttcgcgctggttcacaaggctcttcgcagtctcgacgttgattgtcgcgcgttgcagctgcgcctcggcctggcggcgctgggcctgcagctgctcggtatccatgcgtgccagaacctggccggcggtgacgaaatcgccttcgttcaccagaatctcgcgaatccgtcccggggtcttcgtggcgatgtcgatctcgactgcctcgatgcggccgttgccgcgagcgaaacccggtggcagcgcgtcggcgtcgcggtgctgccaataatagtaaccgccggccgcgagcaggaaggcgagcacggcgacgacgcgacccggtctgaagttcatctgtcctaacgccgtgcggcggcgcccattgttgaacacgaacgcccggccgctgattgcggcaacgggcgccctcaagatggcagcaaattgtgcgccgcagcttgatgcagatcagaccgaggcgcgaggtgccctgcctctatttcgggcctgcgcttcatcatgtccactcgtccgccctgattgtcgagcggacgagcgattgctgaacagatggtcgtccggctcagccgggtcgtctcacttcaccagcgggcaaccgccgtccttcagcggccggaacgcctggtcggcgggaacttcagcgagcagcttgtagtaatcccacggccccttcgattcctccggtttcttgacctggaacaggaacatgctgtgcaccatgcggccgtcctcgcgcagcacgccgtgttcggtgaaagcgtccttcaccggcagctcgcgcatcttcgccatcaccgtcttggtgtcgcgggtgccggcggcctgcactgccttgaggtaatgcagcgtggcgctgtaggtggcggcctgattcatggtcggcatgcgcttgacgcgttccatgaagcgcttgccgaaggcgcgggtcttgtcgttgaggtcccaataataggcctccgtgacgatcaggccttgcgccagcttgagcccgaggctgtgaacgtcggagatgaacatcacgatcgcggccaggttctgccccccggcgacgatgccgaactcgccggcctgcttgatcgcattgatggtatcgccgccgccgttcgcgaggccgatgatcttggccttggacgcctgggcttgaagcaggaacgaggagaaatcggcggtgttgagcggatgcttgacgctgcccagcaccttgcccccggaggccttcacgacatcgccggtgtcgcgctcgaccgaatggccgaacacgtagtcggcggtcaggaagaaccaggtatcgccgccgttcttgacgatggcgctgccgaccgtgtgcgcgttggcgtaggtgtcgtaggtccagtgcgcggtgtagggcgagcaggatttcccggtgatatcggagctcgccgcatccgtcacgatcatgatcttctcatactgcttcgacagctccatcaccgcgagcgcggtcgccgaggtcggcaggtcgatgatcatgtccacgccttcggtctcccaccacttgcgggcgatggtggaggcgacgtcgggcttgttgagcacgtcggcgctgaccatctcgatcgctttgccgaacatctgaccgccgaagtcctcgatggccattttggtggcttcgacattccccatgccgccgatgtcggaatagacggacgagaagtcggcgagcacgccgatcttgagcggtgcttgctgggcgaaggatgggctgatcgcgaccgctgtgagtgcggccgccaacgcggcccgcataataatccggcacatggcatttcctctaatattatagttggtgcgcgggcccagattgcctcggcgaagtgccaatacttgcgtaacggcgccacgtccccggccgaattgacgcggccgatcgtgccgactacgtttcgcgcaagcatcggaagctctcgattgcaatggccgagccactgctgtcggcggtaaccaggcaaattgcagattcaggggacggaaatgaccggcgacaccgcagccaccatctcgaaagcgcgcgagcattcgatcggcgatctgctgcgccgatcggcgggccgcgagccgaacaagctcgcggtgagctgcggcgatgtgagctggacctttgcggaaatggacgcaatctgcaaccggcttggccgcggcctgctcggcctcggcgtcaagaagggcgaccgcgtcgccgtgctctcgcgcaattcgcatgccttcgcggcgcttcgtttcgcactggcgcggatcggtgcggtactggtgccgatcaacttcatgctcaatccggacgagatcaatttcatcctgaaaagctccggcgccaagctgctcgcgacgggtcccgatttcgtcgagcccgcgcgcgcggccagcgccaaggattgcgccgtcgagaagatgatctggctgccgggcgaggatccggccgctgcgcctgcgggcctcaccacattcgccgatctcctcgaccccgacggctcgtttctggacgcgtcggtcgacagccgcgatctcgcgcagatcgtctacaccagcggcacggaatccctgcccaagggcgcaatgctgacccatgaagccgtgatgtggcaatatgtcagctgcatcatcgacggcggcatgaacgctgaggacaagttcctgcatgcgctgccgctctatcactgcgcgcaactcgacgttttcctgggcccgcagatctatctcggtgcatccggcgtcatcacgggcaagcccacggccgataatattctggccctcatccaggcgcacaagatcacctcgttcttcgcgccgccgacgatctggatcgcgatgctgcgctcgccgaacttcgacaagagcgacctgtcgacgttacagaagggctattacggcgcctcgatcatgccggtcgaagtgctgctcgagctccagcgccgcctgccgaacgtcaagttctggaatttctatggccagaccgagatcgcaccgctcgcgaccgtgctgcggccggaggaccagttgcgcaaggccggctcggccggcaagccggggctcaatgtcgagacgcgagtggtcaacaccgcgatggaggacgtcaaggtgggcgaggttggcgagatcgtgcaccgctcaccgcacctgctctcgggctattacaatgatccggtgaagaccgcagccgcgttctccggcggctggtttcactctggcgatctcgccaccatcgatgaggaaggccacatcaccgtggtcgatcgcgtcaaggacatgatcaagaccggcggcgagaacgttgccagccgcgaggtcgaggagatggtctaccgcatccctgaggtttccgaggtcgccgtggtcggcctgcccgatccgcgctggatcgaggcggtgaccgccatcgtcgtggtcaagagcggcgagacgctggacgaggacgccgtcatcaagcattgcgccgcccagatggcgcatttcaaggtgccaaagcgggtcatctttgttgatagtctgccgaagaatccgagcggcaagctgctcaagcgcgaactgcgccagcgcttcgtgggtggcgagacgctcgacaaggcggtgcagacgagcttcggcacctgagagggagcgcctcccatgaaagcctggcagatcgcgagcgactggtcgatcgaaggaatggagctggccgatcttcccgagcctgcgcccggatccggccaggtcgcggtgcggatgaaggcggcctcgctcaactaccgcgacctgctgaccgtgcagggcaagggcagcgtcaccagattgcccctgatcccgttctcggatggcgcgggcgaggtggtcgccgtcggcgagggcgttacgcgcgttgcggtgggcgatcgcgtctgcccgatgttcttccagtcctggatcgacggaagagtttccgcgaccagccgccgttacgcgctcggtggcacgcggccgggggttctgcaggaagtgatggtgctcgacgccgagggcgtcagccacattccatcgcatctgtcgttcaaggaagctgcgacgctgccctgcgccgggctgaccgcctggcgggcgctgtttgaagaagcaaacgtcaagcccggtgacaccgtgctggtgcagggcaccggcggcgtctcgattttcgcgctgcagttcgcgaagctcgccggcgcagccgtgatcgtgacgtcgtcgagcgacgagaagctcgaacgttcgagggcgctcggcgccgaccacaccatcaactatcgctcggttccggaatggggcaaagctgcggcagcgtggaccggcggcggcgtcgaccatatcgtcgaggtcgggggcaaggacactttctcccaatcactggaggcagcgcgcgtcggtggcaccattctggtgatcggcatactcacgggcgtctcgcagcagatcgcgatctcgagcctgttcgccaagaacctgcacgtcatcggcctctcggtaggcagccggcgcatgttcgaggccatgacggctgcgatcggacgcaacagcgcgaagccggtgattgatcgggcgttcagcttcgataccgttccggacgcgctgcgtctcatgcagcagggcggacacttcggcaagatcgtggtcgagttcgcctagccggcgtcgccagcgagcttcctgacatcgtcaggcgtttgtctgaagcgccggcgaaacacgcgatggaagtacgagacgtcgtgaaatcccgcaagatgcgcgatctcgatgatcttgcacgtgcgcatggcagggtttcgcagcagacgttcggcccgcagcaaccgctgctccagcacgaagccgctataggtgatgccggcttgctcgaacagcagttggatcgtgcgtggactgacacggtgcgctgctgacaggacggagagggacagcgcagggctgtccagctgcgccaggatatcggccttgagggtttcgaggcgcgccgcggcgaggccgcgcgtccgagcttcctcagcgacatcgccgcgggctccgatcatcagcaccgacaggtcgaacagatgctgtgagaccgcatcgagctccgcgggcgcgagctcgcgggcataagcatgcgcgagatcatagtatcgcaggaacatcgacgcgatggggctcgcgccggggatcgattgcgcaatcaggtcttcggcgttcgggcacacccgcaacagcgccttgcgcggcaggagcgcggtctggaaattgccatgctcgatctgggtgacgcgggcgcccttgatcgaggggtcgcctatggtgatgtcgccggccgcgatctccagcggacgttggcccatggctccgctcaacggcgaattaggcgacatcgtaatgatcaattcgtcgttcgtccccaatgacacaaatgacatcggcgtaccgaacgaggccgagagtctgacgcggggaagaatggcgggcgcaatggtccggtgaactcgcccttccccgaccggcacgaaatcgacgtttgccacctgacggcaaaactgctcgcgccatctttcatagaccgggccgttcgggtcgccatcaaaggagagttgaggctgaatcatcaatcgtgaaacgcaggtatgctggcagtttcggcaggttgtatcgtcagccgccgtgccgcaacggcaaaagcggcggattgcgtgaaaagccattcgggatgacgcagtgagaccgcgaccgggtgccgcagcgggtgtgcccggatcgcaacaggcactgtcgttgtcgctctctttcatttcagtccattcgctggttcgtcccccgccacgaacgcgcatcgcgtcccccctatcgtgaccagcgaatgatcgaccgatcggaaaggaaagattcgatgacacgtcgtgtgcgcaatctgttgccggttctgctggcgcttggtcttggtgcggtttgcgccgccgatgcatccgccgccgatcttgcgctgaaggcgccgcctgcgccgccgccggccgccttcagctggacgggcttctatgccggcgttcacgccggatacggctctggcgaggggaatgctgcgtcagtcgatccaggcgcgcttctggcgctgtttcccggggtgaacaatctgacctcgacggcatcggccccgtttacgttcggcgtcgaccggtccggttggctgggtggattgcaggctggctacaattggcaaaccggccattttgtcgccggtgttgaagccgacgtcagcgctgccgggattggcgcacgcgaatcgagctcgtatgcgttgcgcccggttttcctcgtcggcgatttcgacaactacaccggtacggtgacggtgacccagaacgtcgattatctcggtacgctacgcggccgccttggctacgccagccacaactggctgttctacgcgacaggcggcctcgcctgggcgcatgtcaaggcaagtctcgacagcacgcatgtcagattgaccaacaatttcccgatgccggggcttccgggcgcactggatggtcatgcctcggcaagcggttacaaaatcgggtacgcagtcggcggcggcggagagtgggcgttcacgccgcattggtcgctcaaggcggagtatctttatctcaaccttggtcgtcagctctccttgtccattcccgggaccagcctgatgcccagcgacatcgagcttcacaccttcaggatcggtttgaatcggcagtttgcgccgtgactccggtgctggtgatgaagctcagtatttcttcaccgccgctccgaacgccagccatagcgccatggaggcgagcccgaagccgccgagcagcaggaaggtcgggccgtagccgatccattgcgcgatccagccgccgagcgcagggctcaagctggcgccgaccccctgtacggtgatcacggcgccctggccgagattgatgcggcccgtgccgttgagcgcgcgcgcgaccatgccgggaacggcaaccgtctgcagtccggtgccgatgccgtcgagcacctgcatcggcacgactccccaccatcccgtgacgaagaaggcgagcacgccccggatgggcaggaacatgaaggacaacaggatgatcggccagtagttgcgcctgctcgcggccttcattgcaatcagtgaggtcacgatcatcacgccctgtgcgatcacgacggtggtcgcgacgaagctgggaccgttggcctgtccctccgccaccgcagcaagtccgtagagcggaacgatggctgcgttgccgaggtgaaacagcgccagcgagagtgccagtacgagcagcgcccggtgcttgagcagcatcgtgaacgcgtccggcgcgctgtccggatcatcctccttgctgccacgcgcggcacggtcgtcgatcgtcttggccggaatcatcatgacgcaggcgatcgcgatggcgccgaagacggcggccagtgcgaacacggcgacatagccgaatttgtagccgaggtagcccgacagcgcggcgccgaccatattgccggcatggttgtaggcctggttgcggccgttgagctcgttgaagcccttctgcttggcaatgccgagcgtgatgccggtgaccgccggcacgatcgcggcgctcgcgagcgattgtgcgacttgcgaaaacgtcaccgcccagaaattctgcgagatcaggatgatcgcagaggccgagaccacgcagatgccggggatgacgacccacattcgcttgttgcgactggaatctatgaagccgccgatcggcgtcgtcaccagcatgcccgcaacgttgccgatcgtcatcgctgtgccgatcaggccggtcgcccagccgcgttcctggagaaagacccccacgaacggcccgatgcccgactgcatgtcggccatgaagaagttgagcgcgaacaggggccagatgcgggacgaggaagggcgcgatgtcataggcacgctaaacttggtcggaactcgcatcacgcggcaatgggcgggcttgtgggtgccccgagggacggcgggacagaactcaacctgcgccaatcgcgttggttccggttgctcttgctatcgggcgaccgcatcttcatgccttgctccgacaacctcatgatggatcaccgcaatgccactctggacctgcgcaacctgcggcgctcaatttccgaacagcaagatgcccccgacgacctgtccgatctgcgaggacgagcgacagttcgtcggctggagcggtcaaagcttccttacgcgcgaggagctcgcgcgtaagcaccgactggtggggcgcgatgattttggcctcaccggactaggcatggagccgagctttgcgatcgggcagcgcgcgctgctggtgcctcaaaacgacggctgcgtgatgtgggattgcattccgctcgagaccgacgacgccatccgatatgtcgcagcactcggcgggctgaaggcgatcgcgatctcgcatccgcattattatggcgcggtcgccgactggagcgacacgtttggcggcgtgccggtctatctgcatgccgacgatcgcgccttcgtcacgcgacctcatcccgcgatcgtgcattggaccggtgaccatcatcgcatttccgacgacgtgctgctgctgcgcaccggcggccatttcgccggcgccaccgtgctccactatgcacacggcgccgacgggaagggcgcgctgctcaccggggatatcgcgcaggtgacgatggaccggcgcttcgtcagcttcatgtactcctatccgaactacatgccgctcaatgccgctgcggtgcggcgggtcgcggcagccgtcgagccgcttgcgttcgatcggatctacggcgcctggtggggccgcaacatcgctggcggcgccaaggcggcgtttgctgcgtcggtcgcacgttatctggccgccattgcctgagcggcgccgacaggatctatcttgccgggcatcaataagtgtactataagtacagttatggaatctgccgcaatggcgcggcaggtacggcatgatcgatgcatcgctataagtgcggcgctccagggctgcgtgagcgggagttggatgcatgacggcacagcgggactacgagatattcgatgccggccacgtcgcactccggtcggggaccgtctttccgtcgctgaagctcgcctacaagacctacggcacgctgagccccgccagggacaacgtcatcctctacccgacctcgttcagcgcgcagcacaccgacaccgaatggctgatcggacccgatcgcgtgctcgatccgacgcggtacttcatcatcatcccgaacctgttcggcaatggcctgtcatcttcgccttcgaatacgcccgcgacctttcccgaggtgacttatcacgacgccattgcggtccagcaccggttgctcacggaaagcttcggcatctcaaagctggccctcgtctatggctggtcaatgggcggcatgcaggcctatcactgggcggcgctgcaccccgacatggtcgagcgcgccgcgatcgtttgcggcagcgcccgctgcgcgccctacaatcacgtcttcctggaaagcgtgaaggctgcaatcaccgccgatcccgccttccgcgacggacgcttcgccgaaaggcccgtcgccggctatcgcgccatgggtcgcgtctacgccggctgggcgatgtcgcacggcttttatcgcgacgagctctggcgcgaggcgggcttcacttcgctggaggattatctcgtccgcgcgtgggacgcgacttttgcgcggcgcgatgccaacgatctcctggcgcagatcggcatctggcagaatggtgacgtcagccggtgccggacattcgggggtgatctcgatcgtgccctggcggcgatcaaggcccacatgctgctgatgccgggcgcgaccgatcgctatttcgacctccgcgacaacgaggatgagctcggccggctggtcaatgcgaggtcggcggtgctgcatccgatcccgtcactgcacggccatcgcgccggcaatcccgtcaacaatccgcgcgatcaggctttcatcaaggccgaaatcgccgagcttctgagcaggtagagcaggaaatccagcatgagcgacgcaaccgttccagacactggtcatcgcctcaagccgctgacgccggccatgctacgcgaattgtcggtgcgctcaaacctcaggggggcggcgcagagcctaggccattacggcgtgatcttgctgatgggcgcgctgatctggaagatttcctcgagctggggcgtgctctgggctctgcccctgatggtggtgcagggctatgtcgtcgccttcctgttcatggcggtgcacgagaccgcgcacaagaccgcattcaggagccgcggcctcaatcttgccgtcggccatctctccgccttcatcatcggtctgccttacgaatattactgcctgtttcactgggatcatcaccgctacacccaggatccggccagggatcccgagctgatcgtcggggtgaagccgacgtccgacacgcagcttgcgctggcctatagcggcctgctccaggtcgcgggccggctgcagctgatgctcggccatgcgctcaccggcaaggtcaccgtgccgtggatccccgagagcaagcgcgcgacaatcgtgacggaggcgcgaatctatctggcgctctatgccctgctgctcgcgctttcattctggttctcctcagcgctgctgctctgggtctggatcgtgccgctgatcatcgggcagttcttcctgcggccatacctctacgccgagcataccggctgcgaccagacccgcagcgccttccataacactcgcacgacctacaccggcgggatcgtcaaatggtttgcgtggaacatgccctaccatgtcgagcaccacgcttatccatcgattccctttcacgcgcttccgaggctgaacgggatcgtcgatggcgagatcgtccatcgtggtcgcggctacatcagaacgacgcgcgaaacctgggcctggtttcggcggcagcggcagaccggctagttgcgcaagctctccccgtgcgttttgccggcttccgataaggagcttcactacgcgttcatcacggcgtgaggattggacgcgtcaacccgataccgtttttccgtgcggcgagagcgacctaaaatttcgcaaggatatcagttgtttagatggccgaaaaacagcgctaacaattcccttccaatcgggaaagttttagccgtcttctattcataaccaagcgagaccgccgctctagcgtgaaagccgtcaaccgggagtttgatgatgagcgcgacaagaggccgtcttctggtggtggacgatgatctggtgcagcgggttctgatcagcaagatcggctcgaagctcggctatgattccgtcgttgttccttcatacgaggctgcaatcgagcttctggcgcgcgaagccttcgacatcatggcattggacctgtcgctcggcgagcgggacggcgtggagctgttgcggttcgtcgccgagcgggatctccgcgcgatgtcgatcgtgatcatcagcggttgcgacgatcgcatcatgaaggcaacgcgccgggttgccacaggactgaagctgtcgctcggcggatgtctgaccaagccgctcgatctcaaccgcctgcgctgtgcactcgaattgccgcggcgcttgccgctggctgcggcgtcggcctcgccagcgcctcggatcacgcgggacaggattgcgcgtgggctcgccgagcgcgagttcttcgtggagtatcagcccaaaatcgcccttcagaccgggagagtcgtcggcgcggaagccctcgcgcgctggcgtaccgccgagttcggcatggtctcgcccatggtcttcattccgatcgccgaagaggctgggctcatgggcgaggtgaccgattgcatactctcatcggcgatgtcgcagggccgcaagctgatcgagcgcaatcccggtttcaccatcgccgtcaatatctcgggttcattgatgtcggatctgaccttgccggaacggatcgaggcgatcctgcgccaggagggcgtgcctccgtcctcgctgacggtcgagatcaccgagaccaccgcaatggccgacgtcgaccgtgccaacgacattctggtgcgtctgcggctgaagaagatcggcaccgctatcgacgatttcggcaccggctattcgtcgctggctgccctggcgcgactgccgttcagcgaactcaagatcgaccaatccttcatcaaaggttgcgaagccgatgacgacatgatgaagatcgtcgatgcctccgtcgcgcttgcgaaggcgttcaatatgaaggtcgtggccgagggggtcgagagctcgcacgcgcttgaaatcatccgtcgggcaggctgcgacgtcgcccagggctactacttcgcaccctcgctacggcgttcgcgcgccgaacgatggatattggagcgcaattctcttgcggacgagcaggctgcgtccgcaacggccgctgctctagcgagctgagacgacgagccccggtcgcggagcgaccggggctgcgccagccgatagctgtgctcagtagatcccgtaggcgcagacattcacgacgcgcacgcgcaggccatgacgggtccggaccaggcgctcctggtagcaattgctgatgccggtgttgacgtagagaccgccgaacccgaagccgggaccccagtagtgatgatgaccccaggggtgaccatggaagccgccggccgaagcggcggtgggggcgagagcggcaacgccgagcgaagcagcggcgatcagaccaagtgcaagcttacgaaacatcttcattctccattggcgctaaggccgttgttgtgtccctgcatctcggtcgagccgaaactcgaatgcgttcacgacgcgagggaagaatcgtgtttcaggattgtttcttgggctgcggcaaaatgcgccgccatcgggcttattgcaccgcgcgatagcgcacgcccatggccttgatcagctcggccatcttgtcgcgcagatcggcgggctccagcacttcggcctcggggccgagccggagcaattcggccgcggcgtgccacgaggtcttgccgaccggcactcgtgcgatgcgccagccatctgcatcgggagtctcttcaagctgcatgcgtgccttgacgtaaggctggctcagcgcgtcgagcagtttgacgccgaacggcgacagccggacggtcgcgacattgggatgcatctcggcctcgagccgcagcgtcgcggcccgccaataggcggcgagatcgaagccggcgggacgatcgaagcggtcgtcgagcgccgtgcagtcgagcacgcgcgcgacgcgataggtgcgcacgctgccgtcgacatcgccggcgagataccagctgccgcccttcaggacgaggcccagcggcccgatccggcgctgcttctccgcgcgccagctccgataacggatcttgatcagcgtgtctcgcagcacggccccggcgatcgcgcgcaggtgctttgggttttccgcctcgccgaaccaggtcggtgcgtccaggtgaaaacgcccctgcatccgaccggcgtcttcgcgcaaattggcgggtagagcggccatcagcttgttctgcgctgcgagcatcgccgcgtcgagcccgagcgctgctgccgggcccggcaatcccgccaggaacagcgcgcctgcctcgctctgcgacaggccgttcagccgcacgcgatagccatcgagcaggcgatagccgccgtccgcgccgcggtcggcgtaaacgggaatgcctgacgcggcaagcgcatcgatgtcgcggtagatcgtgcgcaccgagacttcaaaggcgtccgccagttcgggcgcggtgacccggcccctggcctggagagtggtgaggatcgacagcatccggctcgcgcgcatggttccttaaaccatacctgacacaagatgtcaggtatggtccgctacaagctgcgtcgtcgccaaaaggccagatgggagtcccgccatgaccgatccaaaccgcatcacgctgtactattcgccgcagacgcgggccaccggcacacggatcctgctggaggagctgggggctccctacgatctccacgttctcaacatgaaggccggccagcagcgcgagcccgcctacctcgccatcaatccgctcggaaaggtgccggcgatccgccacggcgaggcgctggtgaccgagcaggtcgccatcaccatccatctcgccgacctgtatccgcaggcaggcctcacgccggcgctgaacgatccgctgcgcggcccgtatctgcgctggatcgcctattacgggtcatcgttcgagccggcgctgatcgacaagttcatgcagcgcgagccggcgccggtcacgcagtcgccctacgcggactacgacaccatgctggctgcgctcgaggcgcagctgtcgaaggggccgtatctgctcggcgagcgaatgaccgccgccgacgtgttgtggggcgtcgcgttcagctggaccatgatgttcggcatcgtgcccaagaaggacgtgttcgtccgctacgccgaccgcatgacggcgcggccggcgttccagcgcatcaatgcggaggacgcggagatggcggcgcagcatgccaaggcggcaggtgggtagaacgcatctcagctacagagtcgtcccggcgaaggccgggaccgatacgccgcaacaatagtttttgcgaacaatcggacctaccggccctcgcgaagacgagcccttgtgactatggatcgcggccttcgccgggacgatagcgagggcgtggcactcctgttcgactcaaaaccgaggcgctctcttctcggcaaacgccttgatgccttccttgatctcgtcgccgcgcatgctgtcgcggtgacgctggtcggcggctcgctcatcgagctcgccacgggcgaactcgttgatcgcgcgcttcatgccgcgcatcgcctgcggggcgttgccggcgaggatggcagcgagcttgtcgacctcctcgtccagagattccaacggcaccatggccgtgagatagccgatgcgcagcatttccggcgcgctgatcttctgcgcggtcaggaacagcttcttcgcactgtccaggccgagccggctcacgtagcgtttgatgccgctcgggtaataatgcagcccaagccgcgccgccggcatgaacatctccgcggtatcgacgccgatgcggaaatcgcaggcgagcgcgaggtcggtcgagccgccatagacaccgccgttgagacggcagatggttggtacgccgagatcctcgagccggttgacgaccacctcgaaagcggaacccgcgctctgctgctcgttcgcactgaccgcgcgctccgccaccgaattgaggtcgtaacccgcggagaaggcccgcccggtgccggtcagcaccagcacgcgaatatcaggatcggtctcgatccggtcgaacagtcttgtcagttcgccgagatcctccgcctgaagccggttgaggtgttggggtcgattgaggcggatggtggcgcgtgcgccgatgatttcgagcagcgggcctgtcgccgcgtccgctgtgtccgacattcttgtctccattgtcggcgccataagtgcccgcctggacgcaagccgtcaacgacggacgcaggcggctgcattggcgccgctgcgccgatccccggccgctgccgttcgcggaatgcctacctgaaatgtggcggctcgtcatagccgcggcggctgctgaagaacagcagcaccatcagcccgactccgacgatgacggaaaaccccgcgcccagcgccagcgccacgtagccttccgtcggaatcggctcaccttcgcccaccattgcggaataggcgaagtagccggcggccgccagcattgccagaaggaggatgatgaggagtgcacgcatgcgcgttctctggttgcaaccggaaaccaacggttgcgcaatgcgacggttccaaggcacccggcgttgattctgcgggggatagaagtcggccggacgctggcctgacggggcaggtccccggctggtcaggcgctatgggcggtcttcaccaccaccacattgctgtcgtccgatgggggcgcgccgccatcgcgcgccggcttttcggcttcgccggcatgacgcttcaaatagtcgcggcgcatgctgatctcgtcgcggacgaactcgtacccgagcttgaaggtgtcgagcccgtcggtgctgatcgtgccgtccctgaggccgatcaccgcgccgcgcaggatggcctccaactcgtcctggagacattcgagctggtcgagcgagtgggcgtgctcgatccgctcgccgatgtcgaggatggcggtggagagctcgctggccttctcgggggcgatgcgggtgatcttggcgtagatcgctgcgaagatcgagccgatgacgctgagcgcggcggcgcccagatacatcaggtcgctgtacttgtccacgaaggtcttcgtgtcgtcgttgatgtagtcggctgcgccccgatgcgcgatcacgaaggcgtccttctcgacggaggccggttcgatcctggtggcgaagccgttgtcgagcccgagcgccgacttgttttcgtagacaatgcgggcgagctcgcctgccgtggtcggcgacatcctggactgcgcgaccagcagccattcgagcccgatcgtatcgagatcgtcgttgggaatctgcggggacgccgataccgtgcctgccgtcagcgtctcgtcggatatgccggggaatttacgcgccagcgtcttggcttcgtcgatggcgttgagcgtgaagccgccgcgcttggcggcctgctcatacgatttgtcccgcaccgcccgcgacgcgtggacgatggcgatcaccgcgccaaagccgtttgccggggcgaacaacttgtcgagcgttgcgccctgcggtgccaattggatcctcgtggcatcgggtccgtcggcgacgtcgaggatgctgcggacgaaggcgagcgaggattcgttgtcggagaccaccgcgaccttcttcttcttcagctccgccaacgacttgatcttcttgttgccgggaccgaacaggaggacgagatcatgctcgagaatcgcgagcgtgcgtgcgcgcagcgggatcttggcgtcggtgcgcaggacggcgaggtcggcctgcttgcggtcgaactgcacgagcgccttggcattgtctgcgttgttgacgaccttgatccgcaagcgcgaagcgttgttctgcaccacggtggccagcttggccgcgaacagcgcctcgtcaccgttgggagcgccgacggcaaaggtcagcgtttccgaattgtgcagtaaggagcggccagcccagacggtggcgaacgacaacagcagggtcagcacgacgtagaggaagacctgctgctgattggtcttgatcaccttcgggcgacggggcggaggttcggtcagcgatgagatggggccttcagtacccatggcagcactctggccttattcggatgtcggcacccgcgatggggagccctgaaattcgtaaacggctgaaaaaagaacgatattcttcgctgatgatagcgcgaaggtaacgggatgcaaatttcgagccggaggtaaccttactggaggcggccgcggcgattggccatcgtatcaccagttagccacagttggcgattttccggttccccccggctgcattccgccgcgggagatgtcataaatcacgcgtcccggcgatttggcgggtcagggaagaagttgcgctgaacgctccaattcttctcgtcacgtcaatgagggcgtcagcttgtcgtttccacccatgtcatcggcgattccggttgaagcgctcattggctggatgttgctgctcaccttcaagcacatcatcgccgatttcgtgctccagaccgcgtggatggcgcacggcaaggaccagaagcacggctgggccctgccgcttctggtgcactgtctcgtccacctcgccgtcgcgctgcccctcatcctgatcgtcgcaccgagattctggttcgtggccttcattgacttcgcgatccacatcacgatcgaccgcgccaagggattcgtctccgccaatttcggtgtcgacctcgcgcatccctggttctggaccctgatcggcgtcgaccaggcgctgcatcacctgaccggcttcggcctctccatcttcatggcggcgaactgactgctcgcatccgtcactccggggcggtccgcagcgccgggcgcggaatctcgagatttccggttttcgcctcgcgcgccgcggaatgacgggcaagcatcaatacgcctccgattcgcagccatggcgcaagcacccccggcgactaccggggggcgtggttaacctttcgttagagaattacgctgcatcttcgccatgagggagaaccgcaatgtttgcaagccgcgacacctttgaaggcgattcctgtccggtccgcgacgagctccttggcgagatgtatcgcgccagcgagagtggcctgccgaggctggttgagagtgtttcccctgacgcgcgtgccaggctggcgctgttttgctaccgccgcagtcatttgcattcgctggcggtcgcgattgcagcaagctgcagcgagcgtgacctgatcgagaacggcggccgcgttggctcgacgctctacgcgctgtcgcgcgaaagctcggcgaaatcctcgccgtcgctctcgggcgggcgcaagccgatcacgctgtcgaccaagccgctttcggtgctcgcaccactcgatgacgagctcgacgacgagaccagcgaagccgttcccgcctaggcggcctctatgatcggcaggccgaacttccgccgcgccatcgcgcattcggcgtcgcccggcatgcaggtgcggcagacctctggccgcagttcatagatgccgcaggtcgtcatctctccgatctttccctgcagggccgagcagcgatccccctcgcagcgcatgccggactgacgcgcgttgaccagcgtttcgggaatcgccgcaagctcctcgtcgctctcgatcgagaagcgcggccagttctgcgaatagccgcagcaggcgccgcaaccctggcagcagctcgacaggtcggtctcttgcatcatcctcaagtgtccttcggcggaccccagaccagactctgccgccatcttgcgcgcagcacgtcgcgccgctccgggtatttctcgtcgagataggtcgcctcgaccacgcgatcggtgcggaagctgcggaagtcgccgcgcagctcgcaccaggccgccaacaggcgcacggcttcgagatagccgacggagatcggccagatcatgcgctcgctggggcggccgtgctcgtcacgatagcgaagcatgatcttcttgccttcgtgaatttgggtgcgggtgcgcaccatgtccaggcggtccggctctctgttccagctcggccgcgcccggctcgccggctccagcacgaaaggccgcaggcgttctgggaccgtgtcggcgatcttggccatcaagtcttcggccgcgcgtgccagcgcggagtcggcatggcccgcgacccattgcgcgcccagcaccgccgcctcgatctcgtcgggtgtcagcatgagcggcgggaggtcaaaacccttttccaggatgtaacccatgccggcttcaccgcggatcggtacgcgttgaccgatcagggttgcgatgtcgcggtagatggtgcgcttggaggtctcaagctcggccgcgatcgcgtccgccgtcagcggcttgcgcgtgcgcctcagcacctgaatgatttgaaacagccggtcggcgcgtctcatgacaggtctcttgtgcccattttctcggtgctctttcagcacgcggagcgcggctgctgacaggatgttggcagcaggggagttctatacccggacaactcatcgactgaaggggatttgtccatgatcattccaacccatttcggcccggccgttccgatgctgcgggcacaggcgtggtccgcagcggtgttcggccgcctcgtttcgctcgatctcgtggccgtcgacctccggtttgccctcgcaagcgccgtgatacgcccgctggtccgggttgccgacgcgctggtccgccacttgatgggccgcgcctggcggggagcccgcttcgcagaagatatcatggctgctgccaccatggtggcagcagcccgccgctaggttccttcaactcgttcgaggttcaggagagctcgcatgatcacgctttacggcttcggcgccggcttcggcctgccggaaatcagccccttcgtcaccaagacggaggtgcagctcaagatggcagggctgccttaccgtaaggagcgggcgatgccgccagcttcgcccaaggggcagctgcccttcatcgacgacggcggcgaggcggtggccgattccaccttcatccgcgcccatatcgaacgccgctacggcttcgatttcgacgccgggctctcgttgcaggagcgcgcgcaggcctgggcgttcgagcgcatgatcgagcatcacgtctattgggcgctggtcggcgcccgctgggtcgatccggtgaatttcgccaaggggcctgcgcacttcttcgacggcgcgccggagcacaatcgcgagaagctgcgggaggatgcgcaattccgcgtcgccgagaactatctgctctccgggctcggccgccatgggcccgatgacgacgtcgatctcgcggtccgctcgctgttcgcgctgtcggttcagctcggcgacaaggcgtacctgatgggcaaaaagccctgcggtgtcgacgcaaccgccttcggcgcgctcgccggcatcctgacgccgttcttcgaatcggccttgcgcgaacgcaccgaggcatttccgaacctcaccgcctatgtcgaccgcatgatggacgactactatccggagtttgcgtggaccccgctgcggcaggcggcgtgagctcgtgcgtatcagcacgctcgggagtgggggcgccgaagccaccgtggcagcagcttgcgctcagctccccaagcaaaagagccggcccattgggccggctcttgatcatctcaacgctctctctgcgcttacttcaccagcgtgtacttgccgtccttcaccgtgagcaggatgcgcgagcgctggtcgaggccatagcggtccttctcggtgaagttgtagacgccctggcttgcggccaattccttctccgtcagcagcgcctggcggatggcttcgcggaactcaggcgtgccgggcttggccgtcttcaacgccaccggaatgatgcgcttgaggatctcgaacgcatcgtaggaatggccggcgaactggctgcggctgttcgggccgtacttggcctcgtaggccgagttcagcgcgaggccgggcttcttggtcagcgcgctatccggttgttcctcgggggccatgacggggcccgaggccatcaggacaccttccgccgctttgccggcgatgcggatgaagtccatgctggcggcgccgtgggtctggtagatcagccccttgtaaccgcgttcgcgcaactcggtctgcggcagcgcggccgcggtgccggaggcgccgaccaggatcgcgtcgggattggcggcgacgagcttgagcacctgtccggtcaccgaggtgtcgggacgggcaaagcgctcctcgtcgacgatggtcatgcccatgggcacggcctgcgccttgaggtcgttgaaccagagatcgccataggaatcggaatagccgatatagccgagcgtcttcacgcctttggacttcatgtggtcgtacagcaccttgccgacgatcgggatcggctgcggcatcgccaccgaccacttcatgcgctcgggcgtgatcgggaacggcgcaaggccgaaatgcgggatgccggcttcgttggcgacgttggacacggcgatggtcggcggcgtcagcgccgagcccatgatgatgtcagccttggattcggtgacgaagcggcgcgcgttggtggtggcggtggtgggatcgccgccgtcgtcgagcacgatcaccttcagcggcacgccgccgatctcctttggtacgaattccagcgcgttgcgctcgggaatgccgagcgccgcgcccggcccggtcgtagcggtggtgatgccgatggtgacttcgctggtctgggccagcgcgggcagggccggcagcgccagcgcggccgcagtgatggcagcggtcaaataaaaacgtttcatctattcctcccttgacgtgtttctttgaaagcagaaatcggggggtaattcagccccctcttttggtgatgcggcgatttagctccagactttaactccccgtgaatttggctaccatttccgccgggaatggtgccgatttcagcttgtctgggttaacgggatcgcggccgaccagcacgcgggtctcgaaaccctcgatcgccagcgcctcgcccttgtagacgttgtgcttcacctcgaagctcgagcgcttgatgctctcgatcctggtctcgatggtgatccagtcgccataggtcgaggggatgtagaacttggcccgcgtgtcgaccatgggaatgcccaccaggccgtatttgcggaccagatcctgcttggataagccggcgacctcgaacagggtcgaggtcgaatcatcgaacatcgcgaaatagcgcgggtaatagacgatattggcggggtcgcagtcgccccactgaatctggacctcgcgccggttcacgaacatgcttcatctatccactagcgctgtgccacacctctcccaatgggagaggtaggatcctggcctgttgcgatcggctcatttaacttacttcggcgccatgcgcagcgagccgtcgaggcgcaccacttcgccgttcagataggcgttctcgaccatgtgcagcgcgagcgcggcgaactcgtcggcattgccgagacggcgcgggaaggggattgcggcggcaagcgagtcctgggcttcctgcggcaggttcgcgagcaggggcgtcaggaacaggccgggggcgatggtcagcacgcggatgccgaattgcgcgagctcgcgcgcgatcggcagggtcatgccgacgatgccgcccttggaggccgaataggcggactggccgatctggccgtcataggcggcgacggaagcggtgttgatgatgacgccgcgctcgccggtcgcctgcggctccagcttggacatctcggtcgcggcaaggcgcagcatgttgaagctgccgatcaggttgaccttgatcaccttgtcgaaatcggcgagtgccatcgggccgtcgcgaccgaccacgcgcttggcaacgccgatgccggcgcaattgaccagcacgcgggccgggccatgggccttcgtcgcttgcgcgatcgcggcttcggcggaggccgcatcggagacgtcgcaggtcacggcgacacccttgatctccgccgcgaccgtttccgcaagcttggtgttgaggtcgcacacggcgaccttggccccctgggccgcgagctttcgcgcagtcgctgcacccagtcccgatgcgccgccggtcacgatggctgcctgatccttcaacaacatggcgttctcctttggcgatgaattctagccgaccgatatcacacggttcgacggattggcagcatagagctcctcgatcagctcggtgcgatgctcgagaacggcgcgctggttgatcgagcccttgtcggtgacttcgcccttgtcgatcgagagcggcgtgtccatcaggatcgcgcgcgtgatccgtgtcgaggagcccgtggcctggctgaggaaacgcgtcagccgttcgcggaaggcctcgcgcaccaggcggtcgcgcgtggcgacgacgaggtcgttgatcggcagcgtcgggttgatcagccggcagccatcgagatcgagcacgaccagcgcggatacctcgtcgcggttgatgccggcgatcacgacgtcgcgcaccagcggtgcacaggccgcaacgaaacgcgcgcgcagggggccgacgctgacccaggtgccgctcgccagcttgaaatcctcgctgacgcggccgtcgaagtcgaagccggcattgagatcatcaggatcggccggcttcagcgcatcgccgagtttgtagaagccttcctcgtcgaaggattttgcggtgatgtcgggctggcgccagtagccgggcatgacgttcggccccttgcagcggacttccagcttgccattgttcggcaccagcttggcgtcgttgcccgagaccggcaggccgacatggccggagcggctggtgcgcggattgaccgacatgaagaacggcgcggtctcggtggccccgaggcccgtcagcatcggcacgcggtagcccttttccttcaccgcgagctcgtcgaggctgttccagacgaacggcgacagcgccgcgcccgagaagaacatcgcgtgcagccggtcgaagaactttgcgcgcaggccctggtcgtcgcgcaagtaaggcagcagagattcgtagccctttggcacgttgaaatacaccgtcggcgagatctcctggagattgcgcacggtctcctcgatgccgccgggcatcggcttgccggcatccagatacatcgagccgccgttgtagagcgtcagcccgatattgtggttgccgccaaaggtgtgattccagggtagccagtcgatgatgacgggcggctcgtccttgagaaaggcgagcgtctcgcgcagcatcacctggttggcgcagatcatgcgttgggtgttgatgaccgccttgggattgccggtcgagcccgaggtcagcaggaatttcgcgatggtgtcggggccgatcctgccatggacctcgtcgagatcggtgcggatcggcgtcgccatcaggtccgcgagcgaagtgacgtcccggccatgcacgtggccataggatgcggctatctcggtgccgagtgagacgttggccgtgagcgcatcggcgaacttgtcggcatcctcggcgaagacgaggccgggcgtcagcagcttcatcaggtaggacagcttgccgtaatccttcgacaccagcgaataggccggcgataccgggcagaacggcacgcccgcatagaacgcgccgaaggcgagcagcgcatggtcgatcgaattgccggagagaatgacgaccgggcgctctgcggacaatccgcgtgcgatcaggcccgaggcgatgtgccggctcgcgatgagcagctcggcgtaggttatcttgcgccagccgcggccaccttcgcgctcggccatgaagacgcggtccggcgtggtaatggcccaatgatgcaggcgctcggtgatgcggacgggatagtcgccgagcggctgcttcggcctgagatagatcgtgccgtcgtcgcggcgctcgatgtcgacggcgggatcgccgaacgagatcggccgcagcgggaaagtgctcgcgccgcgttccatgctggaagaggacggctgcgcactcatgacttcggcttcacctttgcggtcttgtgctcgaggaattcgcggatccggcgcttggcctccttgtcgctctgcgccaccgtcgccatcagcgattccatcagcagaccggtttgcggattggcctccgcgatcatcggcagtgcctggagcacggcgaaattcgtcagcggcgcgttggaggcgaccttggtcgcgagttccatcgccttgggaagcgcgttgccggcttccgtcaaatattgcgcgaagccgtaggacgcgccttcggtcgcgctgtagacgcggccggtcagcatcatgtccatcattctggcgacgccgatcaggcgcggcagccgcaccgagccgccgccgccgacgaagatgccgcgttgcccttccggcagcgcgaaataggtcgaaggttcggcgacgcggatatgcgccgcacaggccagctccagcccaccgccgatcaccgcccctcgcagcgccgcgatcacgggcacgcggctgtactgaatgcggtcgaatacccggtgccacatctgggaatgcagcaggccgcccgtggcgtcgtgctcggtcagctcggacaggtcgaggccactggagaaatgatcgccgatgccgtggatgacgactgcgccgacgtcgtcgggcagggacgcaaaacactcgccgatttccaggatgatgccgtcgttgagcgcattgcgcttcgccggccggttcagacccacggtcagaacccggtccgccctctcgatcttcaagagcccggaggcgcccgcgctggcggtctcggcgtttccctgtgtcatttgcgtccttatcagaatagttatgttgtataacgaattccgggggagtcaaggaggggcggcgcgggatatcccatcctatggagagccgccctggcgtccgaccggcgaggcggcatgtcaggaatgcgctgggcagcgcacatgctgctgcatgttccgtcgttgcgagccaacgggtccgcgcgannnnnnnnnngcggacagctctcacattacctgatgaacgtcgatcaccacccgatccgcatgacgcgcggccgagccgacgaagatgtgctccatcagccagcgatacttctcatgcccggtctcgaacttcggcacggtgcggaaatagatcagcttgggatcgaccggctcgccgcgcttgagcttctgcaggagctctacgggcccgaagcgcatgcccttgttctcgacatagatgacggcgccgtcgtcggtctcgaaggcgtatttcgcttcgagatcgatcagctcgttggggcggatggtctggaagtccgcgccgaacggcagaaccttgccggcgatcgcgcctttcacctcgccgccgatgatcgggatgatgcggcgaacgccgattccggtctcgccggcggtgacgacgtcgccgatgcgggcggtgatggtgaagacgtatttggtttgcagcgtcggtgtggtcatcgcttcacctctcaatgcgccatcatccgcgtcggcaaccagatcgccagcagcggaaaggcgatcaggatcacgaggcgcacgaggtccgttgccacgaatgggctcacgcccttgaagatggtggagaaggagacgtccttcaccacgctttttatgacgaacacgttcatgcccaccggcggagtgatcaggccgagctcgacggtcatgacgatgatgatgccgaaccagatcgggtcaaagccgagatggatgatgacggggaagatgatcggcacggtcaggatgatcatcgccattgcgtccatcaggcagccgagcacgagatacatcaccaagatcagccccagcacgccgtagggcccaaggccaaggccggtgaggaactccgtgaccttctgcggcgtctgcgtcaccgtgaggaaatagccgaagatcagcgcgccgatcagcacggtgaacacggcggccgcggtgcgcgttgcctgcagcagcgaggccagcaccttctcgcggtcgaggcggcccgtcagcacgccgatgatgaaggcgccggcggccccgacgccgccagcctccgtcggggtgaaacgcggcaggaagggcagaccgtagaggcctccgatcacgaacagaaacagcaggaccggggcccagatgtccttcaatccggcgaagcgctcgcgccacggcgtgaccttgcccttgggcaggaagtcgggtcggaaatagccgatcaggaagatcgtgagcatgtacatggtcatcgcgagcaagcccgggatgatgccggcgatgaagagctttccgatgtcctgctcggtgatgatgccgtagacggcgagcacggtggagggcggcagcatcgcgcccaacgtgccgccggccgcgatcacgcccgtggcaaaggactgcggatagccgaagcgccgcatctcgggataggcgaccgcggagaaggtcgcggcggtcgcgactgaggagccgcagatcgcggcaaagccgccgcaggcgcctacggttgcgatgccgagtccgccgcgcagatggccgacgaagccgttggcggcgcggaacagctcgcggctcatgccggaattgctgacgaaggagcccatcagcaggaacatcggaataacgccgaaagtgtagtcggtcaccgtccgcatggtgacctgtccgaccatcttgagggccggtgtcgagccgacgagatagctgaagccgcacacgccgacgaggcccatggccatgccgaccggcacgcgcaacagcatcaaggcgaacagggagatgaagccgaggacggcgacggcgtcggtactcatggtcactccgtcaccttgatcttgggttcatgcatgtcttcgggatggaagatcaaccggtacgtacggatcgcgatcagcagcacggcgcagacgtcgccgatccaggcgacgaggaagaacggccatgtcggcatgtgcaggtcgaaggtctgcacattgtcgttgtaggtcagccggaccttgtcgaacagcgtccaggtctgcaccgtcacgacgaagagcagcaccagggtcgcgaacacgtcgatcatgcgctggtagcgcgggccgacattggcccagaccaggtccacagtgatgtgggtaccccgataggaggttgcggcgatgccccagaaaatcaggatgccgagcaacatgcggccgatgtcgaaactgtccgggatcgaatagttcatcgtgttgcggagcagcaccgacaggaagatgtccagcgcgacgatgccgacgaagccggctgcgatccattcgatcgaatcgatgatgcggtccatccaggagcgcttcatggggaaagagtccttccgacgagtgcgagatgtgcctgcgatggagccgcgatccctcccccgcttgcggggggaaggttggggatggtgtctgcgcaatcgagaacccggcgcgcgggacgatgctctgaatcgccaggacgcacccacctctcccgcaagcgggagaggtgcagcgagtacgccgcagcgcgtgaagttactccgccagtgcgttgtacttcttcagcgatgccttgagatccgcgagcgccgcgtccggatcggcgccggccttcttggcgccgtcgctccaggtcttgaccagcggctctgcggccttcttccaggcggcagtctgctcggccgtcagcttgtagacctcgtggccggattccgccttcaccttggcgatgccggcatcctcgaacttgccccaatgctcgcccaccgcaccagccgtttcgaccgagcagttcttgtcgatcgcggctttctgcttgtcggacatcgcattgtacttgtccttgttgatcacgaacacgaaggtcgtggtgtagagcggcgcctccatgtcgtacttggtcaccttgtcgattccgaacagcaccagggagccccaggggaaggtgacgccgtcggcgacgccgcgctcgatgatgtcgcgcacctccggcgccgaggactgcacgttggtgccgccgagcgacgtgacgaagttcgccatcgtggcgtgcgctgggcggatcttcatgcccttcacgtcctcagggttgacgatcttcttgctacgcgaatggaaagaggagggcgagtggacgaaggcgaggcagtatttgacgtccttcatctccttttcggcatacttgcggtaccaggcatccagccccatcgagccgcccttggcatccgagatcaggaatggcagctcgcccgcgccaatgatcgggaagcggccgggctggtagccggggttgacgtaggtgacgtcggcgatgccgtcgcgcgccatgtcgtaatggtcgaaggccttgccgagctgctgggccggaaacaccttgctcttgatggtgccgccggaatccttctcgaccgcggcggcccagtcctccagcgatttctgcagcgggtgcgaggccggcacccaatgcgagatcttcaagtcgaaggtcttgtcctgcgcgagcgcggggctcacgcttgctgccagcagcaatgccagacaggctttcctcatcacgcgtctctccctgttttcgactgcgggctttcgatggcccggtctcgttaattaacatgttatctaattggccggcgtgttcaagccggaagtggcgcgtgtcctgtcgcaccatccatctacgtcagccgtgttgcacgcatttgtcgctgccgggcgacgaccgctccccttttgcaaacgttatatgatataattatcgcctgccgaccggcaccacaagcaggtcgcggtgaaagcctacaggatcgggaggagcaagtattgcggacaaaagtcgcaatcatcggggcagggccggccggattgttgcttgggcaactgctgcacacatatggcatcgacaacgtcatcctggagcggcagagcccggattacgtgctcggtcgcatccgcgccggtcttctggaggagggaaccgtcgcgctgctcgatcaggtccgcgccggcgcgcgggctcatgccgaaggtttggtgcatgaaggcatcgagcttgcgttctcaggccggcgtcaccgcatcgacatgaagggcgcgaccggcaagaccgtgatgatctacggccagaccgaagtcaccctcgacctgatgaatgcgcgcaaggctgccggtctcgtttcggtctatgaggccagggacgtgcagccgcacgatttcgacggcagtcacccgcgcgtgacctacgtcaaggacggcgtcacccacacgatcgattgcgacttcattgccggctgcgacggctttcacggcgtcagccgcgccagcgtccgggccaatgcgatcgaggagttcgagcggatctatccgttcggctggctcggcattctttccgataccccgccggtcagtcacgaactgatctactccaaccacgcccgcggctttgcgctgtgcaccatgcgctcgaccaagcgcagccgctattatgtgcaatgctcgctcgacgaccatgtcgaccaatggccggacgaccgcttctgggacgaattgaagcgtcggctcgaccagaaggcggccgacagcctcgtcaccggcccctcgatcgagaagagcatcgcgcccttgcgaagcttcgtcgccgagccgatgcgcatcggcagaatgttcctgtgcggcgatgccgcccatatcgtgccgccgaccggcgccaaggggttgaacctcgcggccagcgatgcgcattatttgtcgagcgcgctgcgcgaattctacgatgagagatccagctccggcatcgacgcctattctgccaaggcgctggcgcgcgtctggaaggccgtgcgattctcctggtggatgacctcgatgctgcacaaattccccgacaccggtaccatcggagcgcgtattcagctcgccgagctcgattacgtcacgcagtccaaggccgccatgacgtcgctgtcggagaattacgtgggactgccgttttgatcacagctgtcatgccccgcgcactgccgtagggcggggcgcacagcgccgtggccaccatcttgcaccatcgagaagttggtgggcacgcttcgctctgtccatcctatgacatctgcgttgccacaccgtcattgcgagccagcgggtccgcacagagcgcagcccgatgagaggctcggcgaagcaatccagaatccctccgcgagacagccaggattgcttcgtcgcaagagnnnnnnnnnnnnnnnnnnnnnnnnnnnnnnnnnnnnnnnnnnnnnctctctctctctgccgtcatgcccgggcgtgacccggacatccctcgtcttcgggcctgcacgtgtggaggcgcgtggatggccggaacaagcccggccacgacggcaaccgtcacccaaacctccagtccgtcgtctccaccacgagatcgatgaacgcgcgcaccttggcggagagcaggcgcgaggtcggataaacgatatggatcggcagcgccggctgttcgtaattcgcgagcacgatcctaagccgtccgcgcttcaggccctcggcggcctggtacgccagcacgcgggtcacgccgccgccggcttcggcatattgcagcgccgcgtcggcactgttgctggtaaagcgcgggctcggtgttacttcgatatcgcggccgtcttgcaggaagcgccactcggaccaggggccgaactggatcgtctggtgctcgcatagagcgtccggcgtcttcggctcgccatggcgcttgagatagccgggtgcggccaccacgatccgccgcatctgccccacctgacgcgcaacgagcgaggaatcggcgagatggccgatccgcaccgcgacatcgacggcgtcctccaccaggttgacgagatggtcggagagccgcaattcgcaggtaacctcggggtaacgcttgagataggcggtcatgaccggtccgacatgcagccggccgaagccgaccggcgccgacaccaccaaccgtccgctcggccggttgcgttcttggcgcgccgagccgtcggcctcctcgacgtcggccaggatgcgccgggcgcgttccaggtagcgggtgccgacgtcggtcaaccgcacctgccgggtggtccgctgcaacagccgcgcgccgagatgctcctccaggcctgcgatcatccgcgtcaccgccgaaggcgacagccgcagcttgcgcgccgccggcgcaaagccgcgcagatcggccacggtgacgaagacgtgcatggcttcgaggcggtccatggcattattgcatatagcgcaatgatgaagtgtcaagtggtgagattgttttatgcgctcgtgggtccatcttagctgccacagacgcaggaatgcgccggaatttcaggagacgttccgatgacgacagcagcccacgcctttgcgagtgacatcgccttctcaccggcggtgaaggcaatccaggcgcgaaaaggctcgcgcgaagcctatgctcgcagcgagcagcgcggctggcgcaccgaggtcgacgataacctcgcagcctttctggcggacgccaacagcatctatttcgcaacggccgcggcggacggccagccctatatccagcaccgcggcggtccgaaagggtttctcaaggtgttggacaagcagacgctcgcctttgccgactatgccggcaaccagcagttcatcacccaaggcaatctgtcggagaatcccagggcgtatatcttcgtgatggactacgcccatcgccgtcgcgtgaagatctggggcgacgcgcgcatcgtcgaggacgatgaggcgctcacgacgtcgctgatgccgaaaggctaccgtgcgcgacccgagcaggtaattctgttcaagatcgtggcctgggacaccaactgcccgcagcacatcccgcagaagttcgatgccgcagacgtggcggcggcgctggcggcgagagatgcgaggatcgcggagctggaggctgaggtggcggcgctgaagggggcgaaggcggcaacttcgtaagcacgcggctcgcttactctccccccgagggggagggtaagaagagttagactgcactctcgccttcgtgctggaagccgagatagctcgccgccacccgttcgttcgccgcgatgtcgctggccttgccgctgagcacgaactcgccgagctccatcacataggcctggtctgcgatcttgagcgcagcctgcgcgttctgctcgaccagcagcacggagacgccggcggcgcgcagttcggtgacgatccggaagatgtcggcgacgatgatcggggcaaggccgaggctcggctcgtccagcatcaggagcttcggctcccccatcagcgcgcggcccatcgcgagcatctgctgctcgccgccggagagtgtgccggcgagctgcttgcggcgctccttcagccgtgggaacagcgcgtagacgcgttccatcgaggctttggccttgctccgctcgatccggaaggctcccagctcgaggttgtcctcgacattcatcgtcacgaacaactcgcggtgctcggggacgagaccgaggcccatcgcgacgcggtcctcgatgtcgagctgggcgagatcctggccggcaaaggcgacgcggcccttcagcggcagaatgcccatgatggcggagagcagcgtggtcttgccggcgccgttggcgccgacaatcgtgacgatctcgttggtgccgacctcgagcgagaccgagcgcacggcttcgaccttgccataggcgacgtgggcgtcggatacggacaacagtgcgctcatgccgccactccgagataggccttgatcacttcggggttggtcttgatcgtggcgggcgtgccttccgcgatcttggtgccgaaatcgagcaccacgatgcggtcggcgaggttcatgacgaagctcatgtcgtgctcgaccagcagcacgctcatgccgccgtcgcgcaagtcacgcagcagcgttgcgagccgctgcttctccatgtgacggaggcccgcggccggctcgtcgagcaacagcaacatcggatccacacacagcgcgcgggcgatctcgacgatgcgctgctggccgagcgagaggctgccggcgagctgatgcatctgctcggtgagcccgacgcgttcgatctggcgcgcggcttcggcgagcagcctggcctcgtcagcgcggtcgagccgcaacatcgaggcgacagggccggaatggccgcgcagatgcgcgccgatcgcgacgttctccagcacggtcatgtcgggcacgagcttgacgtgctggaaggtcctgctgatgccgagcttgacgatctcctgcggcggcgcgttgtcgaccttcttgccgagcaccgagatcgagcccgaggttgccgacagcacgcccgtgatcaggttgaatgtggtgctcttgccggcgccgttcgggccgatcagcgcgacgatctcgcgggcctggacgtcgaacgacacgttgttgaccgccaccacgccgccgaactgcttgcgtgctttctcgacctggagcagcacgccggactcggcagccgcgcgggcgcgatgttccagcttcagcgaggtgtcgggcttcttgccaccggtgcgctccgggaagaacgacatcagccagggccagaggccgccgggcgcgaactgaagcagcgccaccagcatgatgccgaacacgatggtctcgacctggccggagccgggcaggatcagcggcagatagctttgcagcgcctctttcaggatcacgacgatcgccgcgcccagcacgccgccccagacatagccggcgccgcccaccaccgcgatgaagagatattcgatgcccatatgcgcgccgaacggcgtcgggttcaccgcgcgctgcaggtgggcatagagccagcccgaaagaccggcgagcacggcggcatggatgaacaccaggagctttgcgcgcggcgtgtgcacgccgaaggcttccgccgcaatgtggccgcgcctgagcgcgcggatggcgcggccggtgcgggagtccagcaggttgatcgtcagcagcgccgaaacgatcacggcgatccagatcgcgtagtagatcgagccgggcgagagcatcttgagcgagccgatcgacagcggcgggatcgccgagatgccgtcgttcctccccaggaactccagcttgctgaagagatagaacagacccagcccccaggcgatcgtgccgagcggcagataatggccggagaggcggacggtgatcagcccgagcagcaccgcgaacaggccgctgaccaggagcgacagcggcagggtcagccacggcgatacgccgtaggccgtcgacagcaccgctgtggtgtaggcgccgaagccgacaaaggccgcctgcccgaaggaggtcaggccgccgacgccggtcagcagcacgaggcccatcgcgaccagcgcggcaaggccgatattgtcgagcagcacgatccagaacgggggaatgcccgggatgaacgggatcgccgccatgaccgctgcgaagacgagaatgggaagccggccttgcatcgcgcgtcagtccttctcttcctcgaccgcgggcgcggcgagcgagcgcagcagcagcacggggatcagcaacatgaagacgatcacctccttgtagttggaggcatagaaggacgagaacgcctcgacgatgccgacgaccagcgccgcgacggcggtgaggggatagctgaccaggccgccgatgacgccgcgacgaagcccttcaggccgatcaggaagccgctgtcgtaatagagcgtcgtgatcggcacgatcaggatgccggacagtgcgccgatgacggacgccagcagaaaggcgatctgccccgacaacgtggtacggatgccggcgagccgcgcgccgagccggttaacggcagtcgcgcgcagcgccttgccgtagagcgtgaggccgaagaacagccagagtccgacgatgaaggcgatggtgatggcgtagacggtgatgctctgcccggtgaagcgcagcgcgccggcggtgaaggcgccggacagcaaggccggtccgcgctggccttcggcgccgaagaacaacaggccaagcccctgcagcgcaagatggacgccgacggacgcaatcagcagcaccagcacggaggtgtgcgccagcggctggaaggcgatgcggtagatgtacaggccgatcatggccacgatcaccagcgaaagcgcgatgcagatcgccaccggcggcttctgcgcggcgaagtaaagggtcagcgccagcacgatggccggcagcgcgatgttggtgatgaggccgcgcacgatcagccgcccatgcagcgccttgcgcgcctcgaacaggtcgaaggcgaaggcgccgatgcccagcgcaagcgcgagctttgccgtgcccggcatctgtccggccgccagcgaggcataggtcagcgcgccgtaggtgacgaattcgccctggggaatgaggatcacgcgggtgacggcgaacaccagcaccagcgccaggccgagcagcgcatagatggcgccattggtgatgccgtcctgcaccaggaacagcatgatggtggtattcaagaccggacgctccccctaatccggaccggtcctcgcgattacggtggacggtccgctcacagccattgaaaatcgctgacgatatttgatatggtccataacaattatcaaatataacatcaagggtggggaacgacccgtcccggaatttagcgggattacgagcacgaggcgatgaccgtttccaaaaccgctgaaaagtcctccgaaaaagcggccgacgccaagggccgcaaggatgcgggcgacgtccacgccgaagccctccagctcggcgaactctccgagcagctcggctacgtcctgaagcgggcgcagctcaaagtgttcgagaacttcttgcgctgcatggcctcgctccagctgacgccggcgcagttttcggtgctgctcctggtcgagaagaatcccggccgtaaccagaccgagatcgcctccacgctcggcattctcaggccgaacttcgtggccatgctcgacaatctggagagccgcgacctttgcgcgcggatccggtcaaccaacgaccgccgctcccacatcctggtcttgaccgacaagggcaaggccgtactggcccgcgccaagaagctcgtcgccaccaagcacgaggcccggctgaacgatctgctcggccaggccaaccgcgaagccctgatcgggatgctcgcgaagatcgccaacgagttttgaggcgggctgtcacctcccgtcgttgctcgcagtgacgcggtgagattgaggcgcgcctcaatccaccaagatcaccctgatgtcgttcacgttggtcagtgtcggccccggcgtgagcagatcgcctgtcgcctcgaagaacgcggtcgcgtcgttgtcgtcgagataggcctgcggctgcagcccctgcgccttcatcttcgcgaacgtcgtcgcgtctatcaatgcgccggcggggtcggtggggttgccggcaccgccgtcggcgccgtcggtgtcgccggccagcgccgcgatgcccgccgtgtcctgcaacaggccggcgagtgccagcgcgtattcctggttcggtccgccgcgcccgttgccgcgcacggtcaccgtgagctcgccgccggagaggatcgcgatgcgcttgccctgcgcgcgggcctgaagcgccagcctggcgtgatcggcggcgacctcgcgcgcctcgccctcgagatcggcaccgaggtcgatcgtctcgtaaccggcttcgcgtgcgagcttcacagccgccgcgagcgattgcctgggccgcgcgatcagctcgaaatgcgcgtgcgcaaaggccgtgtcgccgggcttgcagctctcgttggcgggatcgtcgagcgcgcggcgcacggcctcgtcgatgtcgagcttgtacttcgcgacgatggcgcgtgcatccgccagcgtggtcggatccggtacggtggggccggaggcgatcgcggaaggatcgtcgtgcggcacgtcggagatcgcaagcgtgacgatctcggcggcgttcctgccggcgcgcgcgagacggccgcccttgatgcgcgacagatgcttcctgacgatgttcatctcgccgatcggcgcgcccgaccgcagcagcgccctgttcaccgcctgcttctgcgcaaagctgacgccgtccaccggcgcgatccagtttgccgagccgccgccggtgagcagcaccagcagcagatcgtcaggaccggcctcgcccgccagtgcgagcgtatcggccgcgcccttcaggccggcttcgtcgggcacgggatggccggcctcgaccacacggatgcggcgcgtcggcacgccatagccgtggcgcgtggtggcgatgccgaccagccgctccggcgccagcccctgcgcgtcgagataatgccgctcggccgccgcggccatggcaccggcgcccttgccggcggcgagacagatcacgcgtcccttgggcgcggcacgcagatgcggtgcgaggattgtgttcggatgggcggcggccacggcggcgccatagagcgcgcggagcagagggcggcggtcggtcatggacgatggccttgagcagactgaagcggcggcgatgaggttgtcgtcatctgcctaccgcatcgcgcggcaaagcgtaagctgcctcttgtgcaccatttggaccgctgcaatcgcgtggtcggagacccgcaagcaaaaatcccctgcgcggccggcgcaggggatttctcgtcatgtgttcagggcgccggctagccgccggcttcggcgttgatcacatcgccgaacagctcccatcgctcgcccttgaagcgttgcagctgcagcgagctgatcggggcgaagtcggtcggcgacgtgttgatcttgatgccgggcagcagcacctcggtacggaagtccttcaggcttgcggcctgcttcatcacgttcgcgcgcgtgaggtcgtcgccgcagttcttcagcacctggaccagcgtctgcgcgacgccgtagccgacgaccgtgccgccgtcggtcttgtcgccttcggggaagtatttggtcatgaagtcgaggaacgccttcatgcccgcatcattggcccattgcgcgtcggtggtgtcctttaagtaagccgccgagatgatgccctgcgcgttatcgaaccctgccggcttgatcacgcttccgaccgaggcggagacgttgttgaggaagtggatcggcttccagccgatctcggcattcttcttgatcgcctgcgccgcgaacttcggcgtggtgatgttgatgaagacgtcggcgcccgtcgccttgagcttgacgatgtgattgtcgatggtcggctccgacgtctcgtagctttcttccagcacgatcatgcttgcggccttggcgccgaggccgtccttcaggcccttcaggtaatccttgccgtaatcgtcgttctggtagagcacgccgatctttccgcctggcttctccttcatgatgtacttggcatagatgcgcgcctcgctggcgtagttcggctgccagcccatggtccagggatattgcttgggatcgttccatttcgacgcgccgctcgccacgaacaattgcggcaccttcttctcgttcatgtacttgcggatggcgccattggtggaggtgccgagcgagccgaagatcaagagcacgccgtcgctctcgaccagcttgcgcgcctgctccacggtcttcggcggcgaataggcatcgtcataggtcacgaagttgatcttgcggccgttgacgccgccttctgcgttgaccttgcggaaaaaggcctcctcggtcttgccgatcacgccgtaggcggaggccggtccgctgtagggcatgatgttgccgatcttgatctcggtgtcggtcgcgccgctatcgtatttcttctgggccgatgcagttgatgtcgaagtcgcaatgagcgcgagcgccaatgatgcggccgcaagcttgccggtaacagcaggcattccaatctccctaatcttcttggtgtgtgcgtcccttttcttggcttgattgtttttggcgacgcggctgcaattcaatacgatttgccggaaagcttcaaggaaaacccctgcggcaaagccgcaggggctgcgtctttagtcgattggacccgacatctttagcgactggttaagatcagccgccgacgtcgccgctcagaacctcgccgaatcgctcccaatgctcgcccttgaagcggatcaactggagctgcgagaggggggcgaaatcggtggccgaggtgttgaccttgacgcccggcaacaggcctgccggctcgaaatccttgatgctggcggcctgcttcatgatgttctcgcgcgtcagattgtcaccgcaggccttgagcacgtgaacgaggccttggctgacgatgtagccgtacatgaccgaagcgtcggctcggttcgcctccggatagtacttatccaggaattcgttccaggcgatcatcgccggatcgttcttccattgcgcgtcggtcggatccttgaagtattgtgacgagatgatgccctgggcgttctcgaagccggccggcttgatcacgctgccgatcgagcccgagacgttgttgaggaaatgcagcggcttccagccgagctcggcgttcttcttgatcgcctgcgccgcgaatttcggcgtggtgatgttcatgaacacgtcggcgccggtggccttcagtctcacgatgtgcgagtcgatggtcggctcggagacctcatagctgtcctcgatcacgatcatcgaggccgccttggcgccgaggccgtccttgaagcccttcagatagtccttgccgtagtcgtcgttctggtagagcaccgcgatcttggcgtccggcttgttcttcaggatgtacttggcgtagatgatggtctcgctctggtagttgggctgccagcccatcgtccagggaaagttctgcggatcgttccacttggtggcgccggtggcgacgaacagctgcggcaccttcttctggttcatgtatttctggatcgccgagtttggcggcgtgccgagcgagttgaagatcagcagcacctcgtcgctctcgaccagcttgcgcgcctgct

SEQ ID NO: 249 - DNA, 1562 bp, Bradyrhizobium colbertium
atgctgggcgacatcgagcggaatccgcactatgaacaagcagagatacaagcctccggagcgtgatctcccgtccaccaggctcggccgcatgcgtgacgaagtgctcaagctaaggcgggagctcgaagcggagcaggcacgagcggatgccattcaagctcggcgtctcggtggcactacactaaccaagcaggccaccacaaaggtctcaacgcgataagcgagacgagatattcccgagctttgacagccggcaatggctggcctgagcgcgatttttcgaagtcgatcgcgggaactacagcaccggctctggaatgacatgggatcatccagcctcggcggttacacccatgctttcagctcagctgcgtgcaggacaaaagcgtgcgaacctgcatcaaggcccacgctcagagggatggggccatcaccagcgagagtccttccttcacaaccagaagcgccgcgcctgagcggacgcccagcagacttttacccgttgtcggcccatgaccggcccgcattcgcagcagaggtcggcttcttcgttcccttcccggtgggaccgagcgagtagacattgtactcgccctgctccgaaaccgtgtactggtacggccgcccccacggatccagaagtgtcttggcgttcttcaaatagggaccgttccagcgaggcgcttccggcgtcgcttcgaccaaggctctgaggccggcgctgggactgggataggacccattctcgacgtagtacatctcgagagccgtgttgatgttctcgatttacagctgcgcggattgtgtcttcgcctttccaaaatagcccatcacctgcggagtcgccatggcggttagcgctgcgaggatgcccatgacgacgagcaactcgagcaacgtatagcccgctaccgccgaccggcgcttgtcgtaacgcggtttcttgaagcaccgagacgctgaagatttactcgtgtcgacggtcatgacgacgcccccaaacaagtacccttgcatttcggggtatcctcatcgcgccacgtgttcaccaggttaattcgatgaataacttcgagccagcctgaatacggccgtagtagaccggtgagaatgccagatctcgtgataggcttgcgttaagcattccagcaagttgacggcgctcgctgcctggaggcttggctcctcgcgcttcacactgcacaacgcatcgatcaacgtgaggatcagtcccgctgacgtccgcccaatcagttgcagcggtttagacttcgcactcgcgggccgtcgaaccagaccagtcggcaacgcgccacgtcaggccggccaagagcatcacgcgcccactttccatagacggcgtactcgccgtaaccgaaggggtaatcatatccatcgtcgagtctgttgtacgcgtaaggcgcgacgggatagtagagatctggcgtcaccacggtcacaatgggaggcgcgagtcgagcatgaaatccgtatgcactgcgccaatggtgcttccgatagggacccgcctgatcttcccccgataaagtggacgggtt

SEQ ID NO: 250 - DNA, 45809 bp, Bradyrhizobium colbertium
  misc_feature (9329)..(9338): n is a, c, g, or t
tcgcatgctacgaccgtggctgcagccacgtcgcggacatgaacaaaatcgcgccgctggtttccgtcctcgaaaacctgcggcgcctttccagttgcaagcgcagacgcgaagatggcggccacgccggcatacggagtatctttcggcatcccgggcccatatacattgtgatatcgcatagcggcgacggagccgccggtggaccgcgcccaattggatgcaaagaattcctgtgcaagtttgctggtggcatacgcgttccggggatccagtggcgacgtctcgtcgactagtgccggttgcaaaggctgaccgcaggccggacaaggagaatcgaattgtcttcgcgccatctcgtcagtgctgcgcggcgccggtccgaccaggccgtgtgcgaggcaccgacccaatccttcgccgtagaccaccatcgaacttgcgagcaccagccgcgcgatcttggtgcgtgccattgccgtaagcagcgaagccatcccgacatcgttcgacgacgcatagtcgggatagtcctcgatgccgactcccagccccaccttggcggcgaggtgaatcacgacatccgatctgtacaagattcgcgccatcgcgtcggtgtctcgtacatcggccttggtgacggttgaatcaggtgacgtttcggcccctccatgaacgtcatggcgcaaggagtcgaccacgacgacatcgtgatgtcttgcgcgcagagcacgacacacatgacggcctatgaaaccttcgccaccagtcacgacgacacgcattgttacctcgttacagtcaagcccgacgccgaaccgcgtcgttggtgtcgcaagccgaaagccagccgcaaaaacaccgcggaaatcttatagccggccataagtcccgctctcaggttgccggacacctttgaaacgccgccgcgccgccgtcgatgatcgacagcgacctcccggatgcgcagtccggatgcagccacccgcatctgcatttccaggttccagccgtaggtctgttcaatcatcccgaggccccgcaatgtttcgacgcgcatggcgcggaagggcgacatgtccgtaaatctgactccgtaagccagctgcatcagcacacctgcgacccgtccggcgatgacttgttggggagtcatgctgccgtgctcccgttggcccaacagtcgcgatcccatcgcaaaatcacaatgattgttcagaacaggaccaaccacttggggcaagaacgaaccgacatcgctcccgtccccgtccaggaagcagaccacaagtgcatctttcccgaccgcagcaacaccggccgcgcaggccgcgccatagcctcgcctgggctcccaaacgacattagcgcctgcctcccgtgccatggcggccgttcgatcggtggacccattgtcgaccacaattatttcgccgacaccctgctcggcgatctcgcgaacgacggaaccgatcgcatcttgctcgttcagacacggaataacgacactgaccaaacgcatgtcatcgacgactgtcattgcgatcccgcccgtttcaattcaaagacaaattgccgcgttgcgggcgctttggctccacaaactccctctagatgggcgattgccttgccgtcgagttcgtcgaacagcatcgacaacgatgttgcgtcatcgacatcgtaccaacccggcaatgtgacgacgggtagcgcgatttccttggcgcgttctagtgtgcacctatagacctgttcggtactccaggggatatcttggaagagcctgtggtgcgcgcgtgagatgccaatgagcgtgtacccgccgtcgaatgccgggctgagcaccacattgttgcgcataaggaccgcatcgactgcctgtcccaacagttcgactggtaacgtcggtgagtctgaattgacgagaatcactcctgcatgtcctgcggaaagaagttcttccgcgccaaagcggagtctgtcgccgaacgaggactctctttgtgcgagcaaaccgaatgacggcgggagatacgatcggagctcgtcttccgtcccgacaggtgtgtacaatgcatacggcgaggcatcgccgtgtttgcaaacgattgcgatcgttgcggccaggtcacggatgaagcatcctgagatctgggcagcttgcttctgtgtcaaaggcggtgaaagcctggttttggagaaaccggcagagggcgtcttgcagacgattgcgatagccactttcttcatcatattcaatccgtccgcaggcacaaaaaggcatgttccagatctgcgtagagttcatcgacattttctagacccaccgacagccgcagcagatcgggagggcagggagaacctgcgccttctatcgacgatcgatgctcgatgaggctctcgacgccgccaagcgaggtcgcacgcttccagagcttgacttgagcggccgcgcagatagcggcgctttctcctccggccagtctgaacgatagcatgcctccgaagccatttatcatctgccgcaacgccacaccgtgtcctggatgcccaggcaagcccggatagagaaccgcactcacggcagggtgacgcgccagtcggtgagccagctgaaacgccgacgtacactgttcgcggactcgcacatcgagcgttcgaattccgcgggttagaagccacgcctcaaaggccccgagcgtgctgccgtgggtttctctaacttttctgatctcggtccagaaacgatctttcctcaaagtcgccaacgagccggcaacaacgtcggagtgtccgttgagatatttggttgccgaatgcatgacaatgtctgctccaagcgcaagcggtcgggtcaacacgggagtcgcaatcgtcgagtcgacgcaaagaatggcgccggcggcgtgtgccaggtccgcaaccgcctcgatgtccgtgatcgtccagagtggattgctgggggtctcgacccaaacgagcttggtcgacccggctacaatcgcggaagcgacagcagataaatctgaggtatcgacgaatgttacgtcgtgtccgtagcgatggatctcgcggagccaggaacgaagaccccaatacatcacttcggaagcgacgatgtgggagggctgccccagagcgagaaatacggacgttgcggccgccatgccggagccgaaaagaagggcctcctcggcgccgtccagggcggcgatcagatcctctgcgagctgcacggtcttattgtccgtgcggccatatatatgtccggagctgtacccgttatcgggatcgcggataaaggtggcagcaacatgaatcggcggaacgacacccatagtgacgggctcgtgcgcgcccaacgcctgcgcggccaacgtactcagatgtttactttcggcgcgatcatccatcacgcgcctgccgtgcgacgtgaaacagctttgatgggagccattcgcagctgaatcggctgcgatgtatgtcggctatgaggatatagaaaattactatggcgggtcagcgttgacgggtttcgaaataactgtggttttgccgtcgatgatagcggcatcgtcatccggacagacaaccctcgcaaacttctatctctctattgaatttctttttgtcgcaatgtcaatcaccgtgccggctcgcgttgagctcgtcctcgaacgggctgctttcgggcgggcagcgctttgcttgcggtgatgaaagtgtaaaaatgagagccgagctccaaaggttgtccgcctgtggatcgcagcgggatcattggcgcgcttgcttccaccgcgagtattttaggcgtagcggtgcggccgtgaaatcgctcgaccccatattcccaacgagagacgcgcgcgggctttggacggtaaggcgagcgctggttgctcaaatgttggcctgcggcttcgttttaacaccgggcgtctgacgtagttgcaaggattgtagcgggcctctaggtgcgtgccctagccgtgtgcgacaggagacgggagttgctgggtgaactattgagccttgcctggcggacgtttcttaggcgcagacagctctgcagctgcgacgcggacgagttgcgacatccattccggatcgtcccaccgatcggccgaaacgagtaggctgggtttggcgcctgagtaggccggagcctttggcaatttgcctccgaacgcttttccggcgggggtgatttttacaaaaagctcgtcgtcgcagaccagcgcgacgaccttgccgtcgcaaaaaagtccgtactcaccgaacatctttcttgcagtgatagaacccgcaggacggatttgctcgacaatatagttcaccgtgctttgcttggaaggcatgaacctctatccgggcattggagaacagagctcgaccagacacccgtttagatcgcggacgtagccaaccgtctgtccccagggtttcgatgcaggcgatttcacccctattgcgccggcggtgactgccttcttgtaagcgtcatcgggatcgtcacacacgaaggcaatctcgaaaccggctgctgcgtcggcgctgcggttggggcggatggcaagctcattcattttcgccatcagctccccagcgaatgcgagcgtcacgctaccggtgtccaattcggcgtagcgcttgctttcgtgaacgaagcggactcttaagcaaaaagctttctcgtagaacataacggtttcaagcacgttctcaacattgatgatcgtgtatccgagtttcatgcccgtaatgtacgcgactatcttctcaggtcttgaagaaaccggacacggctcacagaggcaaacccgcgagcgtgacatctggaatattggctggtgtgaagccgccaagtgcgcgaaacgtgcgcgtcatgtgtgcctggtcggcataaccggcctcggttgcagcatcgaccggatcaaggccaacgtcgcgaaccagtctgagagcgcgatgaaactgcagaatcatcgagagggcctttggcgtgaggcccgtactctccttgacgcggcgcctcacggtgcgctcatcgacctggtgcatcttggcgagttcggcaacagacacgcgcccacggctcaaatgaaatgcacggataatggccatggagagacccgcgttaccgccgctgccgtcagctcggcagcggcttccgacgaagttcaccagccgagccacgagtgcttcgactgaacgcgcggagccccgcagacctgataacgcggggatgaccctgatcgcgtcgtcggcggcaaaaactgctcggtgatcgatgccatccttacgccgagtacgggccccccagttcccggtcgcaaccgcacgccggcaaatccgatgccgtgacggagcggcaccatctgatacgtcctcgatgggccggcgatcaacggctcaacattcccgattgcgccggcatcatcgaactcaaatcgaagaataaggtcgcttcgaccgtcgggcaaaacgcgatgttcgccgttctttcgggcaatgcaggtccacacggcctcgatgctgccgccttgatcgtggttgtaggaatgctctcggtgttcggcgggaagaagcatggcgtgtctgctttggagcggggcgaacgtggcaagcgatgattttcttgtcgcagttttcggaaggaattcgcgagctggaccggtcaatgctgccatcgacaaccttttttcacctctggtcacctggttacgacctgatctgaaagacttcgccttagacggttcgcgctcagccgaatagatcatatgtcggcggcttttggtaccagctccatgtgctcgtgaaacacgacgcccgtcagcgggtcgacgctctgttcccagggcctggacgaaagcacagatttcgtgtgagcgtatccggccgcccagcgttgttcgactccctccgtgctgaagtcgatgtccttggtgtgcgtttccctgtcaagctgcggcgcgagcaagcgaacgacgtgcatcgtcgtctggcatccatagctcgccagttcctggacgtcggctccctcacggatgccatcgggcaggcgcgcggctagactactgatgatgtgacgcagtttgtggatttgttgctgacgcgcgatttgacttgcgatgcggctcgagtactgcacatccttctggcggttgagaacctcggccattgtttccggctcggcgccttgcgggttccaaagatgaactgaaaaaatcagcgaatcgcgccgagggttgtcgtcgaagacagcttccgttggcgtattcgacagaattccaccgtcccagtagagctcgtcatcgatccgcaccgcggggaaggcggggggcagggcgcccgaggcctgcacatgtttgacggttatggcctcgtcccggctgtcgaaatagcgcatttggctggtccgcacatgagcggctccgacggtgagccgaagcgggccttgattaatcatgtcgaagtcgacgagctcgcgtaatgtctgctcaagcggcgaagcattgtagtagcccgcttgctccggcccgagcacatggttgatgccggcgtgagccagcggatttggcttgaaaaaacccggcaagccgttcgccactgtcgaccaatacattgccgcttcaccaattgcggggaagtaccgtgcatagctccacgccgaaggccgcgacatccgttgccagaactctcgcaaacgaaaaacgcgattctccggtgcgttgccggcgatcaggctggcattgatcgcgccgatagatgtgccgatgatccagtccagttggacgcctgcctcgtgcagcgcttcatagacgccggcctgatatgatcccaacgcgccgcctccttgaagcacaagcacgatctgcctgggcggaggcgcgcaaccatcaatcttgggcgaatgccttacgttttgtgttgcgtccatggctgaccctcgaaaatatgggcaatctgaaatgcgctacgcatctcaagatcgcccgacattgcctcgctcgtggagcgcagctgtttcgtgccgtccagaattagatcgtccagcgttcatagcattgatctcagcgtcatgttctatttggccatttgctgttcatgacctcgtgaatgagggcgccgacggacgcattgtgggggcggcctacaaccgtcgtcagatgaacttctcgccaaagctccggttctaccaacggaacaacagccaactcaccctccgggactgagttccgggccgcaaacccaaagccaaacccgctggccaccatggcggagatccagtcgtctcgatcacttttgtaaacggtggtccacattgatttctgaggctcactgggatcgtccgggggctcggcgaactcgcaagtcgatcgcattacataattctcgtctgcgagctcggaggcccttatctgccccgattgggcgaatctgtgttccttgggaaggatgatcatcatccgttcgtggaaaagacctatgtagtttagtcgggcgttgggcgaccgcatgggccttgcgtagatcgcgacgtcgatttcggcgtcgagcagttgctgctcgagtaccgccgctgtcccgtcaacgatttcgaactcgatatgcgggtggcgtcttcgaaaattcgcaagcgtggtgatcaggagcttcggcgcaatcgtgcacatgaccccgagacgaactttcgcggatcgcctcgaggcgatgtcgtccgtgagctttttaacggccgtcgcttgctcccagacgttctgcaaatagggaagaatggttcgacccagttcggtcagctctaccttcccatgctcgcggaagaacagggagccgccaaactctttttcgagcagttgaatagcgcgagtgagcgatggctgagcgatgccacatttttttgctgcgcgggtaaaattatgttccgagcagacttcgagaaagtatcggacttgttggatttccatgtggacctgcgcatcatgtacccggcaaacaccgggtgcagggcggcggcagggcattcacggtagcctgtacagctcgaaacttcggctggcgaaggaagcagcagctattccgcatggacgcgagctccgaagtgctgatgcggccgaagctgcaccggtacctcgtcgcgcttcaagccgccactctcgatccacagcatcgtgtgttcgtatgagcgagcgatgtgttggtcagtcatggaaaaatcgtaaggcgaccccgacagcgggcagagtgggggaacgatgtggaaatcgatgtcgtccccgacagcttcgacttcctggatcagttgtctcgcaatcagcaaagtcaacgcgtgcagggcgttcgcgaccgcgcccgtgggcggcgcctggttggcgcacgcgtatcccgtaggaagcactatcaaacgattggcgcctttcagcatcgcgatccggaccggcgtgttgctggaaatcgcgccatcggaaaggtaccgctcattgtaaagcaacggaggaaaagcgccggggatggcggtcgtggcagtaatggcatcttcggctgatccggtcgacagcaccaccgtatctccagaggcgatatccgtcgtcaccacatggacaggaattttcgcgtcttccagatttcggtagggcagattgttccggatgagcttccgcacgcccgtctgcgataccagaaaatcgcgtctccaaaggaaacccagcatcgtccggatcgtgaccggaaatacgtcctggcggcgaagattgcgccagatctccgccaggcgctgcacgttctgaaaggtgggctcccccgcataatacgcgccgttcatggcgccgacgctggacccgacgaccatgtcagccacaacgccggcttgcgccagcgccagcagcatgccgacttgtatcgcacccaggctcccgccaccggcaaatacaaatgccgtcgtggagtcgcggccgtggttcatacaatctcctcaatgtgaacctccgccgtttttgggcggcagagtgaggccaacttgccatggcatgcgtgtttcaatgacagatcggcaacaccattcacaccgagtccgctcacgtccgcatggttggcgcgtagcgtcggtttaggcccgccgtcacatgccgctgaaccagttgaacccttctttttgatagtacgtttccggaaaatcgttcgttacctcaatggaggtgatccatttggcatttttaaagccgattttcgtggccgttcgtagccgaagcggaaatccgaaggggtccgcgatcgcattctttgcgtattttgtggccaggattgtctgcgggtgcagcgccgacggnnnnnnnnnngatgtcaggtcggcaccgatccgctcgaggaactgcttgaggtttggacctgaccactgcccgatatagtcccagccttcgatgcaaatgtgcttgatgatcatttcctgctcgggcaaggcgtagatatctcgcgctgtccaggaacgtttgtcggcgacgcgaccggccaattcgagcttccaggtagccgcgtcaacgggttgcacgtcctctatgttataatgggcgttgaaacggggtggcttgacgacctgcgcttctgaatacgtgggcgcgaggtgattgggccgaaagatcagaccctgcgcgaaatcattccagcgcgacaccgctctcagcgccacctggacctgatcggcttcggacacgttgcatccagtgagaaacgtgagtgcaccaaggctgaccgcaccgcggagtacttttcggcgatcgatttcgtgcaagatcttgctgtccgctttcaagatctcctgatcgatcgccgtcggcggccgaaatatcgattttgatggcgtgcgcttcatttgaggttctcctcgatcgtcgtactcacatcaagtctcatgttcgcagcggtgccatcatcatccagcacgggcccgcccgtcaccattgccacgagcgttttgggcacaagcaaggccagcgcgacgtgcacgaccagaaacagaacgatcgcggtcatgcagagaaaatgaaccaagcgcgcggtttgaaagtcgtggaataggacgtaaagttcggaaaactgcactggtttccaaatggcaaggccggacagaacgacacctattccggctgcaatcacacccaaatacaacagtttctgcaccgcattgtatttggtcgtctcttcgtgggcgagcttgaaccgcagagcgtctcgaacggtgtacagaagctcgcgtcttccaatgggcaacagcatcctgcggaagcggcctgtcagaactccgtaaacgagatacgccaggccgttgaagaaaataatccacatcccgaaaaagtgccattgtaacccgtgttgagcccaatggccgatcgtcaaataatccgggaaatgcagccaaccgaaaattacctcgtcgttgtagattttccatccgctgccgatcatgatgaacatcgtgaccgcattgatccagtgcatcactcggatcggccacgggtgcagccgccgtggattgagttgtggcttcccgcctgtcttgcttgatgcacctggttttgcggcaacgccttgcatagtcatgacctgtccccaaacgccatggatgatcattcggcgttttcggaaagattgccacgaggctccttcataaactactgcaaggatttgtattgcgtcatacccaaaagctatcgggcatttcgcttgcggagagattttagcgctcactagagttcctgatccaaactcagtattgttgccgttgttgtcggaatgggagtttgaagtcgatgaggctagggcttgcgagagttgtgatgctgttttcgtacgttttatgcatcgcagcctttagtggtgttggattcaaggcggcggcgcatatgcctcccgcatcctcgaccgcgtcggcagaaaagtcgcctccgacgcccgaagacaaaatgcgcgcgcgctttccgcagccggtcaaggttggcgacttgattggtttgcccgtgcttgacggtcaggaccggacattgggttacattgacgacgttgttcggacgaaagatgggaagatttttctgattgtgccgtatggatcctgggccggctggttgaggcacgttgggccgttcgcgcgctaccgtcggcccgttggggttcccattgaggtggtcgccatcctcggccgtcaggtcgacgctattgacatggatcgacccgaattcgacaaagcgcctgcgtggcgcgttacggatgggacgcctatcgagagagacgattccattctgattgcgttgggccggcgttgaaagaaccatggctgcttctctgcaattcaatttcgtcggaggtgatgttggtccctggatgatcgagcggattgaccgtgttgccggaccttcgcttcctgtagctgcaaagcttgccattcttgccgggcgagactcccagattccggtcggctcatcctgggtactacggggggccaccggaaatgttcgctacagcagcaaagatgagacggcctcgctccgaaacaaacaggaaggacttgataggccctcctctgtttgcgccgcgctcataccggttcgcaagatcgacgcgtggtgggaattgagtcaggacgagcgcaggcaaatcattgaggaacgctcgcaccatattgagctgggtttgaagtacttgccagccatcgcgcgtcggctccatcactgtcgcgagctcggcgaaccgtttgatttcctgacatggttcgagttcgccccggatcattccgataggtttgaagagttgctcgggctcctgcggcaaaccgaagaatggagctatgttgatcgggaagtcgacatccgcttgcggcggtagccacgccgtatcgttgtcttgcggcgcgcagactggaaacgcccgatcggcgacaacgtccggagcgaaagcaagcagctctctcgttactttcccatctttgatgcctatccagtttgcgaagctcacagaacaagtgatcattctgcggcgagctcgcctttgcggatgcacggcgtgataaaacgcccatagatggagattagctactggcgtcgagcagacctgctatggtccgttcgatttgctcgtactggccttcgccggcgtgctggaacacgatgctgccgtgctggtcgatgatatactgcgcaggccaatactggttgcggtacgcgttccaggtcttcgaatcattgtcctgagccaccgggtaggtgatgccatgccgcttcagcgcagcctgtacgttgcttgcggaacgctcgaacgggaattcgggggtatgcactccgaccacgacgagcccgcggcctttgtatttctcgtagagcgcagtgacgtgcggcagcgtgttgacgcagttcacgcagccataggtccaaaaatcgaccaggactaccttgccgcgcagattagccatgtcgagaggtacggaattgaaccacttggtgatgcccacgaaatctggtgcagtgttccgagtggcggcgacctcaagccgcgtcttgaggtcctgtggcgcctcagcgctgagcgatgtcatagcgcttgcggcgagactggttaggatcaacgcagtggcgctgagggagcgacgcagcggcataggagctctccgtgttttacaggccgatctggccgttgggatagaagtgggtcagccacgccactatcagcgtgtcgtattggaagtaggaaagcgcggccaaaccgatcacgaccacgccaaaaccctgctgcagacgcggcgcgatccgcgtaaagctgcgcagccgggtggtgaggacctgtccgccgtaggaaatagccagcatcgggatcgcagccccgaccgcgtaagtcacaagtagcgtgctcgcccacctggtatcggtcgacgtcgcgatgacagtgaggatcgagccgagcaccggaccagcgcaaggcgtccagaccaaccccagcgtggttcctagcacgaaaccgccgaaaacgcggtagtttgccgaaacgctgacgttggtaaagccactgaggtggctcatcagccgctcgagcggcagaggccatagcatcaataagccgaagccggcgagcaggatcgcagccgcgctgcgcagtacatcggggtcgaactcggacacgcgaacgatagcgtttagcgcgagcgcaacagccgagaaggaaaatacgaatccggccgcgatcatcacgggtcgtgttttgctggtctggccgaccgacgcccctaagacgatcggcagcatcggcaacgtacaaggcgcagcgaccgtaataagacctgcaattaaggcaagaaccacgtcaagcattcgagcgatgttccattggcagctgtcaaaggccgttacgctacgtcggctgtaatcgttacgcgtgagctttcacgcttccgtgacgatctgctcgcgagtgagtgcgattgcttcgagtttgccgtcaaaccatgacgatcggttcgaagcatctcgtaatggtcaccgactaagcgagtcgagcactgacgctgtttcctgacctctcgaagcgcactcagcccaactctagcctcgcatcacgtccatgaggcgagctccatactccgggccctgctgtgctgcaccccgccgagatgtttactttccttgctgtcacgggaagaagctggcttcaagcccttgctcccacggacaaaaggaacgcgtctgtcagtaaaggtgagcgaagatgagggagcctcgggtcccgtaatgcgtggagtgcgacgcgtggccaggaggtatgctgctgctccgctcgcgtgccctcgacgcggtttccagccaatgcacaggaaggcgtgtggtgatcgacctcgtgagcttcagcgagggcatcgaagcccgcgcgcgttcgccggagatatacggggattgcccaccttccagcctcccaaatgcctaaggttaacgccaagcttcagcagcggttgaactattggaagatcgcgccgatcaatcgcatctgctcgtccatgactgtgcgtttgtgatgatgtgcgtttgcgagtgattgccgacgcttatcctgttgcggcgttcgacaggaattcccgccactgcgctcgagatggacggccagtgcggtgctcatcgtctcacatctgctccgtcatcactccgtgcttgccgctccgacggaggaccgtctcatggcactcacaaaggtgcgcttggctcgcgcgaacgagtattttgaagaacacttggcggacgacttcaatctgaccgcgatggctgtcgcggcagatctttcgccgtttcacttcgcccgcgccttcaagcgggaaactgggctaccgccacaccggtatcttatgcagcggcgcgttgagcgagctcagacgttcttggctggcagcaacctcgccctgagtcacattgcgcttagctgtggcttcgccggccaaagccacttcacgaccgcattcaagcgagcgataggaacaacacctggtgtatggcgagcgatggtaaagctcgctcagctccggatcgtcgtcgacggggcggccgcctgcctagcactgcttgtcgcgcaccggctccgttctatgctccctctttgcctttgcgcgacaccgctgcctcacgtggtgtctgacgggttacgcggctgaatatgcgggagaaagcggccgcgctgtcataaccgacttctgccgcgacgctcttcaccggcttgcctttggcgagcagctggcgggcgagggtcatgcgccaaactgtcagatagtccatcggtgcccgtcccacgacggcgcggaagtgtgtggcaaatcgtgtacgcgacatcccggcagactcggccaggtcttcgaccgaccaggcgcgacgcggagcggcgtgcagcgccgtcaatgctcttcccaatcgcgggtcggcgagacccgcgagcacaccgccagcaactgctccgctcgacaccacgtgccgcacgatcaagatcagaaggtattcgaaaagacgatcgagcgccacctggcggccttcatgctcggacaatccctcctcgaccagcagcccgcagatcggcgcgagcgcagggtggcggcttagcggcatcatgacgagatcggggaggccttcgccgatcggattgccgatcgaagctccaaggtccacggtcgcgcagataagatcagcgccgccttttgcacttcccgtgaagcgatgttcgcgcgcgcgaggaaagaacagaagcgtcggttcgtcgacaaaaacgtccggcacgcccgcttgagcgagcgtcagcgcgccggatcgcaaaaagtgcaaatgtccgcattcggtgaattgcgcggtcgcgcatagattgcctgcgaaaaacgcccgcgcggttggtgcgacgtgtgtgaacagggcttcgaactggtcagtcgcaggcatggttcggaacgatcggcaatgatcttgggaccaatgctactgataatcctgcagattggtcctgtgcaagctcttaaccagaaaggaccaaacaatgtcccgtattgctccgaccgatcccgccaccgccgactccggtgttcaggcggtgctcgccgccgtcaaggccaagatcggcatgacaccgaatctcttcagaacattcgctcgcgcacccgccgtgctgaatggctatctcgcgttctccgaggcgttgtcggccggcgccttgaccgcgaggcagcgcgagattttggcgcttgccgtcgcgcaagccaatagctgccattattgtctgtccgcgcacacgctgatgggcaagggtgtcggcctctcgacggaagccattgaggcggctcgacgcggcaccgctcatgacggcaccgataaagcccttgtcaccctcgcgctccgcattgtcgagacccgcggtcaaatcaccgatgccgacctcgcttctgcgaggcttgctggtcttagcgatgcgcacgtcgtggaggttgtcgggcaagtcgcgctgaacgtgctcaccaactttaccaacaatgtcgcgctcaccgacatcgattttcccaaagttgacccggcggtcgcggcctgaacccttcatctagctctaatgaccgggccggcagcaggccggttcggtcgatgaggcgcccaggcaaaattcagttgaccggatcgccggtcgtcaagatttggggaggcgtttccatgcccacggtctgcagcagcattccatgcaattgcagtgctaacacgaccttttcccacctccatcaggctaagacctgttttggagagcgcgacaggcgaacggtacgccatggccaaaaaatgttggggcagctcaaacccggccccaacagaaaggttgcatggcaaaattccacgagcctttttgtcctaagccgcgcaggctagtcctcgatcgtcctgtttgtcagagatgtccaggaagtagcttgaagcggctcgttccggattgtggccgcaatctcgaaaggcaacttgaccgccaatcgctggaaacaagcgcatggtgccagaacagtcaggcgtctgctagaaagcagcctcggatcaggtgccgcttcatactctgaagtgcattgctctggccgaagctatcgtgttcgcgacaatcaggtcggccgctccacagcagccagcccccgagagctcggaagttatcctcgaactcacgtctggaggatcttccggcgcttcgttgcctggccgatcaccctgggctttgagaagtcggcctccgcctccagaacgccgtggctgttggtgatctcgccggtaaatgcttccttccaatctcccagcagctcatcccggtcgggccagctgtccatagattcgtcgtcgcgatacatcgcaaaaggccgcaacgtactttcatagaaatccacttgcgcgtgcgaccggtactggcttgtctggtagcagttccagtgcagcacttgccccagcggacgacggtagcggcgtctctgatcgaccgccggatagccaatcggaatagtgccataagcccgcatccacgccggataacccaacacgtcggcaagctctcggttggtttcttcctcgccacctcccgacaaccaagccgacgtaaggccctcggcggcgacgccgagctggatgttctgtatcgcggcaccaagcgagcagagaaaaatggcctcgttgtttgcgcgatactccgcgtcccattcatcggttgtggcttgcgggaaacaggccttccaacgcgggtcgccaagcacgaagacgattgcgatcgtattagccagataggtttttttgacggccggaaagcctttggcatgatcgaccagacgctgcgcctggcgcaagaacacggccatcacgcggtcgcgcacatcagggtcgtcgacaaccacaaaatcccagcactgcacatttgcgccggagggagcccaccggccgcaatcgacaatgcgttgcagcacgtcgcgactgatgctccgacccgcctcgaacttccgtacgctgcgccgccttcgaatgacgtcctggaaaagagcatcttcagccatggccacctcgcgctcgagcgtctgttcgaacaatgatagcgcaacaccgggaatagagcacctcaattccgcagaagcatgccggttagcgatgcgcgcctcatgggcggcaagctgatggcgcatattcgcgtgaatagctgcggtgaacgagggtgactgacatcgaatgggtagacaggcgagacgggcctcccccaagcaaatgaatccatggcgttcacacaattttgtttcgctcgctacaaaactcggctacaattgccgcacatggcgcgacagcgcaagctgggggcgagcagatgattaaattggtggactagattggtgtgccccgtggattcgacgaggcgaaagcgttttgtcgcgcgacccatttgcagggacggtttgcgggctcgtctgtccgcaatctgaccgcacagatgggcatcaacgctccgagctattacaatgcctttgacgaccagccaaccgtgctcgacaaggcgcttgagcgctgctggtaccagtcgttgcgcagcccgatacggcgtgtgggaagtttgttgtctcccgacaaggcggaggccgagctttttcttgcttcaattaagaggtcgctcgccgcgcctgaccggcatggttatctgatcgtcaactcagctcgagagacttcgggccacggcgctatcaggcgggcgaccattgccttttacttgcggagatcgagacgttgtcccggcgctacgttgggcgtggccgggtcagcgtggtgcttggaccgcgggccgtcgcgaggtcgaaaccggaccgcccattgctcgaggccaggggtcctccggcgatgcgctgcttcatccgcgcgcgcgccgacgggctaaagtaattccagacgaaacctagcgtctgggggccgggattgatgttggatgcggcggatccgctgacgcgagggagaacagtatgattcgattctacttcaatctttccccgaacccgaccaaggtcgctctttttcttgaggaagcggggttgacctatcagcctgtaccgatcgacacccgaaagggtgagcagttcacgccggatttcctggccatcaatccaaacggcaaggtgcccgcgatcgaagacgacggtgtcatcgtgttcgacagcaatgcgatcctgctgtacctcgccgagaagacaggaatgttcctgccgcgccctgagagccgcggcgcgttgctgtcctggctgatgtttgttgcgagcggcgttggtccgttctcggggcaggccgttcatttcaagcattttgcgcctgagaaagtggcctacgcccataaccgctaccagtacgaggcgatgcgtcattacactgtactcgacggccacttggcccaccgtcgctacatggtggacgataactactcgattgtggatatggacgtgtggggatgggcgcgcatgatcccattcattgtcggcgaggaggcgtggacgaaattgccgaaccttaagcggctgcatgacgaggtcgcggcccgtcccgccgtggctcgcgcgttggagctgaagaataagtttactttcaagccggagatggatgacgaggcgcgtcgtcatcatttcaagcatctcgcgctgcaggtcgcctgatggctgagtgaaggtgagggaacatgttttcgtaactcggcacttacggaacgggacagcggttttgctgtcgaggagatgatcagatgaggacaacactatcacagcagctcgaggcgtaccgcgcggcctcgatggagcgagtcccggccgaccggagggctgctattgagaggcagatcgcgcagttggtggagacgggctttgccctacatgccaagcgcgtcggcgaccgcgcgccggacatcgtcttgccggatgcccacggtcggcctttcgacgtcggctcgcttttgcaacacggacccgtggtcgtcacgttttatcgtggcggggggtgtccctactgcaacctcgagctcaaggcctatcaggatctgctgcctcacattgttgcagcgggtgcaaatctggttgcgatcagcccggagaagccggatgattctctcgacacggcggaaaaaaatgctctcaccttcacggtgctcagcgatgcaggacagaggatcggaaaggcttttggcctcgtctactcctttactgatgagttgcgcgccgtttacacgtcactgaacatcgatataccggaaagaaatgctacgcccgatgattggtctttaccgttgtcggcaacctacgtcatcggccccgacgggcgaatcatgttcgccgacacgagtgtggactatcgttaccgcgccgatccattggatgtgttgcaggttctgcaatcccgcgccgcggcagagtagccgatcgcttggtgatcaggctggcagtgtcggtgggcccgtcccgccccgcaccgaaactgatgtttgccttgatgcggccctggaaaggcctttgtcgacggtatagccgtcttctcccgtacgctcacccattgcaacagccgacgaactgggatcgcaccatcaaccaatcctcgcccccggccgatctgaactcaaggccgcagaggcgctggtccggtggaatctttcgaatcgcggctcctcgccgccggcgggttcatttcgatctcggaagcaagcggtcacattgtcgcattcggggaatgggtgctgcgccctgcctgcaaggcgcggcggcctggctgggctgccggcagagcagctccaccttgaggtcacgaattccgcccgtcgggcagatctgtcatgttcagactagccgccagccgaaaaggcctcggcgcattggacgaatctcggcgattttcggaagctgacctgcaccaatctattcgagcacgatgacccggccgcaagagttgccgccttttcggctcgttcgagcaagcagtcttccgtgcgaacttcgcttgtcggccttggcgggttggtgccgtctggcgccgccgattgtgcatcgtgagccatcaagggtgatcacgcgtctcgcttctgatccaatcgacgaaggctcgggctccggatgtgagccgacgccgctcaggcgtcagcaaccaatgcccagcaagcggcgaggatatgatgcgaggacagggagcgaccaaagcgcccgtccgcaagcggtcatcgacgagagttttgcggccaagcgcaacgccttggccatcgatcgctgcctgcagcacgatgttgtagtcggtgagccggatcgtctgcgccgaccggaggtctagccccacggcttcggcccagatgtcccagtcgaacggacgtctggtcagcaatagcggaaacgcgagaacgtcggtgggctcgatcagcggccgcactgcggccagtaccgggctgagaaccggggtgagttgctccgcgatgagcagctcggcgcgcactccaggccagcgtccatcgccatagcgcaaggcgagatcggcttcactggcgttgagatcagcgaggcgcagggtcggatcaagctccaggtcgaccgttggatgcgccacgcggaagcgggtcaatcgcggcgccagccagttggccgcgaacgatgggagtagacttacccgcacggtctggcggacgcgagaggaggtcagctcggccgtaccctcggccaagcctgcgaacgcgcgcgtgacgacttcgtgatagcgttcgccggcgggggtgagcgcaacagtgcgcgccttccgctcgaacagctggatccccagcgtcccctcaagctggcggatgtgatgactgacggcactttgcgtgatcagcagttcttcgcccgcacggcgaaagctcagcagacggccaacggcctcgaaggctctcagtgcatggaggggcggtagcgtggaggaagcgcgcatgcgtcgatcctaatagtcgtgcaactcattagctagatcgatcgcacgtcgcaatgctttgaattggtgcctgccggtcgcctttggcaaaagaattaggccagaggatcgatacgatgccaaccgcgggacgtttacacaaaccgggctacctacaaccgagcagggctccgatcgcggactgtgtaatggagggccgatcgctgttggtgatactttgcgattgcgggaggcacgcctctgccgcggacgcgatggcagcgctttcaggctggtctgccgagatcggggctactctgtgacggcggaaccagctgtgaccgttggccatacttcgctggacgtagccgtcttgcgtgcggcgacgccgggtgccgagatggtcgcgcacttcaaccatgccggcgcctcgctgatgtccgagacgacgctcgccgccataaccgatcacctccagcgcgaggcgctttacagaccgcacgaagcggcggcggaggtgcaggggcgcatcgagcaagcgcgcgccgatgcggcgacgctggtcggggcgacacccgaggagatcgcgttcacctcgagcggctcggcgggctggggacttaccttcgccgcgcttccgccgctgcgcgcgggtgaccgcatcctggtcggtcgacatgagtggggcggcaatctcgcaccgatgcggagcgccgccgattacgtgggagcgcaggtcgaggtaattccgtgccacgaggatgggacagtcgatccggaggctctcgcggcgatgctcgaccggagggctcgtctggtctcgctcacttggctgccggcgaatggcggtctaatcaatgacgccgccgcgataggccgcgtgacccgggcggcggccgtgccgtacttcatcgacgccggtcaggccctcggtcagctgccggtcgacgtcaaggccctcggctgcgacatgctgaagggggcgggtcgcaagcatctgcgggggccgcgtgggacggcgatcctctacgtccgtcgccccttcttgggcgccctgcagcccggctttctcgacgttctctccggctcatgggtggacggtgcgccggccccgcgcaacgacgcgcgcttgttcgaaacgagcgagattccggtcgcgctgctgctagggctcggggcggcgttgcgccaggcgctcgccctcggcgtggatgcgatccgcgcacgcatcgccggcctcgcggagactctccgcgcaaggctggccgacatccccggggtgaacgtcgccgacctcaggtccgaacgctcgggcctcgtcgcgttcaccgtctcgggcttcgaggcgcaggacgttaaggccgcgctcgggcggcggaagatcaacgtcggcgcgaacggcgtcgcccacaccccgctcgatatgacagcgcggggtctcgacgggatcgtccgcgcctcgctccacgcgttcaacaccgaagacgaactcgaccgcttggtcgcagcagccggcgcgatcgcggcggctcaaccggccgtcaaactggagattgcctcatgactttcgacctcgttaaacctgcggtgctcgccgccgccatgctcgccatgggcgcagcccatgccggacccgccgagcggaccgccgcggcggagaacgcgacgctgagcgaggacgccccggtctattttgtcattcaccagcacatcaccgacgagaagcgcttcgacgcctatgtcgccgccgtcactccgctgatcgcggcgcgcggcgcgaagctagtcgcggcgggcaccccagagacgatcgcgggcgacagccggttcgagcgcactgtcgtcttcctgtggccgtcgcagcgggtcttccgcgccttctggacctcgccggaatatgcggaggttcagaagcttcgcgccggcgcggtcgagtggaacgcgcagctcgtgcctgctctgcccgaggcgaacaccgcgagcacaggccgatgagcgagaatccgaccgaggcggccgcgatcgcagcgatactggcgcgctacgccgaagccggccggacggggcgcgccgagctcgtcgcgcaggatttcgatccgggggctcgcattcgcggccggctgcacggcgcgcttatcgatcggaatcgcgaggagttcctggcgttcatggcggaagcgcccgcaggcgggttgcgcaccgagctcggcttcgtcgacatcgccggcgacgcagcgatcgcacggctggaatgccacgactggaacggtgtccgatacaccgacctgctcacgctgctgcgccacgacggcgtgtggcggatcgtcgccaaggcttttcacgcccatgccgatgcctgacgcacgtgccccgctcacgctagaccgtcgcgccgtcctcttgaccggcctcgccatcctcgcgcctgccgcccccgtcttcgcaacctccctcccaagcccgaccgaaaggccttccatgatcagccccgacgagacgtttgacggtacctggccgttcgcgccccatttcagctccgcccctggctttcggatgcactatgttgacgagggcccgcgcgatgcagaggtgatcctttgcctccacggcgagccgacctggggctatctgttccgcaagctgattcccccgctcagccgcgaccgccgcgtcgtcgtccctgaccatatgggcttcggcaagagcgccaccccggcggaccgcagctactggctgcaggaccacgtcgacaacctggagaagctgacgctcgcgcttgacctcaagaacgtcacgctcgtgatgcacgatttcggcggacccgccggtatggcgctcgctgcgcgtcacccggagcgcattcgccggatcgtctcggtcaatgggccgacgccgttcgggcaaagcgacctcgtcgaccgggtcaccgccaacgtcggtgtatcgccctggttccaatggatcctgaaggccgagcaggatggcgtgcttgagcaggttctgggccagctgggctacaacgtcctcagcactctgaagctcaacggcttcgagacaaacgcgctgatcacgccgagctggctccgcgcctatggggcccgcttccagacgcccgcagacgcgctcggcccgatcggttgggccaagggctacgcgaccggcgcgcaccacttcgagacgcccatctccgccgcggcgcaggcgatccgcagccggcccgccatggcgatctggggcgccgccgaccacacgctccacgccaagcacttcctgccgctgttcacggccatcttcccgaaggcgcccgtccatctgctcccgggcgtcgggcattacagcccggaggacgcgcccgacacgatcgtgacgcttatcgacaacttcatcaggctgacgtgatgaatgttcatggttttggcattcgggttcggacagcccccggctttggcggttcgaagggacttggacgcaactgacggacgcgcttgcggccgaaggtgtgcgtctggcgctcgtcgcacgcggccgggttgcgctcgaggtcgccgcgggcgggatcgaggcgtgcactagcgtgcaagtcgtcgtcggcatcgccgccgaccaggccacacgggttcagtcgatagcgcaatcgcgagggcaagagaggcgctaggaggacggatcgacatcctcctcaacaacgcgggcgagccccgccagtcggtcgcgggcctgtcccatcgctctgggctgcgcaattcgaggcgacggtcctttccgccttccgcatcaatgacgctcttttgcacgatatgcggtatggttgaacccggatcctgaccgtcgcctcgtctgtggtaatggagccccacccggcgctcggcatgtccaacacgccccgcagcgctctcgtcggatggtccaagacgccggcgaggccgcgcgcgacggcgtgacggtcaacctcctgctttcctggtcaaacggacagccttcctcgagaggcgacgaccagggcaagagcgccgaggagatcaaagcttcaaagatcgcaaccatcccggccggtcgctatggcacgccccaggaatcggcgcagctgcggcctccgtcgcgagcgggcaggccgtctatagtaccggtagcatgtgattcgggtcgaggacatcgtgtaggtgcggcggccctgagcttagggcaggaccaccatcaccccgctgcgttcgcttcgccccacgttgcgcgcgagcatttccagcggcattcacacaagtcctccgcctccgcagcataggtcctcaggcgaaacgaagtggggaacgccgccatcttggctgaagcgccgcacgccgataggtctccccattccggccatgcagaccacaccgtcttcactggagcagcgaagcgtgtcctcaagcgtatggtcccgacgagctccagcaccttgatcctcatcagcggaccggacagactgtggtgacgtgcgtcggaggtcaatcggcggccgcactctggcccctttgcgatcaccgtacgtcgatttggcgcggtccaacgaatcgtatcacgaccattccggtgcgggtttgcgaatatcgttctcgccttcgcagtgaagtagtcatcggcccacagttggggtcgtaccgatcgatgcggtaaggaggcgccatgcagcttgttactctggctcagtttctcgagattgtccgaaccggctccattcgcaaggcttccgaggagctcaacatcgcggcctctgcgctcagccgtcaggtcgcaaatctggagcatttcgtcggcgctaaactgttcgagcgcaaagctgacggaatgagtctcacggtggaaggggcggcgtttctgaagtacgctcaacggactgtgcgagacattgacctcgctcgatccgaaatcgacgagatccgggggctccgccgcggacgggtgcgcatccattcggttgagggagcgatcgcaggttacgtattcccggcgatctcggagttcaggggaaaataccctggtgtgaccttcgaagtcgtcgcagcaggaaatgatctggtcattgaagctctgattcgggacacggctgacatcggcatcggcttcaatcctgctcccgacatcaatgtgcgggtctgtgcaaaggttacgaaggaaatagtggtcgtcgtttcaccttatcatcctatggcggaaaaatccgagctggcgctatcggaccttgccggagtcgagatcgcgatgcttgatgcttcgtttggaacgcgccgactttttgatcgggctttacggaatgcggacctctcaataccgttcgctctgacggtaaacgcgatcgaaatcgcgaagtcgttcgccaagcgcaaccacggaattgcaatcgtgcctgcgttcgctgcccgctacgagtgcgagcacggcgaactcgtcgctgtcccgttgtccgaacctagcctgaagcgggcgaccgtcgcattgtgcgtgcgccgagaccgcgagttgccccgggcagtcgcggcttttctgaagctgcttcaggacaaggtcgccctactttagatgattcaacaaacagctggcatcttccagttggctaggttgcccagggtcaatcctatgggattgagaacacccaacgtcgtccacacatattcgacgccgatcgaatggccataccacctgcaggccatctctcggttgcacagggacggaactgtttcgccttgttgaaaccaaggatccatcgaacgcagcgccatctggatgggggtcggatcctgaagtctcgtcgcttccgctgcggacgaagtgtttgcgcctgtcctcctatttcagcagccatcagcatcgagaacacactgcttggttcggcggctacgagggtcggcttcagccgtcgaggtcaacttaagacggatcggaccatcttctaaagctcactaagaccaggttcgatcgagtcgtccgtgttcgcaagacgcgaacggggtgtacgcgcttcggcggttcaccggcacactcccgatagggtaggggtaccgtgaaggcatcagacacaagatgccgctgaacagtcctgtgaaccccaaggagcgactaatgataatcgaccgtcgaaatttcatttctgcttccgccgcagctgtgacgttgcctttcctgccaaaagccgccatggcggagaacgaaatcgtcatcggcggtcttcacgacatgacgggcgtcatcgacctgattggcaggcccatggctcaattgatggagttcgccgttcacgagatcaacgcggcgggcggtctgctcggcagaaagctgcggttacaggcatatgatccgcaatctaatcaacagttgtacgcgcagctcgcacagaagctggctgttcaggacaaggcgtcagtcgtgcacggcggcatcacgagttccagccgcgaggtcatgcgtccggccctgcgtcgcgccaagactttgtatttttataacaccctttacgagggcggagtctgcgatcgcaatgagtttacgaccggcactacgccggcccagacggttgccaacctcgttcgttatgcgatgaccagattcgggaagcgagtctacatcgtcgctgccgactacaacttcggtcagatcagtgcggcctgggtcaagaagtttgtcgaattggcccggggggaaattgtcggaaccgaattcttcccattagacgtcgataatttcggattgtcgatatccaagatccagacggcgaggcctgacttcgtgatgtcgatcctcgtcggcgcggctcatctctccttttacaggcagtgggccgccgccgggttgatcggcaaaattccgatggcctcatcgaccttcggagcgggtggcgtggatttcgtgatccttcgcccggaagagtgtaacgggttggtcaattgttcgacctacgtccaaggcatagattctccccgcaatagacagtttctttctgcactgaggcagtatttcggagatcgtacgcccgtagtcgcagagatttcctgcaccacctacgagggggtctggctatgggccaagggcgtggagaaggcgggctctgtcgagcggacagcggtgatcgaagcactcgagagtggcctcgtgctcgagggaccctccggcacggtaaccgtcgatccgttgacacaccattgcgttcgcgatgtgcatattgccgagctgcgcgatcgtgagtggaaggtcttggagactatccgacaagtaccgccatccgatacatcggcggtctgtgacttaaagaaggatccaaactcaaccattcagcacaacatccgattctgaacgagaggacgacgcgagatggaatacgcggttgtgctgctcatagaaatgttgggcgctgtcagcggcctcttcatcatctcgataggtctagcagtgatcttcgggatgatgcgggtaatcaacatcgcacatggtgaatttgtcgcggtcggcgcctacgcgaccatcctatcctggaaggcaggcgtcaatgtgtggctcgcgatcctgctctttgctccactgagcggagcgattctcggtgtgcttgtcgagcgatttctaatccgcttcctttatggccggcttttcgactcgctgctggctacgtggggattgagcctgctcttgatcggcgccatcactacactcctcggcaatacagtcgagggaatgccatccccattgggtagcgtttcgatcggatcgtatcagttgtcgttgtacacgctgtttctcacggcggtaggcgtggctctgatcttgttgtcatactctgtgttgcggttcacgagcttgggcctgatcgctcggggtaccatgcagaatccggaggtcgcggcttccctcggcgtcgcgccaaaccaagtgtacatggtgacgttcgcgttgggcgcagggctggcaggtctcgccgggggagtgttcgcgccggtaatggccattgtgccgaccatgggaacggccttcgtcgcgaaggctttcattactgtgatcggcggccccgccgccgtagtcgccggctccgcagcgtccagcgttctgttcggtagcatcggaaacgtggccaccgtggtcgctggcccggtttggggcgacgccgcgatgttgttgggcgcaatcgtgttgctgcgggcgcttccagaaggcattacaggacgcatttggaggtcggcacaatgaaacttcatccagctggttcaacggcctcggtgacattgatgtccggagtcttgtgcatcctagttgtaccctccctcctcagcgattaccatttgggacagcttacgttgaacgtctcactttcgatttttgcgctgagtctcgcctacctgtggggttacggcggcgtcctaagtttcggacatgctgcgttcttcggtctgggcggctacgcgtttgcggtcgtcgcgctcaacacgctggacgcctggatggcgctcggtgctgcgataatgtgctcggctgttttcgccgccgggttgggttggttcatgttctacggtcgccttaaccacgtgtacctcagcgtcgttacgatggtggcctctctgatcctgttcaaggttatgagccataccgcaggcccagactacatgatcggccgggtcgctctgggcggctataacggcatcaccggactgccggggctctacattccgtttgcgccggacgatgcgctcgacgaccgggctctcttccggctctcagtggctgtcctcgtcgtcagctatctccttctcaaggtcctccaaagcacatcattcggccacttgactatcgccattcgcgaaaacgaaacgagggctgcgctactcggatacaatgtgaggatgcataaggtcctagtgttctcgctgtgtggcgggctcgcaggactggcaggcggtatgtttgctagtcagcaggccttcatcgatccgaatgcgctcgctctgccgctttccgcgcaatgccttgtatgggtaatcatcggcggacgcggcgcgatgatcggtcctgtgctcgcaagcgttgttctccagcaaattaccgccaagctgagtgaaaccaccgccatggacagcaatctgcttctcggaggcatgttggtaatctcggtccttgtactccctggaggtttggtcgcagccttcggtcatttggtctttcgagttgcggatctgatccgccggagggcaccttggagccgagataaggtaggagcactcacgtgagaacggaggttctgcgtacgcggaagttgcgcaaagagttcgccggtctcacagcggtccgagacgtcgacttggtcgtgcaatccggcgaactgcgctgtctgatcggccccaatggggctggcaagacgacgttcttcaagtgcgtcgctggtttgcttcgaccaacgtccgggacggtcgaagttcttggagagaacgtgactgaggcggagagcttcatgatcgcgcgtctgggagtcggcatcaagacgcaagtgccgagcttgttcgggggactttccgtctgggagaatctttggttggcagcacgaaaatgcggcgacagggccgcccaacggcggggcacgcaacatgcgttggagcgggtcgggatcacggagataagctacaatcaggtcgatcggctctctcatggcgaacgtcagcttgtggagctggccatggtgatggcgtcagaacctcgtttgatcctgttggacgaaccagcggccggaatggcattcgacgaaagcctgcgcctggcggagatcataaaggagttgactaggaacgcggccatcgtcgtggtcgagcatgacatgcgattcatgcgtgcgctgagcggggttgcgacggtctttcaccagggagccatccttctggaaggtagtttgcaggacgttctcgatcatcctgtggtgcgcgacgtctatctcggaaggagtgtcgaggcatgatcctgaacgtccgcaaacttaaggccggctacggtcccatgcaggttctgaatggcatctccttggatgttgatgcgggggaggctgtagggatcttaggccacaacggcatgggaaaaacgacgctgttgcgaacgttaatggggcatctgacggttcaagaaggttcgatccgtctgcaggacaaggacatgacgcgggatccggccgagttgagggcgaccgctggtattacgctcgtgccgcagggacggggaattttttcgggcctcagcgtgcttgagaacttgcgttttgccttggtcggaagcggccgaccgaagtccgtccttgagcaagttggaacctatttcccgcggcttcgtcggctgtacgacaggcctgccggcgcgctgagcggaggagaacagcaactcctggctcttgctcgcgcgctatgtatttgcccttctctacttcttctagacgaaccgaccgaaggcattcagccttcgatccgcgatgagatcgtggatattctcggagagctacgtcgaacgtccaacctgtcgctcatagtcgttgagcagaatttggattttctgcgtgcggtgacggatcgcgtccttgtcatgcagaaggggtcgctgatcgctgaattgtcgccagaactgttgggcgacccggtgcgtagcacggcggcgctcggtatcgtctttggatccaaagaaggggaaaagccatgatcgtgaaaccacccacccccgtcgttttgaaagaaacggcggctgaaatcggcttgtccctttccgacgacgacgttcgatcgtttgtcggactgatgcaggggcacttcgacgcctacaatgtagtggacgctcttccggactacttgccggaggtacgctatccgcgaacgccaggccaccagccgccggcagagcaaaactcgcacaatgcctggtacgtgaagactgatattgtgggcgctccagaggggttgttgaaaggcaagtcgattgcgatcaaagacaacgtgatggtggccggcgtaccgatgatgaacggcgcatcgatcctcgagggttacgttcctgatatcgacgcgactcttgtcacccgacttttggatgcaggggcgacgatcgcgggaaaagcgcactgcgagtactattgcctgacgggcaacagtcatactgggagcaagggcccggtccacaatcctcatcgcaaaggttactcagccggcggttcgtcttcaggaagtgcgactctggtcgcgctcggagaggtggatatggccgtcggcggagatcaaggcggatcgattcggatgcccgctgcctactcaggcgtggttggactcaagcctacgttcggcctcgttccatataccggtgtcatgccgatcgagccgacagtcgaccatgtagggccgatgacgcggaccgtacgggacgccgcgctgatgttacaggtcatcgcgggtccggacggtctggatggtcgccaagcactgcaccagggggtgccgaaatattccgaacttttgggttcgggagttcgcgacttgaagatcgcggtcgtcagcgagggatttgcgtggcccaattcggagccagacgtcgacgagcgcgttcgcgaagcggccgacttgttccgaaagctgggtgctacggtagaggaagtgtcgatcccgatgcaccggataggtatatcgctttgggttccgatcgccatcgatggtctcacgcacacgatgatgtggggcgatgcttacggcgcgagtcggagcgaactctatgtgaccgggctgatggatcaccatcgccgttggcgggaacgtgctgacgagttgtcggagtccacgaagcttttcacgctcatcgggacctacgtgcgcaaccgtcacggacttcgtttctacggtaaagcgatgaacctgatgcgcaagctgcgcgctgcttacgactccgtgctgcgcgagtatgacctgcttctgatgccgaccgttccgctcaaggctaccaaattgccggaagcgaacgcgacgcgagaggaatacatggcgcgcgcgcatgaaatgctcgcgaattgtgctccattcgacagcacccatcatccctcaatctcagtcccgtgcggctttagtgaagggctcccggtgggtctgatgctgactggccggcactggcaggatgcaaccgtcctacgcgcggcctacgcctttgagagtgccggaggcttcgaactcggtagcgatgccgacgcggatcgtcgcaggaaggaggccgtttaatgtcgcttacgcgggtcgccgttgttcaagattgtcctgtcctattcgacgccgtagcgacgatagcgaaggtcggaaacctggtacgccgtgcatcgcaagagggggcaaagctcgtggtattccccgaagccttcgtttcggcgtatcccaaaggacttgattttggagccagagttggcagtcgcacgctacaggggcgacgtgatttccaacggtacttcgaaggggctatcgaggtaccgagcgacgccacggcggctcttggacggcatgcgaaagatgggggtatctacctcgtgattggtgtcgtggagagggacggcgggacgctttattgcaccgttctcacgtttgatcctgccggtacgctgttgggcaagcacaggaagcttatgccgacggccatggagcgcctgatctggggatttggagacggttcgaccttgccgatcttcgagacgcctttcggcaaagtgggaagcgtcatctgctgggagaactatatgcctctcctcagaatgacgatgtactccaaaggaatccagatctactgcgcgcctaccgccgtggaccccgacagctggcagtcgacgatgcagcacatcgcgcttgagggtcggtgtttcgtattgtcgtcgtgccagtatctcacccgcggcgactgccccccggactacgctgcggctcaaggcgaaaatcccggcatcgtattgatgcggggcggcagtgtaatttattcgccgatgggtgaagttctcgcggggccaaacttcgacggaccaacgatactctacgccgacatcgacggcggcgagattgcccgcgccaagttcgatttcgatgtagtcggtcactatgcgaggccggacattttccggatgcaagtcgatgagacgccgcgcaatccggtcgtccacgaaatggctgacccgacgcggcacggcctatcggacgggcagggtcagaacgccgtgaaatcatcagagggtctgaccgcctaatgtttcatatgacaggctgtggatccggcacatggcattctgggagcacgacaaagccagccgagttggtcgcagcctgcgcggtggaccaacgcgcgcagttgaccacatatcatgggctcgctaggcggcctcgaagaatgcttccgtctgtgaggtggcgtaatggtcagaggccagctttgcacgctcactagtgttgcaaagcggagctgggtgactgcaaggtgaatcccaatttccggttggggatctctcggggttagatggtgcgcggtcctgctccaggcgcgcctgtctgcgccgggaccattgctcagctggacgtcccgacgcatgaaaacttcaacaccgttaggggcgggcggcgacttttttccggattttggctgattgtcgcaatatgaaaacgaggcctagaaccgtggtggtcatgatcgcataggcgacagtacccgacgaagagccgcccgggattgcggccagcagcagcgcgtcgttgccacccgggataagattcgcgccggcggccatcagcgtgccacctgcgatcgtgcggccaagcgcggcgcaggccggccgccgcggcctgaaggcgccgacgcggattgccgacatcatggcgccgaccacagtcaaggccgcagcggcatagccgcctagaccagcgaccgtcgtgaccatggacggggcgatgctgcgccggaccagatccgaataggttgcgctcggctgcagcaggaaaagcagtgcgccggatagaccgataaagaccatcgcatttgagaggtgccaacgaccagacgccgacggggcctcgcggcggcgtagccagaaccggctcgtgatcaatagcggcagcatggcggctacgaagagcgctccgccgacgccgggcctttcccaggcgttagcctgcagctccggcagcagcgcaggaaaggcacgaacaacgattgcatccccgattgcgagcccggcaggcagcgccagcagtcggaattcgccgttgccaagtcgccagagcgatcccaacaaacaggcgccattgaccatcgcgccgaccccgagcagcacggcgccggccaacaacgggagcccgatggtgacctggcccaccacatgggcgctaccgccgcacgcccaggcggccggcagatagatcatgcctccggtagacgccgcaagcatgaagccggccagcagacgcgcacgaccgcgttccacaacctctcgtgctgcagctaccgcacaggtgccgccctggttggcggcaaagcccatcaggaaggcgcaaaatccgccaaccaggagaacggcgagagcagccatcggccgctaaacctgggtggtcagattgatgatgacagcgggtgtgaagtcgagcagcaagctttcgagtcggcgatccaggcccgccagcacgatcagtccgaccgccgtcatgccggcgcccatcagccggcgtgcccattggccgccaccgatcagagaagcgcgaaagcgcgtcaggaaggcgcgagaggcaaggccgatcgcaagcagcggcagcgctgccccgatgccgaaagtcatcatgaccagccacactatcccaagctccttgccttggcttgcaagcaccgaggccgcaccgagggtcggaccgacgcacggactccagaccaaacccatgaggaccccgagcccgaactggccggcaagcccccgcgccatgaccgtgtcggcaccacgtgcaccgatcgcggccagcggcgccaacatacgctccgcgccgtgttgaagtgtaggcaccagcagcaccaggccaaaaagaacgagcaacccaccgaacgctggtttgaagcgctctgcatcgaatcccgccgacgcgctaagcgtcgcgagcaatatcccggcgagggcgaaggcgctggcaactccaagcgccagcgcaacggggccgaagcggtgctggctcgcggcggcgccgaacacgatcggtaggatcggcagcacgcaggggctgagcacggtcagcagtcccgccacgaaggcgagcgcaattccgaacgcggacaccggtttacttgagcgcggtggcggcgagcgctcggatctgcccacggtcggtgacgccggtcccgcggccgcgttcggctttgccccgatagacgaccaaagtgctttgctggctgacgcctagcgcacgacgttcgttgacctgactgtcgaagtcgagcttcaagatcacgagatcctcgaaggctggatcgcgcgagagctcgagaatgatggggtcctgcgcgcggcaggtcggacaccagtcggcgtggacgtcgatcaggatcggcaggcctgcggccttggctcgcgcaaaggactcgctcgaataggcctgaataggaccggcctcggccggtgccgtgatgaacagaagagcagcaaaggcaactgaagttgtaaagcgcattgattcgtctccttgatgagttcgtcggtcacttggtcatacttttggggcctgactagcagatggtggcgtcgggtcatatccggtgatcagtcgcgcgccacgttcgaaagtgagatagttccagatccagttcagccctacgataaagcggtttcgaaagcccaccaggaaatacaaatgcgctgtggaccacagcagccaggccgcaaaaccctgcaggtgcatccagccgaaatcggcaacggcgtgacgtcgaccgatcgtcgccaagctaccgtaatggcgatatcgaaacggtgggggctgcccgccattcagccgggcggcgatcgcacgggccacgtattgtccctgctgtttggcagccgcggcgatccccggcaccatccgacccccttcatccttcacggcagccgtgtcgccgatggcgaacacgttcgacaggcccggcacttcgagcgccgccgtgaccggcacccgtccactgcgatctggctcgacgccaagccatcgcgcggccggcgaagcctgaacgccggcggcccagatggtggcggcggcgagcatgcgttcgccgttcacctcgatacctttgccgtcgattgtggtgacacgcgccgatagtcggacctcgacgccgagctgctctagacttgccttcgctgcggagctgagtttcggagggaaagtcgcgagcaagcgctcgcgactttcgatgatcacgaccttaacgcaggtcggcgaaataaaacggaagtccatcgccgccgcgtggcgtgcgagctcggcaatcgcacccgccatctcgactccggtcggcccgccgccaacgaccgcgaaggtgatcggaagcgagcggtggaccgcgtcctgctggcgcatggtttcggcgcgctccatagccaggagaatatcgcggcgcacgtgaaccgcatcgtcaagcgtcttgatcccggatgcatgcgcggcccatcggtgattgccgaaatagctgtgttgcgcgcccgttgcgagcaccaaagcgctgtaggggatctccgcgccgttggccgtaagcaccacgcccttggcggggtcgattccgacgacttcgtccatgcgcacatggacagtgagataatccttcagaatcgttcgaatgggcgcggcgatgtcggccggcgacagcgccgcggttgcgacctggtagagcaggggctgaaacacatggtggtttcgcctgtcaatcaatgtcacaccgatcctgcgtcggccgagcgacttggccgccgcgagcccaccgaaaccggcgccgacgatcaccacatctgcgggcgagtcggtgggagcgggtcgttgctgaggccgcatggcggatactctctgacaagacaaggcttcttaccggtatgatcccgggggaatacgcgttgatgcccggaggaggccatcgaggaacagcttgtggatcgtagcattcgatgactttggagaggcaccatcgccgagccgccgttctagcgacagttctgaggacgacgcgatcgtctccccgaaaaacgcaacaagcccttcgagacttaagctgtccgccggccgcgtttacatcatggccatcattgcgccgattccgactgcgaaggccaggactaacaatgcgacaaaagcagtcgcggtaccgaacaagggaatgaaagccgaagcgcggctcgcggttgtgacgggggtttggcgcatgacaatctcctgaccttcagatctcggcggaagtgccgattaaccgataatacggtgggcgcgctggcgacgttaccgagacgggcaattaattccgcagtctactgtcacaatggattgatcaatcagctcatctatgggtccgatagccgtggtgcttttggcagctcgggcacgtccaatttttcccggtagcgcagaacgaccctgcacttcgcgtcatgtttgcgcctgaccgatagctaaaaactattcatgaataaaaatttgctatgatgtttgggtcctattgcgcgtcgtgtcggtaggcgtgacgagcgtgttttgccgtggcctgcgtcgaacagctgctcgcggcatcggtcaggatctcggatgggcgggtcaatgaccgcgcctcatgccgccgaaagcaggcggcgcgttcctttcaaagcgttcagctgttaaagcgtccgtttcttgacccgaggatgtttgtttgcactctgcgaccctagcttcgaccatgcccgatatcgtcaatgtccttctgtgctgtgtggtcgcgggcgcgatctggattcccatgggcttcggcttggctgcggtggtgatgccgcgccgtctggcttatttcacggctccgaccatcggctgggcctgccactccatcatggtcgctacactgtttcgcgtcttgccgatgacggcgacgacgatctgcatttcgattcttttgggctacggaacttcgatttggatgttggtacgcgacgccaactttcgtagcatcccgattgcgttcagcggtgtttttattgtcctccttgcaagcgctgccgttctcgcatggatgatcgccgccgccattctgccccatgcagatggcagtggagtcacgttcgcgggccccatcttcgatcattccaaggttgcgatcgtcgatgaatttctccgcggcgggctcccgctgacaaatccatttttctacaaagcgggaagctcgacgtcgcttccatactattatctttggcatttcagcgcggctgaaatcgcgcggctgacaggtgcgtcggcgtgggaggccgatgtcgcgatgacctggtttacctccttctcgtccctacacatcgtcatgggtctggccttctggatatcgcggagctatcgcgcttgctttggcgccattgccgtgtgcacgacggcgtcgttgcgtccttacatcggccagctgtttaattatgacgtggcctacgatctcacgggatacccaaccgggtttggcgggtggctctttcaagccgcctgggcgccccagcacattcagtcggctggatgcagcgttgtagccctgctaatgatcgcacgcgtcgcatgtaaccgatattggaccagcgtgacgcttggactcgtcgtcgcagcggcctatgcatcgtccttatgggttggcggaattgttctgccgatacagcttgcgctggcgtttattttcatgctcaaggcaggcgaaagcaccccgatccggctagtctggtctctgagccttgccgccgcgatcgcggtcgtttttgcctcgccgttgatcgtcgagcaggtcttggcgatgtcggccaggcaaggaggctttccgatctcgttttcgtcggtcatggtcctcggtgacgtcattcccgaatggtcgcgaccggtactggatccggtggcgttctacctggtttacctgacggtcgaactgcaggtttgctatgttatcggcctaccgatgctcgcccggcttgtcgccgcccgaagcgcgcacgcgggtcgtagcgaccaaattctcgttttggcagccgcggtcgtcgtatcgctgcttgcaaccggttttctgagcagtaccgtcacagccaacaacgacctcggatggcgggccgtacttcccgctatcctgatacttgttgcgatctcgggggccggcctggcagctgccatccggcagcgagtcacaatccgacgtatcctgatgtttgctgtatttctgctcgccgcatttcaagcggtgctggtgctgtcgtcgaacctatttcccacgccgactgcatcgggtcgtgaattcaccggctccatcgaattgtggcgagacgtcaggtccgtctcaagcccgctgcaacgcgtcgtcaacaatccggactatcttggcgaagtcacgccgtggcctgtcaacatctcctgggcgcttttgtccaaccgccggtcttgctatgcggctcgcaatctggtcgaggctcttgtccctttgccgcgagacgaactggacgaaattgatgcacttttccgacgtgttttcacaaaacggcctgagaccggtgaccttcgtcgtctggcctttgagtttggatgcgagattgccatcgtgaccgtagacgaccccatttggccgaccgaccctttcgctgaaaattcagcgtatgaacttgttgttgcacggcgtgatcgctggcgaatttaccgccgtcgcaacgaagccatgccatcgtctacggcacagccctagatcgggtattgtggcgcccttggtgcggcgctcggttgatcgatccgaccgccagtgatctgaatagaagcattttgaccgcgatcggccgtaggtgtgaggcggccctgatgcctgggatcgtcacatcaacatccgtcaatttggctttcgctgaaaagacgtcgacctaggtacgcataacgaatcgaaccccctgctggtcctggaccagatcgcattggtacgctcggtttgccccgactggcaacacaaggggcgcaagttcgtggtttgggcacatcaacttgtctaagcagaaggtgcgcttaggaaagatcggtgacaatgcggccgtccacaccccgaaataggccgaaaagcctggtcccaagaagacatgttccttgaaagtcgaaggtgccgcgcaccatctgagcatacatcggcgacctcctcattatttccgccgctttgtcactggtagtcggtggtctggaagacaggttgtcaatggaaggactggtgcgctctaatggggacaagcctctatgtttcgatgtgacgctgcgcggtatgcttggcgtcggagcgttcaaggagtcagtgtgtcgggatgacgtcctagctgccatttgaggttagcgccgaacgagggaaggaaataatcttcttcccccgatagcaaggagagtaaacgctcgggaaggtgtgaaagacgaccggccagtggtttgcgacaatcccaccgtccaatgctcgcgagggtatagagtagccaaacaagcagacaggttcccgtgcgttaccaggacatctacccatcggaagctttgctccggagtttcgacatcgttcggccccgcgccgcagagctgctcaacctcgagtatttcgaagcggagccggcggcgatgcctgctgcggtgttcgaccaacaccatttgttactcaacctcaagaacgaaccgcaccgcgtagagaactggcgcggcggcgcgcaccgcgatttcacattcgctctgaacgagatcgtgctgacgccggccggaatcgagagcggctggcgctggcatgcaaagagtcgcgtgatcgtcatcaccatcgatccgcagcggctgcggcgcttcgcggaaggcgagctcggcgtgatcctgagcgatcggcagcttcgcgacgtgccgcaggctcacgatgcggagctatgccatgccggggaagtgctccttgatgcgcttcgccaacggggcatcggctccgaagtcatgtatgaatcgctggcgcgcgtgttcctcgttcagctcatccagcggtacggcgaggaacgcaccgccgcgctgaatttcggcgcaggcttcacggccgcgcagtataagcgtgtcctcgaccatgtcgcggaacattacggccagccgcttacaatcgaggatctcgcgcgtgtcgcggggatgagcaccgcgcacttctcgcggctgttcaaggcgacggtcggcgacacgccttatcagttcctgatggattaccgcgtcgagcaggcccgcaaattgctcggggagcccgagcgcgctctcatcgacatcgcgctcgcctgcggcttcgccgaccaaccgcacttcacccgcatcttcaagcggttgaccggccaaacgccgcgcgagtttcggcagggcaggtagcaggaatcttcaaaaaacgagcagcggccatcaagcaaaagcgctgctgttgaacgatcttggcctccgcgcccccgacgagggatgatgatgcaaggagacgaacgatgaagcctctggttttcgccaccgcgatcgcggctgctgcgcttgccgtgccagcggacgccgccacctcgcgccccgtgaccttcgacagcggcggcgagcgcatcgtaggcgagctgttcctgcccgatggctacaaggagggcgacaagctgcccgcgatcgtcgtaacgggggcgtggatgaccgtgcgccagcagatgcccgccgtctacgcccgccagctcgcagatcggggcttcgcggcgctgaccttcgacttccgcggctggggcgagagcgccggcgcacgccgccagttcgaggaccccaaggcgaagatcgccgacatcaaggctgccgtcgcttatctcgcgacgcgacccgaggcggattcggcccggatcggcggtctcggcatctgcgccagctcgggctacatggtgaccgcggcggccgagaccccggcaatgatgtcggtggcgctggtcgcgccgtggctgcaggacgccgaggtggttgccgcgacctatggcggggccgcaggcgtcgccaagctcgaagctgtcggcgatgcggccgagtcggcctatcgcaagagcggcaagcagaccttcgttccggccgcgagcctgacggacgatcaggccatcatgttcaaggcgccttattatacagaagccgatcgcggcatgatcccgcaatggcgcaacgaggccgacccggctttctggcgcggctggttgtccttcgatgcgattcaggtcgcgccgcgcctcaggcagcccttcttcctggtgcacagcgaagccgcggcgatcccgcagggggcacaccgcttctacacaaacctggcgtcgccgaagcacgagttgtggctcgacaacgtcggccagctcgacttttacgaccgccccgcgccggtgaagacggcctcggacgccgtggccgcgcacttcaaggcgacgctcaagtgaagcggcgcctcgtccttgccctgatgggagctcttgccatgtccacgacactcgcacctcagccggtgcaggccggctctgccgccgcgctgacgcccgattccgctgcgatcgagaccgtaatccggagcatcgccacgctggccgaccggcacgacttcgacgccttgtcgcagctttatgccgacgaggtccggctggactacacctcgctatcgggcggcgagcccgaagtggtcagcgcgaccgagctgatgaaccgctgggcgggcgtgctgccggggttcgatcgcacccaccacgccatcagcgacgtgcgggtcaccgcgatcgagggcggccgtgcgacggcgaccgcctcggtcgtcgccgatcactggctgggcccgatgcactggcaggtgcgcggacgttacgactacgagctggtgcgacaggaccgcgactggcggatgaccgcgcaccgcttcactgtcatcggcgaggagggaagccgcgacatcctcggccccacgaccgaggccgccaaggcgcaccctgtcgcctgggtcaagcggcagcaggcgcggaaagtggtgctcgatttcctgaaggggctggaggagaaggacatggcgcgggtcaacggcgtctgggccgaggacgctgtccaggacatgccctatgcgccggagggcttcccgaagaaggtcgtgggccgcgacgccttggtcaggcactacgccgaatggccgcagaatagcggcaaggcgcgcttcaccgacgagatcgtcttctatccgacacgcgatccgagcatcgtcttcgccgagtatcacggcgtcagcgagatcgtcccgaccggtcgcgtttacgaccagcgttacggtgggctgttccatgtcgagaacggcaagatcacgatgttccgcgaatatttcgacccgaatgtcttcgcccacgccttcggtttgaacgagggtggccggttcaactgatcaccacaactcgagaccgaagggagtcctggtcatgttcatcactcgcatcctcgcagtatcgctcgtgacattcggcctaggtgtcggagcgcctgctcgttcgcaaaactctggcccagccaccacgcaggggcaggccgcgcaggagcgggcgaacatccagctgatccgggattattaccaggcctatgccacgggcgatcccgaagccgtgcggccattcctggcgccgagcgtcgtctggcgcatccccggccatcacccgctcgcaggggagaagcggggtcccgacgaagtcatcgccttctttcgcggcctggccaggggcaagttcaaggctgagccggtcttcttccaggcgcagggcgacttggtggtcgacgtgcatcgtggctggtcgaacgtcggctccggaccggaggtcgatcaggtctacgcgctgatgtttcggatccgcggcggccgcatcgtcgaggctcagaacttcgtctccgacccgtcccagtcagatgccttctactgggcgcacttcccgctccgtccgttgccggatcggctcgcccccgaggccaggtagccgcccaggtctcgcccgttgctgtgatcgggcggtcacaactgctgagaggaacaatccatgcgatacaaattgcttggccgatccggtctccgcgtcgccgaactctgtctcggcaccatgacctttggtgaggcctggggctggggtaccgacgctgccga

SEQ ID NO: 251 - DNA, 241972 bp, Bradyrhizobium colbertium
  misc_feature (164755)..(164788): n is a, c, g, or t
tcgatgtcggctcatcacatcctggggctggagaaggtcccaagggttcggctgttcgccgattaaagtggtacgtgagctgggttcagaacgtcgtgagacagttcggtccctatctgccgtgggtgttggaatgttgagaggatttgcccctagtacgagaggaccggggtgaacgtacctctggtggagctgttgtcgcgccagcggcagtgcagcatagctatgtacggacgggataaccgctgaaagcatctaagcgggaaacccacctcaaaacgagcattcccttgagaaccgtggaagaccaccacgttgataggccggatgtggaagtgcagtaatgcatgcagcttaccggtactaatcgttcgattggcttgattgctctcattttcagtgtccatagggtcgtgatgaccccgaccagaatgagaggcgctagtcgccaactccaaagatcgcttgcttcttcttcttgtccttcgccggcctggtggttttagcgaagagcctcaacccgatcccatcccgaactcggccgttaaactcttcagcgccaatggtactatggcttaagccctgggagagtaggtcgctgccaggcctgccaaggacaagaagtattcctctttcgatgttcgaacacggaacgccgcctccggaaacggaggcggcgtttttgttcgtgcgcatgaatgccgcgcgaaccgcacctttccgtcatgatcgccgttcagcatgcgagtcgagcgcgccgctgtgccgctcgagtcgccgccggcacaattaccggtgtcgtcggttgaacattggggcgagttcatgggcggttcacgtccgggctgacagtcggaatcccatgccgcgactcgcgccaaacaaagatccgaggagtcttccatgccagtattgcttcgtcccgtcctcactgctttcggccttgcgtgcctcttgtccgcagcatcgcttcaactatccggtgccgcattcgcgcaggccaagcagcagcccgcgccgggacagcaagctgcgcccgcagagcaacgagctcccgcgctgaagcagatcgcactcacagacaagcagctcgacggcgtgctcgccgcgcaaaaggacatggacgcgatcacggagaaacttccggagaatacggcgcccgatcagaaagtcatggcgcagctcgaggacgtcgcgaagaagcacggctttgccagctttgacgactacaacaacgtggtggacaacatcggtctcgtcatcggaggcttcgatcccgcgaccaagaagtatgttggcccggaagcggtgatcaagacgcagatcgcgcaggtcaaagccgacaagaagatgccggccaaggacaagaaggaagccctcgacgagctcaaccaggccctaaagacggcgccgctccaggtcgagaataagggcaatatcgatcttgtcgccaagtactacgacagactgattgccgcgttgggggacgagcagaactgagcacggctgaagaggcgttcgccttcgtcggagcgtgcgccggggattgcttggccatgcaagcggggctgcaagccgcgccaagaaaaagccccggaagcgtctccggggctttcgtcgtttttgccacctgttgcgcgacgcggctacgtcctcgtccgcatccgcatcatgaaggtgtcgaagctgagctcggccacctgcatccaggcgagcgactcgctgcgaaacgcggtcaggctcgcatacatcttgccgaaatgcgggttgctcttggcgagatcagcgtagatctcgttggccgcgctgtagcaggcttcgagcacctcctgcgggaatggcttgaggatcgcgccggaagacagcagccgcttcagggcgggcgggttgaccgaatcgtacttgcccgtcacccaggtgaatgtgtccagcgacgccgcgctgatggcagcctgatagtgcttcggcagcgcattccacttgtccaggttcatgatgttatggccctggccggtgccttcccaccagcccggatagtaatagtacttcgccaccttgacgaagccgagcttctcgtcgtcatacggcccgacccactcggctgcgtcgatcgttcccttctccagcgccggatagatgtcgccggctgcgatctgctgcggcacgccgccgagcttcgagatgatggtgccggcgaaaccgccgacgcgaaacttgaggcccttgagatcatcgacggtcttgatctccttgcggaaccagccgcccatctgagcgccggtcgagcccgtcggcacgccgatggccttgtgctccttcaggagatcgttgagcatctcctgtccgccattccacaacagccaggagatgtgctggcgggtgttgagtccgaacggcagcgatgtaccgaaggtgaatgccgggttcttgccccaataataatacagggcagtgttgcccatctcgaccgtgccattcgacacggcgtcgagaacctgcaggcccggaacgatttcgccggcggcgaagggttggatcagaaagcggttgtcagtgatctcggcgacgcgcttgcagaaatattcgcaaccgccatacaacgtatccagcgattttggccagctcgccgcaagccgccatttcacctcgggcatcgattgcgcgacagccggcgcagcgattgcgctcgcggcaaggcccagtccgcccgccttcagaaacttacgacgttccatgcgtttccctcctgtgatgtcgtgtcctcgacgagggatcgcggtcttgcgccgctttatcttcgccggtggccgacgtttcctaatgtccgaagttcaatatcccggatcgtcgccagcatgaccaaaggggaaccgcaaagcaagcgcgctttggttgcgcgatgccaagccggtcaatgttgcgctgcgaaggcggcttccatggccttgcgcgtcttcaccgtttcgtcgcccgcgtcgaactcgacatcgctccaacgcagcaccgcgccgtggccgacggcgcgtttcagcctcacgcgatgcgcgaggccgatcggcagcgcgccggccttcaggctggctgccgccggcacaagcttgccccagaccgtgtagcccccttcgccgtccagcatctcgcccgcccgcagctcgcgcttcgccaccgctgcgacatcgccgcgaaagccgccgggctgcccggtcggctcgccccgcagcgcggccgacagcaccgagatgttcagctcgaggccgatcagatgatagggcttgtacatcgccgcatagcggccgctcccatcggtcttgaggccatattgtctgaagcaatcggctgcataatcgttcggcgcctccagcaccacgtagacgccccatcggagatcgcgaaacaccggccggccgtcgcgctcgagtgaggaaaccacctccaccagtcccggccgctccagcacgccgccccgcgaacgcggccgcaggatgtgcggcaggtcgtcgacgccgcagggcggaaacatcaggccgtccgtgggcacatcgaggtcgcaggcgttggcgatcgcggccatctcgatcgccgatttggtgccgtcgaggaaggagttgaacatctgcgggttcatgcctgccgactgtgcctcgcccgccgtcaggccgtaatgctgccagacgccgtcgggcgtcacgtcgtgataggccggcagatattttgtccccttgccggccgcgaccacgcgaaagccggtggcgcgtgcccaatccaccatctctgccgtcagggccggctgatcgccataggcaagcgaatagaccacgcccgcctcgcgcgcttcatccgcgagcaaagggcccgccagcacgtcggcctcgacattgaccatcacgatatgcttgcccgccgcaatcgcggcgcgcgcatgcctgatgccggcggcgggattgccggtcgcttccaccaccacgtcgatcgcgtcgccggcgatcgcgcgcacaccgtcatcggtgaaggcggtcgcggcgatgcgctctggctcccagccgacggtgcggcacgcctcgcgcgcacggtcgcggtcgatgtcgacgatgacagcgacctccagtcccggcgtgtgaggcacctgtgccagaaacatcgagccgaacttgccggcgccaatcaacgcaacgcggaccggcttgccggcggcggcacgggcctgcaggaggcggaagaggttcatggagaagaatccgtgagcgttaaggctgctaggcgacgcgaactatcaacgttcgtcatcccgggggcgcgcgaagcgcgagtccggaatccatttttccacaatctctgtcgcccgatggattccgggcccgacactccgcgtcgctccgggatgacagcttactccgccgcttgtcgcggcgcacgtgcgagccgcagcagcgcgtcgtccgccaccgtctttatcggcgtaaagtcgcgatgcgcaatgtagtccggccgcgtggggttacggatgtggttcgagacggcattcagcgtcagataaacgatcttgcgcggataaggcgtgatgttgccgctggacccgtgcacgagattgccgtggaacatcagcatgccgccgggcttgcccgtaggcgcgacgatcccgccctgcttgacgaggcgcgtcaccgtatcctcgtcaagcgtccacagcggataggacgtggtggcgaggtcgtgcgaggcttcgagatcaccggcgttctggctgcgaggcaccagcatcagcgggccgttgatcggcatcacctcgtcgaggaagatcgcaatattcatcgcccgcggctccggcatgccgtcgtcgcgcttccaggtgccgtaatcctgatgccactgccagacatcgccggtgaaggccgatttggcgttgatcttgaactgatgcatgtagacaggctcgccgaacacctgttcgaccggctcgatcatgcgcggatgggcgccgaggatgccgaacgcttcgttgtagagatgcgcagcaaaggccgtgcgtggcgcgccgctcttctcacgccagacctccggccggttggcgtcgtagatgccgaccgcctcgcgcgcgagcaggtcgacctcctcctggctgaacaattcgggcaggaacagccagccctcgcgatggaagaactccaattgctcctgagacagtttcatgggtcgtcctcctgtagcttgtttgttggtcttttctcgtcgtgcccgggcttgtcccgggcacccaagttcttcgagcgtcgggcaaaggcggggatagccgggtcaagcccggccatgacgggccgcagccgcgaacggctacgccgccgcctcgtccgccgcccgcaaccgcacctcagtcatccgtcccgccgtctgcgcatgggccagcgcggcgcgttcggctccatccgcgtcacccgcgagaatgcgtccggcgatatcggcatgctccgcccaggcgctgccgcgatagtcgagctccgacagcaccgtcgccatcgagcgccgcatatgcggccattgcggcgcgatggtctcctcgatcacgggatttccggccagttggtagatcgcgcgatgaaaatcgacgtcgaggccgatcagatcggccagcgtggtgtcgccgtcgatgctgcgtcctgcggcgagcgccccgttcagccgcgcgcgccccgcagcgtcggtgcccgcgcgctccgcggcaagccgggccgcgagagcatcgatggcaccgcgcacctcgtagagctggcggatgcgtgaggggtcgagctgggtgacttcgaagccgcgcttgccgctctcggccacgagaccctgccggtgcaacagatgcagcgcatgcgataccggctggcgcgagacgccgagcctgtcggcgagttcgttctgcctgatgcgctggccggggcgcagcgtgcggtcggagatcgcctccaggatccgggcgtagacctggtcgatcagattcgggagcgggtcgagagggatcacgccggcagctccgataaaaccaaaaaggaatacggaattccgtattcgaagctacgtctcgtaagcacggacgtcaagcggtatctcagggtggccgataacctctcatcaggtccgctaagcctctgattttgcggggctcgctactgtgcatggggttgtttccgcgatattgcgggcggcctcagccctccagcacctccacatgcagcgcggcgattcgctccagatcggccagcgcctcgatcccagcaatgcggtcgcccttgaatgccacgcgcagcgcgacgcgcagctgtcccccaaggatgacggcaacaccgatctcaccatcgaccagcgccgtccgcgcggcctgggcgcgacctttatagagctgcgccacccgttcggcgccgcggacttctgccagcgtgccgagccgcaccgcggcctgatcggcgcggaagacgacatccggatcgagcacggccaaaagcccttcgaaatcgccctcacgcgatgccttgaggaaggcatcgaggataccgcgccgccgtgacaggtcggtctcgggcaccggcgccccctgcgcgcgccgccgtgcccggctcgcgagctgccgcgacgcctcgaccgagcggccgacgatcggcgcgatctcctcgaagggcacggcgaacatgtcgtgcagcacgaaggcgagccgctccgcgggctgcagcgtttccaggacgacgagcagcgccgcgccgacggaatcagccatctccgcctcgcgctcccgcgtctcgtctaccggttccggcacatgcggacccatcgggctctcgcggcgcgatttgcgcgcgcgcagcatgtcgaggcagatgcgcgcgaccacggtggtcagccagccgcgcaggttcgcgacgtcggacatgtcgtagcggctgacccgcagccaagcctcctgcacggcatcgtcgacctcggcgcgcgagcctagcatgcggtaggcgaccgcgcgcaaatggtcccggctggcctcgaactgttcagcgagaaaaatctgttcggtcatcggtcacattccctcgtcgcgatccgtcatgcccatgacgaagccagtccggccgatgtgaccggaaacttcgagatttgtgagatggagaccaaagcgatgcacgcccgcatgaaacaccctgtcatggtcctgcccgaggccatgaatcttcttcagtcccttggcggtctgaccaagcagggcctgccggaaaagcttctggaactggtgcacctgcgcgccagccagatcaatggttgcagcgtctgcgtcgacatgcatcccaagaccgcccgcaagctgggcgaaaccgacgagcgcttgtttgccgtgtctgcctggcgcgaggcgccctatttcaccaaccccgagcgcgccgcgctggccctgaccgaggcggtcacacgcctcgccgaccgcgaggacccggtgccggacgcgatctgggacgaggccgcgaagcatttcgatgaacgcgaactcgcgacgctgattctctcgattgcgaccatcaatgtctggaaccggctgaacgcgaccatcaagatgccggtcggcgtgtggaaggtatgaggtctcacttctcctctccctgcatgcggggagaggagaaaggatctcctattccgccaagaacctgctcaccacctcagcgaaccccagcgggtcctgctcgaacatccaatgcccggcgttcggaatcacggccgtcttggcacctgcgatgtgcgtggccagcacgcgccacaacaccgacaggctgccggtggtggcaccgccgccgatcagcaacgtttgcgtcctgatcgcctgcgcatcgccgagcgtgtagggccggcgctgctcgttgacctggccgaggaaggtcagcgcgttgtcacgcagttgctgcttcgcggcggccggcacacgccgccaggagccatcgccttcgatgccttcatagaaattctgaagcgcaccctcgacatcgccgccgcggatcatttcgaccgagcgcacggtgcgtgcagcaagtgaggggtgcgcgggcgtgccttccgggggcggcaggctggcatcgagatcgccgccgggctcggccagcacgagcttgcgcagcaaatccgggcgcgtctgcgcgacgcggaaagcgatgtggccgccgcgcgaatggcccatcagatcgacgggggcgggccgcacctgctcgatgaaggcgatcgtatcagcgacatgctgggccatcttgtagtcgtcgccgacggcgtcccaatgctccggaaagaagtgccgcaggctgaccgagatcacgagatggttcttcgatagcggcccaagcaccggataccaggtgcggaaatcactgagcgtgccgtgcacgcaaaccagcggcgggccgcttcccacttcgagataggccatgtcgtaaccgttgacacgaaagctctgcatgttcagctcgccaggaagtccagcacgacgtcggaatatttctgcggcgcctgctcgaacatcggatgcgtcgcgttcgggatgatcgccgtcttcgaatagggcacatgcgccgcgagcgcgtgcagcaccttcggcagcagccccttggtcctcgcgcccaggatgaacagggtcggcatcttgatcgacaccgcatccgccttcgagaacggcgggcggttgtcgcggatctggccgatcagcgtcatggcgttgtcccgcagattctgcttcaccattgccggcagccgcggccaagtgccggcaccctccagcgtgtcgacgaagacggcaagcccgccgtcgatatcgccggacgcgatcttctccgccgaggcggtgaagcgggccagcagcggcgagggaccgcccacgtaatccggatcgaggctcgcatccagctcgccgccgggctcggccaggatcagccgccgcagcagatccggccgctgctgcgccacgcggaaggagatatgcccgcctcttgaatggcccatcaggtcgaccgggccgaggtcgagcttttcgatgaaagcgatgacgtcttggacatgctgggcaatcgaataggtgtctccgacgccgtcccaatggtcggggaagaagtgccgcaagctgaccgcgagcacccggtgtcgctgcgtcaatggcccgagaacacagccccagacgcggaagtcgttgagcgagccgtgcacgcacaccagaggcggccggcctcggtcttcgcccacgtcgagatagaacatgtcgtaaccgttgacgtggacgctctgcattgtggggcccgcgagggaataggaactcctgtgcacgatccccggaaaccgggtggatcgcaactatttccaagcctagatttcgctggagatgaaagagggggcctgcacgagaagcaagccaggacagccatgaccgaccaccattttgccctgttcgacacccgcattggcctctgcgccatcgcttggggcccgcgcggcatcaacggcacgcaactgccgatgggcggcgaagagaagatccgcaccagaatccaccagcgccatgccgaggcgaccgaaaccgagccgacggtcgaggtgcaacaggccatcgaccgcatcgtcaagctgctcgcgggcgagccggatgatctcaccgatatcctgctcgatctcgacggcgtccccgagttcaaccgcggcgtctatgacatcgcccgcgcgataccgcccggcaagaccgtcacctatggcgacatcgccaagcagcttggcggcgttcagctgtcgcgcgacgtcggccaggcgctcggccgcaacccgtgcccgatcgtcgtgccatgccatcgcgtgctggcggccggcaacaagcccggcggcttctcggcgaacggcggcgtggtgaccaagctgaagatgctcgagatcgaaggcgcactagtgaaccacacgccgagcctgttcgactgaggtggtctgcaccagcgccgtagggggatttgccgaaggcgtaatcccccctaccaacccttctagatcttcgcggccgtcttcggccaatatttgtcgcgcagatgccgcttcaccagcttgcccgtcggcgtccgcggcagctcggcttcgaaatcgatcgagcgcgggcacttgatagctgagaggcgggtcttgcaataggcgatcaggtcggcctcgagctccttgcccgcgcggctcaggtcgtgcggttgcaccaccgctttcacctcctctcccatctcctcgttcggcgcgccgaacacggcgacgtcggcgacgtcggggtgcgtgatcagcacgtcctcggtctcctgcggatagatgttcacgccgcccgagatgatcatgtaggacttgcgatcggtgagatagaggaagccgtccttgtcgagatagccgacatcgccgagcgtcgaccagcccttggcattgtaggcctttttcgtcttctcgggatcgttgtgataggtgaacgcgggcgcgtcggcgaaatagactgtgccgatttcgccgaccggctgctcctcgtcgttttcgtccagaatcttgatcttgccgactacggcgcggccgacgctgccgcgatgctccagccattgctgcgagttgcaaacggttacgccattgccttccgagcctgcataatattcgatcaggatcggtccccaccattcgatcatcttggccttgacctcgatggggcagggcgcggcggcgtggatcgcgcccttcagcgtggagacgtcgtacttggtgcgcacctcatccggcagcttcagcatgcgcacgaacattgtcggcaccagctgggactgcgttaccttgtatttctcgaccagcctcaggaattcttcggcatcgaagtgctccatgatgatggaggtgccgcccagcacgattgccatcatgttgaagcgcaagggggcggcgtgatagagcggcgccggcgagaggtaagtgctgtcggcattcatgccgcacatgtcggcgcagagcacgcgcaggaaggcattcggtacgtcgatcctgttgccctcgaacgccttcttgatgcccttgggccggccggtggtgccggatgagtacagcatatcgtagccggcgacctcgtcggcgatgggcgtgatcggctgcgcagccgcttccttgtcgtaggagcggaaccccggcagcggctcgtccatcatgtagaagatcggctcaccgggagtacccctgatcaggcccttgatctgatcggcgcatttcggtgtggtgatcacgagcttggcgccgcaatccttgatgatgtagtcgatctcgtcctgcttcagatagcggctgatcgccgtgtagtagagcccgctgcgctgtgccgcccagcagatctccatgaaggcgagccggttctccatcaatagcgcgatgtggtcaccggccttgaggccgagcgagcggaacagatgcgcgccctggttcgagagctcgtcgagctcgcgataggtgatcgctttgccggtcccggccatctggtaggcgatcttgcttggcgtggtctttgcgtagacggacggatgggtcatggcgtttcctcaaaacgcgaatggcgagtagtgaggggcgaacagggaagggcaaaccgctcttcgcctactcacccttcgctactcgccactcacgactcgcttttgctttttttagagccgctcgacgatcgtcacgttggccataccgccgccttcgcacatggtctgcaggccatagcgcttgccgcgctgatgcagggcatggaccagcgtggtcatcagcttggtgcctgagccaccgagggggtggccgagtgcgatggcgccgccgttgacgttaaggcgctccggatctgcgccggtggtcttcagccacgcggtcggcaccgacgcgaaggcttcgttgacctcgaacaggtcgatgtcgccgatcttcatgccggccttctccagcgcgcgcttggtcgcgtgcagcggagcgtcgagcatgatcacgggatcgccgcccgtcatcgtcatgtgatggatgcgggcgagcggcttgacgccgagttgcttgagaccacgttcgttcaccaccatcacgccagaggcgccgtcgcagatctggctggcgctggccgcgctgagcttgccattctcggcgatcagcttgacgcccttgatgccgtcgaggctgacgtcgaagcggatgccttcatcgatatggtgggtgtccttgctgccatcggcgcgcgtgatctcgagcggcacgatttccttcttgaagtggccggcctgggtcgctgcgatcgcgcgctgatggctgttgtaggagtattcgtcgagctcatccttggagaggccgtacttctcggccatcatctccgcgccggtgaactggctgaacacgatgttcggatacttcttctcgatgcccgggctcttgtaattgccgaagccgttcttggccggcagctgcgaggacagccccatcggaacccgcgtcatcgattccacgccggcggcgatcacaacgtccatcgcgcccgacatcacggcttgcgctgcgaagtgcagcgcctgctgtgaggagccgcactggcggtcgatcgatgtgccgggcacgctttccggcagcttcgaggccatcacggcgttacgcgcaacgttgttggactgctcgccgacctgcatcacgcagcccatgatcacgtcctcgaccagggcgggatcgaccttggtccgatcgaccagctcgtccagcactttcgcggcgagatcagccggatgccagccggcgaggcggccccccttgcgcccgcccgcagtgcgcgcagcggcgacgatgtatgcctcggccatgtcggtctctccctgaattcttgatgaggttggttgtcgggacggatttaagggacgccaggacgtttagtcaatcgatcaattaactcttgtgatgaggcgccgcttgggcttatctgcgccgcgcctccagcggccaaacagggatttcagtggctaccagcgtaccgaacaggctccccgcagggaaaaattccacggcagagaaattgctggtggccgcgagcgagctgatgatcgaacgctcttcgatcgagatctccctgtccgatatcgcgcagaagtcgggcgccaacgccgcgctggtcaagtatcacttcggcaacaaggacggtctccttctggcgctgctcgcgcgggatgctgcgaccgagatgtcgaacctcgaatttctcctggcgcaaccgatcacgtcgacggcgaagctgaagctgcacatcgccggcatcatccgcgcctatcaccggtttccctacatgaaccggctgatccactatctgctgcacgagaccagcgcgagctctgccgatgaagtctcgaaattcttcgtggcgccgttgctggacttccaccgccgcctgctggccgagggcgtcagtcgaggcgaattccgccagaccgatcctgtgttgttctacaccagcctgatcggggcctgcgatcatctgttcttcggccggcatgcgatgtcccgcgcgaccggtgtcggcccggtcaccgacgaagtctgccgacagtacatcaagcatatggaaacgctgatctgtggcggcatcctcacgcaagccgaggaagctgccgcggccggataatcggccgagctcttaagagtctagagaagaaacgcccaaggaaaaggtagaggaaaggtacaagcgatgcagttgaaggacgtagccgttctcatcaccggtggtggttcgggcctgggtgccgcgaccgcccgcgccatggccgcgaaaggtgccaagatcggcgtgatcgaccagagcaaggaaaacgccgagaaggtcgccgccgaggtgaagggcgttgccctccacgccgacgtcaccagcgaggagcagatcaaggcggcgattgcgaaggcggaagccgcgcacggcgtcgcgcgcgtgctgatgaactgcgccggcatcggcggctcgcagcgtatcgtcggccgtgacggcgtctacccgctcgagaagttcgcgcgcatcatcaacgtcaatctgatcggcaccttcaactgcttgcggctgttcgccgagcgtctcgtcactgcggagcccatcggcgaggagcgcggcgtcatcatcaacaccgcttcagtcgccgcttatgaaggtcagatcggccagatcgcctattcggcttcgaaggggggcgttgtcggcctgacgctgccggccgcacgcgatctcgccagccagaagatccgtgtcaacaccatcgcgcccggcctgttcttcacgccgctgctgatgggattgaacgaagaggctcgcaagagcctgggtgcgcaggtgccgcatccctcgcgtctcggcgatgccaacgaatacggcatgctcgccgtgcacattgtcgagaacccgatgctgaacggtgagaccatccgcctcgacggcgcgatccgtatggcgccgcggtaggcggctctctccttacccctgcccggaggggaagggtcggcgcgacgcgccggggtggggtgatctctccactcgggcattgttcggtgcagagagaccatcaccccacccgctcgcgctgcgcgtgatcgaccctccccctccagggggagggtggcaatccggctcatgaccaatgtgcgaggcccccatgtcccaaccgctgctgatcgagcatgacgacggcgtcgaccgggtgacgctcaatcgtcccgagagtctcaatgcgctcgatcatgcgctgatcgatgcgctcaacgactatttccagggcctgcagcgcaatcgcgacacgcgtgtcgtcgtgctaaagggcgccggcaaaaacttctgcgccggtctcgatctcaaggcggcgatggcgcgccgcgccgggcagcaggaaccgcctggtgtgacggagtcgctggactcacaaaggcgtatcgccgatatcgtgatgctgatgcggcgctgcccgcagccaatcatctcgctggtgcagggcgcggcagccggcggcgggtttgcactggcgctcgcctcagacatccgtatcgcgacgaaatcggcgcggatgaactgcgccttcatcaagctcggcctcggcggctgcgacatcggcaccagctactttctgccgcggctcgtcggcgtctccgtcgcatcggagctgatactgacgggacgcttcatcggtgccgagcgcgcgatggcggtcggtctcgtctcggaggtcgtggacgaggacaagctcgatgcggcggccgagccctacgtcgaggcgatgatgatggcgtcgcccgtgggcctgcgcctgtccaaggaatgtctcaacatgagtgtcgatgccggatcgctggaagcggcgatcgcgatggaggaccgcaaccaggtcctgtgcagccgctcggaagagttttcggaaggaatcagggccttccttgagaagcgaaagcctgtctatatcaagcgctgaacgacgaagatccgtaaaggacgagtaattccgggagacgcaaaatgagtggaagcgcggcggcggtgatgacgaagcccgcctttcgcaaggtcgaatggctcaagcgcgacatcgatgtcgagcgccgcgccgacggcacggtggtgctgaagtcgcgcattcctcttcaggtctacgaggagcatattccggcgtcgctagcgaaatgggcgcgggaaacgcctgagcgcatctggctggcgcagcgcggcggtccaaaccgagaatggcgcaaggtgtcttacggcgatgccaagcgcatcgtcgatgcgctgacgcaagcgctgctggacctcaagctcgagggacggcccgtcacgatcctctccggcaactccatcgagcatgcgctgatgacgcaggcggcgatgcaggcgcgttcgcccgcggctccggtgtcgccggcctattccctgatgagccacgatcacctcaagctgaagtacctgttcgacctgatcaagccagccgtggtaatggtccaggacggcccgaccttcgagaaggcgctgaaggccctcgacctcagcggcgtcaccgtcgttcatgtcgcgcggccctgcgatggcatcaagagcgtcagctttgccgagcttgccgcgacgcctgtcaccgccgatgtcgaggcctcgattgcgcagatcacgccgcggaccgtcggcaagctgctgttcacgtcgggctccacgggcatgcccaaggcggtcatcaacacgcaggagatgatgtgcgccaacgcggcaatgatgatgcaggtgcggccgcgcgatcccagcggcccgatcccgaccatgctggactggatgccgtggaatcacactatgggcggcaacgcggctttccacccgatcctggtcgatggcggcacgctctatatcgatgatggccggccgatgccgggtcagttcgaggaaacgctgcgcaacctccgtgagatctcgccgacctattacgccaacgtgcccgccggctacgccgcgcttgcggcggcgatggagaaggacgacgcgctctgtcgctctttcttcaagaacctgtcgatcatggcctatggcggcgcgcggctgccggatgatctctacgatcggatgcaggcgctggcggtgaagaccaccggcgagcgcatcgtgttctacaccggctggggttcgaccgagaccgcgccgacctcgaccggcacctattgggacaccgagcgcgtcggcctgatcggcctgccgtttccgggcgtcgagttgaagatggtgccgtgcggctcgaaatacgagctgcgcctgcgcggcgtcaacgtcacgcccggctatttcggccagccggagctgaccaagaagatgttcgacgacgaaggcttctactgcatcggtgacgccgggatcttcgtcgacgattccgatccggtgcagggcatcatcttcgccggccgtgtcgtggaagacttcaagctcaccaccggcacgttcgtgcatgtcggctcgctccgcaccgacgcgatcgcggctgcgtctcctgtcgtgcacgacgcgctggtcgcaggccaggatcgtgcctttatcggcctgctggcctggccgaacctgcatgcctgccggcagctcgtcggcaacgccgatatgagctttgcggaggcggtgcagcatcctgaggtgatcgcctgcttccgccgtgggctggaagcgcacaacagagaatgcgaaggcgccagcagccgcatcatcgcgcgcgcgatgctgatggtcgagccgccctcgatcgacggcaatgagctcaccgacaaggggtacatcaaccagcgcgccggcttggagcgccgcgctgcgctggtggagcggctctacgcggatcagccggatcaggatgtgattgtgctgaaatgagtgcgcaactccctccacgtcattccgggctcgcgctccgcgagccccgcaatgacggcaccgatgaatgacaaggaatagacaaggatagcccgccatgaacttcgatttctccgacgaccagaagcagctccgcgaccaggcacgcaagttcctcaccgagaagtgttcgtccaaggcggtgcgtgtcgtgctcgacggcaaggcgccgtatgacaaggagctgtggaaaggcctcgccgagatgggtttccttggcgtcgcaattccggaagagttcggcggcgcgggcgccggccatctcgagctctgcgtgattgcggaggaaatgggacgggccaacgcgccggtgccgttctcctcgaccgtgtatctcgccgccgaggcgctgctgatcgccggcagcgacgcgcagaagaagaaatggttgcccgccattgcttccggcgaagcgatcggcactctggcgctgttcgagggcaagggcaatccgtcgccgaagaacgtcaagctcacggctgcgaacggcgtgctcaacggcgtcaagaggccggtcgccgatggtgctgtcgccgatttcgcggtggttgccgcgcgcacggcatcgagcgggcgtgacaacgacatctcgttgttcctgattgacctcaaggccggcggggtcgaagtgaagagcctcaccaatctcgatccgacccgcgggcaggccgagatgaccttcaaggactgcaaggcggagccgctcggcgcggtcggcgaaggctggagcatcctcacccaggtgctcgaccgtgctgcggtgctgtgcgcgttcgagcaggtcggcggtgctgatcgcgcgctggagatgggacgggactacgcgctcgaccgcatcgcctttggccggcagatcggctcgtttcaggcggtcaagcacatgctcgccgacatgtatgtctcggcgacgctggcacgctccaacagctattacggtgcctgggcgctctcgaccaatgcggccgagctgccggaagccgcagccgctgcgcgcatcagcgcgacgcaggcgttccagcattgcgccaagaacaacatccaggttcacggcggcatgggtttcacctgggagttcgactgccacatgtactatcgccgcgccaatgcgatggcgcttgggctgggtagcttgtcctactgggaggatcagctgatcgaccgcatgcggaagaagaacgcggcgtaatgtcattccggggcggcgcgatggcgtcggacccggatctcgagacgagtcggtaacctccggatttcgggttcgatgctccgcatcgccctggaatgacggaagagagaagaaaaccatgaacttcgacgacactccgcaggaagccgaattccgcgccaccgcccgcgcgtggatcgccgcgaatgcgcccaagcaatatgaggaggagctgcgcaaatcctcgctcggccgcacgcaactgaagagcgccaacattctggaggtcgcaaaggcctggcagaagaagaaggccgatgcaggttgggcgtgtctgcactggccgaaggaatatggcggccgtggctcgtcgcccatcgagcgcgtgatctggcagcaggaggagggcccgttcggcaagctctcgcagatgttcatcatcggccacggcatgtgcgggccgaccatgatggcgttcgcgcgggaggagcataagcgcacctatctgccgccgctcgcgtccggcgagaaggtctggtgccagctcttctccgagcctgccggcggctcggacgttgccggcctgcgcacgcgtgccgagaaggacggcgacgactgggtcatcaatggccagaagatctggacctcaggcgcgcattattccgactacggcatcctgttgacgcgcacagatccgaccgtgcccaagcacaagggtctcaccatgttcttcctcgacatgaagagtccgggcgtggaggtcaggccgatcaagcaggcgagtggcgcctccgacttcaacgaggtctacttcaccaatgtccgcattcccgatcaccagcgactcggcgaggtcggtgacggctggaacgtttcgctgaccacgctgatgaacgagcgcatgtcgatcggcgccggtgttgcgaccggctttccggagctgttcgagtactgctcgagcctgatgctcgatgacggcccggcgatcgaggatcgcgcggtgcgctcgaaattggcgaactgggcggtgaaggcgagcggcctgcgctataccagcatgcgcgcgatctcggcgctgtcgaagggcgagcgcccgggacctgaaaattcgatcggcaagctggtggcgggctcgatgatccaggatgtggcgacatacgcattggatttgcagggcgcggcgggcgttgtcagcggccccgaagacgccgaagtggccggccgtttccaggccatgctgctgcgcgcgccaggcacccgcgtcgaaggcggtaccgacgagatcatgcgcaacatcatcgccgagcgggtactgggcttgcccggcgatatccgggtcgacaaggacgtgccgttcaacaagatcccgacgaagggaagagggtagaggtccgccatgaatttcgatgacaccccgcaggaagccgcattccgcgagaccgcgcgcaaatggatcgaggccaatgcgccgaaggagctccatgccgagctgtcgaaatcctcgctcggccgcatccgcctggccaatcacgacatcgtcgatgtcggcaaggcctggcagaagaagaagttcgagggcaattgggcctgtctgcactggcccagggagtatggcggccggggtgcgacgccgatcgagaaggtgatctggcagcaggaggagggcgtctacggcaagctgacgcaaccatttcagatcggcgagggcatgtgcgggccgaccgtgatggcgttcggcagcgaggacgccaagcggcggtacttgcccaagctcgcctctggtgaggagatctggtgccagctgttctccgaaccgtccgccggctccgacgtcgcgggtctgcgcacccgcgcggagaagaagggcgacaactggatcgtcaacggccagaagatctggacctcgggtgcgcattattccgactatggccttttgatcgcgcgcaccgatccgaacgtgcccaagcacaagggcctcaccatgttcttcctggacatgaagagccccggcgtcgaggtgcgaccgatcaagcaggccaacggcatgcaggagttcaacgaggtctacttcacagatgtcgtgatccctgacagccagcggctcggcgccgtcggcgagggctggaacgtctcgctgaccacgctgatgaacgagcgcatgtcgatcggcgcgcggctcgcgaccggtgtccccgagatgttcgagttctgctccaacctgatgctcgaggacgggcttgccatcgacgatcccgccgtgcgctccaaactcgcgacctgggcggcgaagtcgaatgggcttaaatacaccagctaccgcacgatctcggcgctgtcgaagggcgagcggcccggcccggagaattcgatcggcaagctggtctccggcatgatgctccaggacatcgcgacctatgccatggacctccagggcgcggccggtgttctcaccggcaatgacgaggagactgtgcagggccagttccagcagatgctgctgtccgcgccctcgatgcgcatcgccggcggcacggacgagatcctgcgcaacatcatcgccgagcgcgtgctgggcctgcccggcgacatccgcgtcgacaaggacgtgccgtacaacaagatcccgaccaaagggcggtgatctctcttttgtcccggatgcggtgcggcgcgaagtgctgctccgctgagcggggatgcaggagtcacaatgggcctcggctcggcggggcacgaaagcgagactagtcatggacgccaaagggcccaacgccaactactccaccgaagaccgcatcggcgtgctcgaagagcttctcaatgagcgctactccgtccgcgcgttccttgccaaggaagtcgatcgcgcgatcatcgagcatgtgctgaccaccgcgcagcgcaccgcgtcatggtgcaacagccagccctggcaggtcgtcatcgccagcggcgaggccaaggagcgctttcgcaaggcgatctacgcggaggcctccaaggggctcggtgatgactacgacttcaccccgccgcgcgaatatgtcgggatatatctggagcgtcgccgtgagagcggcttccagctctacaacacgctcggcatcgcccgcggcgacaagatggcttatgccaagcaggcgctggagaactacaatttcttcggcgcgccgcatgtcgccgtcatccacaccaacgagccgctcggcatctacggtgcgatcgattgcggcgcctatgtcagcaatttcatgctggccgcgcaggcgctcgggctcggcacgataccgcaggccgcgctcgcgcggcattccgggttgatccgccgccacttcaatctgtccgacgatcgccgcgtcgtctgcggcatttcgttcggctatgcggacaatgcgcacaaggtcaacagttatcgcacctcgcgggcgagcttgggcgagaccgtaacgttcgtggatgtgtgaacgcctgccctgagctcgacgccgtcggtgtagacgtgccaaagacggccgtcgatacggccgtctttcagcatttccggctcttagccgccgctgccgccgatcacggcgcgcaccgtctcgtcgggcccgaaatcctcggcgccgtcgacatagagcagcgcggcgagcttcgaacgggctcggttgacgcggctcttgatggtgccgaccgcgcagccgcagatcgaggctgcgtcctcataggagaagccggacgcgccgaccaggatcaaggcttcccgctgatcttgcggaagcttatcgagcgcggtgcgaaactcctcgaattcgaggtgcgcattctgcgaaggctgcgtcttcagagtcttcgcatagttgccttcggcatcctcgacctcgcgccgccgcttgcgataatcggagcggaacaggttgcgcaggatcgtaaacagccaggccggcaggtttgagccgggctggaacgagtcgatgttggcgagggcacgcagcagcgtctcctggacgaggtcgtccgcgcggtccgcattgccgctgagcgagatggcgaaggcgcgcaggctgggcacggccgccaagatgtcgttgcgcagggagtccgtgagaggcattaatccctcccattgttgttgtcgttggatccaccctcattttccacgtggggagtcgctcctggcgcatcaagcttcttgatcagttctgcgaaccgatcgggaaccccttgccgcacgacatcatcgtacatggcccgcaactggtgcccgatccgggattgaatctccggagtgaggcctcccttgccgggggtcgtgcttctgctggcttgagacttgagatctttcatgacctgttccacgtttccccgagttaagttactgtgaaatcgagaagttttctcaaccgggagccgttccctggataggcacaattccagctgcgctaaaaagttcccagttcgtcggaacttttctcggccagaggcgtagtcagcccagcaggggaacctgggccccccgcgtgacgcgtcgtcgtgtaaggttggcccgaagacgaatggagtggggatgtcccgttcacagcttgttgctgaacacttgccgttgttgcgccggtacgcgcgcgccctgacgggcagccaggcctccggtgacgcctatgtcgcagccatgttggaggccatgctgggagacccgtcggtgctcgatgagagccatgggcccagggctggcctgttccggctgttcacgcagatctggaattcggtctccgtcaacgacgatgccgaggtgacgaccctgccgatgccgccggagcggcggctgtcgaacatcacgccgttgccgcgccaggcctttctgctgctttcgctcgagggcttttcggaagaggaagttgccttcattctcgggaccgacgtcgctgagacgcggcggctcgcggatgctgcaggacgggagatggccgccgaaatcgcgaccgatgtcctcatcatcgaggacgagaccttcatcgccatggacctcgagagcctggtgaagaatctcggccacaacgtcgtcggcgtcgcccgcacccatgccgatgcggtggccctcgccaagaacaagcggcccggcctgatcctcgccgacatccagctcgcagatggctcgtcgggcctcgatgccgtcaacgagctgctgcgcaccttcgaggtgccggtggtcttcatcacggcctatccggagcgcttcctcaccggcgagcggcccgagccggcatttctgatctcaaaaccgttccagcccgcgatggtgtcggcggtcgcgagccaggccctgttcttccagcgcaactcgcgcaaccgcacgccgaaagcgccggcggcataaggcgccatttcgcgaaacgatctgatccggcgtgctgcaaggcacgccggatttttcatgccgccgctcgcgcttgacgcggatcgacttcgccgctcatacctcatgccttgatccccgtcggagatttgccatggaccagcggctccttgatcgtctcaccatccgcgacctcgtcgaaaactgggcggtgtggcgcgacgctggcgactgggagcgcttcgccaccgtctggcatgaggaaggctggatgtccgctacctggtttcaggggccggcgcgggatttcatgcgtgtcagccaggagggatttgccaaaggcgtgcgcatcctgcatttcctcggcggcaccagcatcgatcttgcgggtgcgcgagccatcgcgcagaccaagatgacgatctcgcagcgcgcactcgtccacgacgtgctctgcgacgtcgtctgcaccgggcgcttctatgatttcctggagaagcggcagggtcgatggggcatcgtccggcgccagccaatctacgagaaggatcggatggatccggtcgatcccgccgcgacgctgcgccttgatcagcaggcgctcgccgtgctgcccgaaggctaccgtcacctcgcctatatgcaggagctgatcggctataaggtcaagcgcgacatgccgggcctcaccggtcccgaagtcgagaagctctatgacgaaggacgggcgtggctggcgcggccggcggaatgacaccagacaaaagtaaggcgcgactggcatcaccacagtcgcgccctacgtcgccggcctatggggcaggggggaatagccggctgctgagacgactcctggtcgcgaaagtcgttcccccaagcgcgaaatattttgcgtgcctgcggcctttttcgcacacggttaagtgatcgtaacggtcaagaactcccgctcctgcggcggcgttgttcccgcgatcgccatgggggcgagggatcgacagccatgtcacagattcaaaaggtctttttgggtgccgtcgcgatcgtcgcgacgctgggtgccgtgcaattggcgtctgggcacgatctggccgaccgttggcaggcagtcgccgatatccccagccacagctcgatttccgcgcccagccagaacgtcaatcgcgccgcgaaggcggaccgtctcgctgggcttaagccggcgccggttgccacgcgcacggtgtcgatgcggctgaacgacctcgccgagacgtccgtgctgctgcgggtccccgcgaccatcgagaccggcaacgccaagccgccactgctgctccagaaccagaagaaggtacgcagcaagccaacgatcgcctgcgagccgatggtgagctccctgaccgaagtcgccaagcttctccagcccggccgctgcgtgacctgatctgcgctctcaggacgacagcaccgcagggcgatcgcttcacatcctcttgatccgtcattgcctcgcgctatatccgggttccttcccttttgttttgaccgggtaagcgcatgacgacgtcagacacggctgtgcatacgcagcctttccaggccgaagtttccgaactgctgcacctgatggtgcattccgtctattcggaaaccgacatcttcctccgcgagctcatctccaatgcctccgatgcgtgcgacaagctgcgctacgaggccatcggcagtcccgccctgctgggggagggcgacgccctcaagatccgcatcatcccgaacaagactgccaagacgctcacgatcgccgacaacggcatcggcatggagcggcaggagctgatcgaccacctcggcaccatcgcccgctccggcaccaaggcgttcgtgtcgaagctgaaagaggccaaggacgggctcggcctgatcgggcagttcggcgtcggcttctactccgccttcatggtcgccgagaagatcgtcgtcatcagccgccgcgccggcgagagcgacgtctggacctggagctcccaaggcggctccggcttcgagatcgcccgcgcgagcgacgaggacgccgcgcgcgtgacgcgcggcaccgagatcgtcctgcacctgaaggacgatgccaagaaatatctcgagacctacgagatcgagcgcatcgtcacggcctattccgacaacatcctgttcccgatcgagctcgtgcccgaagagggcgagccgcgccagatcaattcggcgagcgcgctatggcagcggtcgaaatccgagctgacagcggaggactacaagaaggcctatcatcagatcgcctccgccttcgacgaccccgcgatgacgctgcattaccgtgccgaaggccggtattcctacgccgtgctgctgttcgcgccctcgaccaagccgttcgacctgttcgagccgaaccgtaagggccgggtcaagctctacgtccgccgcgtcttcatcaccgatgatgccgatctgttgccgggctatctgcgctttgtccgcggcgtcgtcgacagcgaggatcttccgctcaacatctcgcgcgagatgctccagaacaatccgcagctcgcgcagatccgcaaagccgtggcgacccgtgtcgtatccgaactggaaagccttgccgagaaggacccggagaattttgccaagatctgggacgccttcggcgcggtgctaaaggaaggcatctatgaggatttcgagcggcgcgaaaagctgctcgcgctgtcgcgcttcaccaccacatcgggcgagaagcggtcgctgaagcaggtcatcgccgatttcaagccgaaccagaccgaaatatattacctggtcggcgacagcatcgagcggctgaaatccaacccacggctcgaggccgcgaccgcgcgcggcatcgaggtgctgctgctgtccgacccggttgatgccttctggacttcgatgccttcggagttcgacggcaagccgctgaaatcgttgagccagggcgatctcaatctcgacctgatcccacgcattgacgacaaggatgaggcgaagaaggaagaaccggccgcggatgaggccgccaccgtcgccgtgatcaaggctgcgctcggcgaacgcgtcagcgacgtcaaggcctcgacgcggctcaccagctcggcctcctgcctcgtcgccgacagccaggggccgagccgcgagctggagcgaatcctggcgcagcagaaccgcggcatgaagaccaagccgatcctcgagatcaatttgcggcatccgctggttaccgcggtcaccaaggcgcaagcaggctcgaaggtcgtggacgatctcagcctgcttctgctcgagcaggcgcagatcctggacggcgaattgccggaagatccggcggcgttcgcggcaaggctgaaccggctggtgttgcaagggctcggcgcgtagccgctggttcggccgtcaaccccggctatggcgagggcgagtgctgcgagagcgctccactcaccttgccgtcatctctctctaggaacagtcgcctccagcgtggtgttatgccatatgaggtgactgaggtgaccggcatccgtgccggcgccgtgttcgattcgaggattttttccatgcgcttgccgatactgaccgtcaccgcaattgtgaccctattcgtcgcggccgatgccagcgcccagacctatgatccgcgctatcccgtgtgcatgcatgtctatacgcccggcggcttcggcggcggcggcgattatttcgactgctccttcacctcactgccgcagtgccgagcctccgcctcgggccgctcggcgagctgtgacctgaatccctattacgccttcgaccaacccccgccgcgcccgcgcaagcgacagaggcaacagtactagcggtcccacgatgcggtttcctcggatcttctcgtcctgtgcttcgctcgccctgctccccgccgtcggcgcttggcttgtgattgcgccctcccacgcgcagaccttcgatccacgctaccccgtctgcatgcacgtttattccggcgcgaatggcggtggcggggagtggtacgactgctccttcacatccatcccgcaatgccgcgccaccgcttcgggccgcgccgcgacctgtgacctcaatccatattatcccgtcaacgcaccgccgcgccatttgcgccgcgggcgaagcggctagcgcctgcctggcgtttcggcgccggtgctggcgtaacagctgagccgccaatttcgttggccttgtgcgggccgtctcgtgcagccggcgggctggtaaggaatgactagcgttaatcgcgcactaaccggcttttaccctgccccttaacacctgggcagggcggtgcgggctaagatcggcgaaccagcagccatggcccgagagaacaacagcatgaccaccgctgtcatcgagcaagcgaaatccgcgcgcgcgccgtcggcgtcgaagatctggctgaaggcgatcgagctcaccgcacggatcgagacgctgccgggacgtctgttcgccgacgtcgtcgacgattgggcgcgacgccagcccgatcgcgcggcgctggtcaccgacattggcgcgctcgattacgaaggcctgtcgaagcgtatcaatcgctacgcgcgctgggcgcgctcggtcggcctcgtcaagggtgataccgtcgcactgatcatgccgaacggcatcgactatctcgcggcatggctcggcatcagccgcgtcggctctgtggtcgcgctgctcaacacaaagctggtggggcagtcgcttgcgcattgcatcgatgtcgccgcaccccgacacatcatcgtcgcgcatgatctttcggaggtgctggagagcgcgaagccgcatctgaagacgcaagccaaggtctggacccatggcgatgcccgcggcgaacgtgcgatcgacgtcgcgcttgccgtcctggacgacggcccgctcgcgccggacgagcacggcgatgtcagcatcgaagatcgcgctctgctgatctacacatcgggcaccacgggcctgccgaaagcggccagtatcagtcaccgccgcatcctcaactggggcttctggttcgctggtctcacaggcgcgacaccgcaggatcggctctacaactgtctgccgctattccattcggttggcggcatcgtcgccccatgcagcatgctggctgccggcggctccgtggtgattgcggataagttttcggcttcgaacttctggtccgacatcgtgcgccacgactgcacgctgttccagtatatcggggagctctgtcgctatctgctgaaggcgccgccgtcggaatatgagaaccgccatcgcctacggctggtctgcggtaacggcttgcgcggcgacatctgggaagactttcaggctcgtttcgccattccgcgcatcctcgaattctacgcggcaacggaaggcaatttctcgctgttcaatgtcgaggggcaacctggcgcaatcgggcgcatcccgccgctgctcgcgcatcgctttccggccagtctcgtcaagctcgaccccgatagcggcgcgccgctgcgcagtgacgagggcctctgcatggcctgcgcccgcggcgaggccggcgaggccatcggccgcatcggcaccgcggaccagggcggcggccgattcgagggctacaccgatgccgacgagaccgagaagaagatcctgcgcgacgtctttgccaagggcgacgcctggtttcgcaccggcgacttgatgcggatggacgacaagggctttttccatttcgtcgaccgcatcggcgacaccttccgctggaagggcgagaatgtcgcgacctcggaggtcaacgacgccgtgcgcgatttcaccggcgtggtcgacgccaccacctatggcgtcagcatacccggcgccgacggtcgggccgggatgagtgcgatagtcgtgaacgagggttttgacatcaccgcgctgcctgctcatctcgcacttcgcctcccggcttacgcccgcccggtcttcatccgtatctcgcgggagctcgacgccaccgaaacgttcaagcagaagaaaggcgttctcgcgcggcaggggtttgaccccagcgcgatctccgatccgctgttcatgctcgagccgaaatccggcgcctacgtcgcgctggatgccgaggtcaatgcacgcatcaacgacggcacgatcaggctgtaggcctgcggaaatcagcagataggtccaattttatctgaattgtccaagaagccatttacttctgtcgggtaaacagacggtcatggggaggcggtcatcaagagccgccgtaacacgaattgataatgaaaagcgagccagccatgtcggtaaggtcaaaggtcatcgaagccattcagcagatcgccaaggaacagcacgtcgcgcttcctgcgctctcggacgatctgtccctgcacgagacgggcttcgactcgctcgccttcgcgatcctggtcgcgcgtctcgaggacgagaccggcgtcgaccccttcaccatttccggggacgcagcgtttcccgccaccgtcggcgatttcgtgcgggcctacgaaaatgtccccgcgtgagatcttcgcgcttcgcgatcatctcggcgcggagctgaaaggccgcacgatctccgatgcgcacgacgtcgtgtcgctgaccgacatcctgtcgcatacggttctgggcggccggctgcgcgagctgtcgggccgcgccgtgctgctcaagctgtcggcccagctccggtcgggccttgccatgatcgaactcgacggcgtcgcccgtcgcatgctgctgtgcccgcccgatctcaacccggcgcatctcgacgcgttggtcgcggatgccggaatcgatgccgtcgtgacggacgagccggatcgttgggccggcactggcgtgccgctggtcgtcaccgcgcagttgccgcttcaagccaccgcgcggaccaggaccgaacgcgccaccgaatggctgatgctcacctcgggcacctcgggcgtgccaaagatcgccggccatacgctggaagcgctgacaggcgcgatcgttgccgaaggccccgcacgcgggcctgcgccggtatgggcgacgttctacgacatccgccgttatggcggtttgcagatatttctccgcgccgtcctctccggcggttcgatggtgctgtccgatccccatgaggcactcaccgatcacatcgcgcggctgaacgcgcgcggcgtgtcgcacatctccggcacgccctcgcactggcgcaagctcctgatgagcggctcggccgcgcagttcgccccggcttacgtccgtctctccggcgagatcgccgaccaggccgtgctcgacggcctcaaagtggcgtttccccatgcctccgtcggccacgcctatgcctcgaccgaggccggcgtcggtttcgccgtcaatgacgggctcgagggatttccggccgactatctcggcaaccgcaatggcgtcgagatgaaggtcgtggacggctcgctgcggatccggtcgacacgaacagcccacgcctatatcggccgcaacgccgcggcgctcaccgatgatgaggggtttgtcgacaccggcgatatcgtcgagctgcgcggtgatcgttattacttcgtcggccgccgtggcggcatcatcaacatcggcgggctgaaggtccaccctgaggagatcgaggcggtgatcaaccgccatcccgccgtgcggatgtcgcgcgccaagtctcgccgcagccctatcaccggcggcatcgtcgtcgccgatgtaattcttgccgagggtaccgatccggcgcacgcgaaggggatccgggatcagatcctggagcagtgccgcgcccagctcgcctcgcacaaggtgccggccgtgatccgcttcgtcgaggcgctcgatgtcaccccggccggaaaactggcgcgcaccgatgcataatattctcgtcaccggcggcagccgcggcattggcctggcgatcgccaggcggctcgccggcgccggcttcaacgtggttgcggccgcacggcgcgagagcgaggagctcaagagcgcgattgccgaatccgaggggcgcctgcatttccgctcctgcgatctcgccgtgattgatgcaattccggctttcgcgaaactcgtgcgcgacgagttcggcccgatctacggcctcgtcaacaatgccggcctcggcaccgagggcctgcttgccaccatgcacaattccgagatcgaggcgctggtgcagctcaatgtgctgtctccgatcatcctcacaaaatatgttgcgcggcagatgatggcggatggtgcggggcgcatcatcaacatctcctcgatcatcgcgaccacaggctacaacggcttgtcggtctacggcgcgaccaaggccgccgccaccggcttcacccgctcgcttgcgcgcgaggtcggcaagctcggcatcaccgtgaacgcgatcgctccgggcttcatagacaccgaactcacccacaatctctccgacgagggccgcaagcgcatcgccggccgcagcgcgctgcgccgcttgccggaaacggacgacatcgctcggatggtggaatatctgctgggggaaggcggccgcaatgtcaccgggacggtgttcaccgtcgacgcggggaatacggcataagcggaacccgcccgtcgtgatcgtgttgatccggcacaatgatatctgtccggatctggtcgtaagatgccccgcaatcgattgggttacgtcaaccgatctgccctaatcgacagggagcagtccatgaccccgccaaacatgaccgcttcacaccggagtctgccggagcaatcccggacggagccggatgatgtccgctgtccgccgatgacgcatcagaattccggcagtcacggccatgaaatgtacccacagcaattcgtgcgcctggtcggctgtcgtgatgcgtcgctcgacagcctacgcaagcgtcaagaggacaagctgcactagccgctcacgttcgctgcttcggcgagtccttcggcaggtcaattcgctgctgtgagaattccggcggcccctcggtcaggcggcgaatgcggcgttcgcgttcgtcggccggcaatgcgggatcgagcagcgcctcgatctcgtgtactgcgatctcctcgatcctggtggcgctcgattccgtcgggtgtaccggcgggacgaccgggggcgtcatcttcaggcccagttcgatcagcttgcagatcgcatccgagcgggtcaggccatgagcttcggcccaggcatcgacggctgccgtcagtctttcgggcatcttcaccgcgctgactgggtcaatgcccgtgcgccggcggactggagagcctgagtccttgcggccaaagtcggacacctcgatcatcccatgcacccctttgagctgaatgacgatatccggtctccccagacggccgtttgacgccgatcaatgacccgccgcggaatcgcaagcgccggcatcttgttgtccgtgtccttttcggccaaatgatcgaaaaggctgccggccggcgaacccggatcggtcctgccgcgtattctgttccgacgcgcattccaaccacccggcattccgaatgatttcaggcgagtctttctatcgcggcattcccgtcttcagaggcttcaccagcctgatggatcccgcgctctactcgccgctgcccgacgactggagcatcggcgttgccgatatcgtcgattcgaccagggcgatcgcggcgcagcgctacaaggcggtgaacatggcaggcgctgcggtgatcgcggcggtgacgaacgcgttggcgggacgcgaatttcccttcgtattcgggggcgacggcgcaagctttgcggtttcgccggatgatgtcgaactggcccgcgaggcgctggctgcgactgcgacctgggtgcgggaagatctcgatctgaccatgcgcgtcgcactagtgccggtcagcgccattcgtgcgcaggccctggacgtgcgcgtcgcccggttcgggccttcggccaacctgtcctatgcgatgttctcgggcggcggcctcgcctgggccgaggccgcgatgaagcgcggcgagtttgcggtcgaggcggcgcccgcgggcacgcaacccgacctgtcgggcctgtcctgccgattcgaggtgattccggcctcccgcggattgatcctatcgctgctggtgatgccgacacggggtgccgatccgcgcgccttccgcaaggtaatcgaggacgtcatcgatctggtcgagctcagtccggatggcggccgcccggtgccgccgcaagggccgccgctgaaatggccgccgcagggggtggacttcgaggcccgcaccaagcgtggcggttcgctgctcgcacgcagggtcagcgtgctcgcctacacgctgttcgcctatctgatcatgcgcttcgacctcaaggccggcggcttcatgcctggcgtctacaagcgtcaggtggctgagaactcggacttcaggaaatatgatgacggcttgcgcatggtcatcgactgtacggtcgagcttgaacgtgccctcaccgatcgtctcgctgcggcggcgcgcgagggtatcgtgcgctacggcgtccaccggcaggatgcggccatgatgacctgcttcacaccctcgctgctgcggagcgatcacgtccatttcatcgacggcgcgcgtggcggctatgcctcggcggcgacggcgttgaaggcgatgatggcagcgagctagcgcccggcgcgcgtccagatctcgccgccgcagagcgcaccgacgcagcctggacaagggccctagaatggagcgcctcgatagcagcccggcaggatagtgcaacgctggcttggaatcacattcccgcgcctaccgccctatgatcatttgccccatcgcacgaaggcgacagacgccgcggtcgacagtccgaacacgaccatggcgccaccgaccagcgcgaacagagtccaggccggagcttgcgcggtcatcagtccgacgccgccgatcgcgaccatcaggagccgcaccgtggaggcgagcacggggccgccgactcgcgccgcaccctgtgacgagaagtacaacgacacgcccatgccgaagaacacgaaggccggtcctgcccaatggaaatagctgtgcgctgccgcggtgacgccgggatcccgcgtgaagagcccgacccacagcgacggagcgagcgcaacggcgaggccgatcaggccgatggtgagtccggaggccgccgccgcagtccaggccacccgccgcgcgcgcttcacgtctccggcgccgatcgccatgccgaccatcggcaccgaggctatgccgaaggcgaaggtgatcgggatgagcaagaattccagccgcgatccgatgccgtagcccgccagtgtttcggtgccgaaggtcgccaggatcttggtaaatatcaggatggtgagcacggtctggagcggcgacagacaggccaacgcgccgaccttaagaatgtccacgaacatcgcgcgctcgaaatggaaggcacgaagagccagcggcagccggctgcgtccggacaacagataccagaggaagaagatcgccgcgcagctgaacgcaatcaactggccgctcgcgacgcccggcatgccgaattgcggcactccgaacagcccgagcccgagcgtgccgccgagcgcgatttggagcacgctcgctccgatcagcgtcatcgaaggcaggcgcatgtccccggtgccacggatgaccgaggccagcgtgttgacgagccagatcgccaccgcgccggagaacagcacctgcgaatagctgctggcctcctccagcacctgctcgcgtccgccgaggagcgcgaagaaggagcggccgaagacgagcatcatcaccgtgaagaacagcccgccgcagaggccgatgatggcagcgtgcagcgccagcgtcgcagcgcggtcgcgattcccagcgcccagcgcgcggctgatggcggaggagacgccgccgcccatcgcgccagcgctcatcatctgcgtcagcatcgcgaacggaaacaccagcgcgatcgccgcgagcggaatggtgccgagccggccgatataggaggtctcggccaccgcaaccagcgtgctgccgaccatcgcgatcatgttgggaatcgcgagccgcagcagcgtcgggagaatcggtgcggtcagcaggctggcgatgggggagacgaccggcgcaaccggcgggacggcatctaggggggcatcgatcgtcatgttcaccgggcggaatattaaatgatggtcgacatattatagaacgtgggtcgacccgcgcagcccttgctcacgcagggctcaccagggcaggccgcataggtcgatggtgcccagcgtcggcgcgcggacgatgttgaagacgtagggcgccatctgggtaaagcggatccgcccttccggctgctcgcaatagacctcgccctcgaaggggagccagctgcgggcctcgtagaatgcgaaattgtgcggctcgcagaacagcagggcgaagcggaccgcttcgttggccctgatcgtgtgcacggccgcgtcgagtgcgatcgttgcataaccgcggccgcgtcggtcctcgcgcgtgcagaccccgccgatgccgccaatgtggaccttctgtccgttccaggtgacggttcggaagtagatgccgacatggcaaacgagaccgtcctcgggcgtctcgatcagaacgcgcagatcggcattggcccatttgacgtgcgcccagggcttgtccgcaatcacatgtggtccccacactgcctgatgcagcggctccgctatcggccacgaggcgtcaccgttcagaatgtcgatctcgatgctcatggctccgtctttcgcactggcgctgcgcagggcattcgttccgccataagcgcttcaaaggcaatggtattttgcatcggcccgccacgactgccgcagatgtccttgtcctgcgacgattttatgcaatcgtgccaagcgtcggcaccacgcgttttcgaaattctgaggtatttaacggctgcggaaccttctataaggggtgaccgttagaactcgttccccaccagttgcggacaagaacccatgacctttacgctgcccccactcccttacgcctatgacgccctcggtcagtacatgtcgaaggagacgctcgaatatcaccacgacaaacatcaccaggcctacgtcaccaacggcaacaacgcgctcaaggggaccgaatgggaaggcaagtcccttgaagagatcgtcaagggctcgttcggcaagaacccggccgtgttcaacaatgccggccagcactacaaccacattcacttctggagctggatgaagcccaatggcggcggcaccaagctgcccggcaagctcgagaagaagatcaacgaggacctcggcggcttcgagaagttcaaggcggacttccaggcggccggcatcggccagttcggctccggctggtgctggctccaggtcaagaacggcaagctcgagatctccaagaccccgaacggcgagaatccgctggtgcacggtgctaccccgattctcggctgcgacgtctgggagcactcctattacatcgattatcgcaaccgtcgccccgactatctcaaggcgttcgtcgagaacctcgtgaactgggaatacgtggagtccctgttcgagaaggcgtgacgatgtcattccgggccgcgcgaagcgtgagcccggagttcattcgaatgctagggctcgcgcccgatgggttccgggtcggcgtcggcgcgccgcccgagactgacaaaaggcggtcgctggcgcggccgcctttttgctgtgcggaattgccctgcgtggtacgcgcatgggtctgtcatcacgccgtttgcatcgcctcggcggcgcccttaatcagaaaaggattcaccctcgagccgccccacacccattgtcagaaccttccccgaacacgccggcgcctgccgaggactccgagccgcgtccggggcgtgtgcgtaagccgatcggctggtcgactatcatcatcgcggtcctggtggcggtgagcgcaggccttgtctggcgtcgcgacggcaccgatggcgttctcgacattctgacccacgacctctcgctcttctccggcatcctgccgcgcgtgctggccggctgcctgctcggcgctttcatctcggagatcctgccgcacgagaaagtctcgcgctcgctcgggccgaagtccggcttgatgggtcttttgattggtaccgcgttcggcgcgatcctgcccggtggtccctttaccgcctaccccgtggcgagcgcgctgctcgcggtcggtgccgatttcggtgccaccatcgccatggtcgtgagctggaccctgatcggctacggccgggcggtggcctgggagatcccgatcatgggcaccgatttcaccttgtggcggatcgtgatctcgctgccgctgccggtgctcgcaggcgctctcggccgcttcgtctacgtgaggatgtatccgaagcccgccatcaaggacgacgagacttgagcgcagcgcttctgatcgacatcctgttgtggggctcggtgctaggcgtcggcctgatcgcattccgccgcggccctcccgtattcaaagcctcgcttcgagaaggcgcgatggacttcatcaacatcgtgccgcggatcgcgctcggtgtgatcggctccggctacatcgccgccatcataccgcaggaggtgatcacaggttggctcggaccggacagcggttggctcggggtagcgaccgccgtggtcgctggcgccgcgacgcccggcggtcctgtggttggcttctccatcggcacggtggcgctgaagtccggtggcggcgtgcctcaggtggtcgcctatgtcgtcgcctgggccctgttcgccttccagcgggtgatcttgtgggagatcccgttcatgccggcccgtttcgtctggttccgctgcgccgtatcggtgccgtttccattcgtggccgcggcggtcgcgatggtgatcggcaagccgtgagccgggcgtggacaggggtaatgttataatataacgtcacatcatggttcctgctgcgtcccgcgccgatcatcatgaccatgcccacagccaccctcatggctacaggcattcgcacgaccacgcccatagccatgatgaggcctcaccgcatccggcccaagcggcgccctggtcgatcctgcgcatgaccatggcgggtcgccttgcggccgcagtcggcgtctgtgccgttctctggggcatcgtcttgctggcgatgaggtgaccatggcggccctgcacttccacaacgtcacgctcggctacgaccggcatccggccgtgcaccatctcaacggcgagattgcacaaggtgcgctggtcgcggtgatcggtcccaacggcgccggcaagtcgacgctgttgcgcggcatcgtcggcatcctcaagccgctcgacgggagcatccatctcggcggtctcgaccgcagggacatcgcctacctgccccagagcgccgagatcgaccgcagcttcccgatctcggtgttcgatttcgtcggcaccgggttgtggcgcgccacctccctgttcggtggcgtcggcaaggctgcccgcgaaaagatcctccgcgcgctcgcgtccgtcggactcaatggattcgagaaccgaccgatcggcacgctctcgggtggccagatgcagcgcgtgctgttcgcgcgcgtgctgctccaggacgctcgtctgatcgtgctcgacgagcccttcaatgccatcgacagcaagaccacggccgacctgctcgcgctggtgcagcgctggcacggcgaaggccggactgtgctcgctgcgctgcacgacatggagatggtgcgcaaccacttcgccgagactctggtgctggcccgcggccctgtggcgtggggtccgacggcggaggtgctgacgccggaaaatctgctggttgcgatgcggatgtgcgaggcgttcgatgacagcgccgcggcctgcgcagccgatgatatcagctcgcgggcggcttgatatccgatgatctatgacgtgctgatcggcccgttcaccgaattcgagttcatgcggcgggcgctcgccgccgtgatcgcgctagcgctcgcgggcgcgccgatcggcatgttcctgatgttgcggcggatgagcctcgtcggcgatgccatggcgcatgcaatcctcccgggcgcggcggtcggcttcctgctctcgggcctcaatctgttcgcgatgacggcgggcggcctgatcgccggctttgcggtcgcgatcctcgcgggcgtggtggcacgctcgacgggactgaaggaggacgcttcgctcgccacgttctatctcgcctcgctcgcgctcggcgtcaccatcgtctcgatcaagggtaccaatatcgatctgctgcatgtgctgttcggcaacattctggcgatggacgaccagacgctgttggtggtggccatcaacgccacgatcacgctgctggtgctcgcggtgatctaccggccactcgtgatcgagagcgtcgatccgctgttcctgcgcacggtcagccgcgcggggggacctgcgcacctcgcgtttctcgcgctcgtcttcatcaacctggtcaacggctttcaagcgctcggcacgctgctcgccgtcggcctcatgatcctgccggccgggatcgcccggttctggtcgcgcgatctcaccgccatgatatgcattgccgtgattgctgctgccgtctcgggctatgccggcctcgtgctgtcgttccagacccgcgtgccctcaggccctgcgatcattctcgtggcgacggtgatctacgtggtctccgtgctgttcggccgcgtcggcggcatcgtccggcaactgtttcccggccggcatctggaagcgtgacgatgcgattcatcctgctttgtacgctgttgctgatcgcctcgccgctgcaggccgcggagcggctcaacgtcgtcgcgagcttctcgattctggccgatttcgtccgcaacgtcggcggcgaccgcatcaatctgacgacactggttggcgccgacggcgacgtccatgtctatacgccgacgcccagcgatgcgaaacggatcgcggacgccaagctcgtcatcgtcaacgggcttggcctcgagggctggttgccgcgccttgtgcagtccgccggcagcaaggcgaaagtcgtgaccgcgagcgcgggcatcacaccgctgaaactgggtgcggccgccgatccccacgcctggcagtccattcccaacgccaagatctacgtcaccgatatcgccaatgcgctcgccgcggccgctccggatgacgccgagttcttccgtgcccaggcgagcgcctatctggaaaagcttgaaacgctggaccgcgaggtccggcaggccgtggtgaaaatcccgcccgagcggcgcaaggtgatctctacccacgacgccttcggctatttctccagcgaatacggtatccggttcatcgcccccctgggtgtctccacggaaaccgagcccagcgcgcgcgacatcgccgccatcatcagccagatcaaggccgcgaggatcccggcggtattcctggaaaatatcagcgatgatcggctgatccggcggatcgcggccgagacaggcgccaaggtcggcggcaccctgatttcggacggtttgaccggcgaaaaggggcttgcacccacttacattgacatggtcaggcacaatataaaggccctgaccagcgcgcttgaccactagggcaggggccaccccgcctcgcgtcgcgcgacaagccgaagtccggagttgttatgtctgaagcgacctcccagaagattcccgtgaccgtgctgaccggctatctcggtgccggcaagaccacgctcctgaaccgcatcctgtccgaaaaccacggcaagaaatacgccgtcatcgtcaacgaattcggtgagatcggcatcgacaacgatctcatcatcggtgccgatgaggaagtgttcgagatgaacaatggctgcatctgctgcaccgtgcgcggcgacctcgtgcgcatcatggatggcttgatgaagcgcaagggcaagttcgacgccatcatcgtcgagaccaccggccttgccgatccggcgccggtcgcgcagaccttcttcgtcgacgaggacgtgcagaagaatgcgcggttggatgcggtcgtcacggttgccgacgccaagtggctgtccgaccggctcaaggatgcgcccgaggccaagaaccagatcgccttcgccgatgtcatcgtcctgaacaagaccgacctcgtcacaaagggcgagctcgccgaggtcgaggctcgcatccgcggcatcaatccctacgcgaagctgcaccgcaccgagcgctgctcggtggcgctgtccgatgtgctcgatcgcggcgcgttcgacctcgaccgcatcctcgacatcgagccggacttcttggaagctgacgaccacgaccatgaccaccatcacggccacgcccatgaccatcaccatgatcacggccatggcctgaagcactatcacgacgaggagatgcaatcgctctcgctcaagaccgacaagccgctcgatccgaacgtgttcatgccctggctgcagaacctggtgcaggtcgagggcggcaagatcctgcgctcgaagggcatcctcgccttccaggacgacgacgaccgctacgttttccagggcgtccacatgatgctggagggtaaccatcagcggaagtggaaggagggcgagccacgcgagagccgcctcgtcttcattggccgcgaattgccggaagaggcgatccgcaagggtttcgagagctgcatcgtctcgtgatgaaagagttcgcgccggccccggattcagcctcgatcgtctccgtcaccgatcgcgtcaagcctattgggctcggcatggccgtgacctcggtgcatttcctcggcggccgtgccgccttcgtcggtggcgaggagaatgtcgcgttcgtcgatagcaagggcgagaccactacggttgccgtgcacagcggcggcattctttcgaccgcctcagacggcaagcgcctcgtgatgggcggcgatgacggcaaggtcgtctcgctcgacgccaagggcgaggcgacgctgctcgccaccgatccgaagcggcgctggatcgacgcggtggcgctgcacgccgacggcaccttcgcctggtcggccggcaagacggccacggtcaagagcggcaaggccgaggagaagtcgatcgaagtgccatccaccgtcggcggtctcgcattcgccccgaagggcctgcggctcgcaatcgcgcactacaacggcgtgacgctgtggtttccgaacatggcgggatcggccgaattcctgccctgggccggttcgcatcacgcggtcacgttcagtccggacaacaagtttctcgtcaccgcgatgcacgagccggcgctgcatggctggcggctcgccgacaacaggcacatgcgcatgacaggctaccccggtcgcgtccgctcgatgtcgtggagcgctggcggcaaggggctcgcgacgtcaggcgccgacaccgtgatcgtatggccgttcggcagcaaggacggccccatgggcaaggagcccgcgatgctcgcgccgctgcaagcacgcgtgtcggtggtcgcctgccatcccaagaacgatattctggccgccggctacagcgacggcaccgtgctgatgctgcggctggaggacggcgcggaaatcctcgtccgccgtaacggcacgccgcccgtcgccgcgctcggctggaacgccaagggcacgctgctggcctttgcggacgaaaatggggatggcggcctgctggagctttaatttgtcatggttcccgccttatagggggccatgcgatttctgacgacattccagcttgccgacttcgcggatacgctggccagcctgaccacggccttcgtgctgggcacgctgatcggcgccgagcggcaataccgtcagcgcacggcgggcctgcgcaccaacgtgctggtcgcggtcggcgccgccgccttcgtcgatctcgcgatgaatttggcgggcgccgacggcgcggtgcgcgtgatcgcctacgtggtgtctggcataggcttcctcggggccggcgtcatcatgaagcagggcatggacgtgcgcggtctcaacaccgcggcaacgctgtgggcgtccgccgcggttggctcctgcgccggcgccgacatgatcgcgcaggcgtccgcgctgaccgtgttcgtgatcgccggcaacaccatgctgcgtccgctggtcaatgcaatcaaccgtattcccctgaacgagaaggcgctggaggcaacctactatttcaagcttgccgttgcggccgatgctcttccggatatgcgcgaccggctcgtcgagaagctcgagaccgcgaaatattcggtggccgatatcgatgtggccgaaatcggcgatgacgttctggagatcgccgcaaaactggtcgcgaccgcagtcgaccccaacgagctgaacgcggtggcgactgacctccagcatttgccgggcgtacgacacgccacctgggaggtcagtaccaccgactgagcgcggcgttttggcgcgcagagggctgggttcccggttcttcaatgccggaaccggcaggtcgcggtttcgttgtcctgcggacaaaggcggtgatcgacatggccattcaaggcgacaagcgcagactgaagctcgacctgacaattgctggttcgctgctcgcagcgggcatcgtggtcgccgtgatgtcgctcgcgcaaatccgcgccgaaaaccggatggagctggcgcaggcaacgccgccgcttcagggcacgccttccgaggatcagaacaagcccgcggaagccaagccgggcggcgatcggccgaccacgccggcgcccgagcccgcacgtccggatccgcagacgcagggcgcggcgaccaagccggcattgccgccggctcccgcggagaagatcgcgccgccgctcgagaagaagtaggcttctacggtcattcggggtgcgcgaagtgcgagctcggaatccatttccgcgcattttgtctcccgatggattccgggctcgcgccaagcggcgcgccccggaatgacaagcggagacagacaggcgttcaccgcaccagaatgttcttgaactgccagggatcgctggtgtcgatgtcttccggaaacagacctgggcggtccgtcaacggcgtccaatcggtgtagaagcccttcaccgggccgagatagggcatctgaatttcgagcagacgatcgaaatccatctcgtcggcttcgacgatgccttcgttcgggttctccagcgcccacaccatgccgccgagcacggccgaggtcacctgcaggccggtcgcgttctggtagggcgcgagcctgcgcgtctcctcgatggaaagctgcgagccataccaataggcgttcttgtcatggccaaacagcagcacgccgagctcgtctatgccgtcgacgatctcgttctcgtcgaggatgtggtgcttctcctgcatcttcccggcgcggccgaacatctcgtgcagcgacagcacggcatcgtcggccggatgataggcgtagtggcaggttggccggtatatcgcctgcctgaggcgtcgcgcacggggaagtagtcggagatcgagatcgattcgttatgggtgacgaggaagccgtactgcgcgccacgggtcggacaccacgtgcgcacgcgcgtgttggcgccgggctgcatcagatagatggcggcgccgcagccggcctcatgggttcgcgcattgtcgggcatccatttctcatgagtgccccagcctagctcggacggctgcacgccttcggagaggaagccttctaccgaccaggtgttgacgaagacatcgggctccttcggcttcttcgagcgctgggtgtcgcgttcggcgatgtggatgcccttgatgccggcctgccgcatcaaatccgcccactcagccttggtcttcggcttgggggcgttgagcttcaaatccgcggcaacgttgagcagcgcctgcttcacgaagaacgagaccatgccgggattggcgccgcagcaggaaacggccgtcgtcgagccggcggggcgcgcccgcttggcagccagcgtcacttcgcgcagggcgtaattggagcgcgcttccggccccttcgaggcatcgaaatagaagccgagccagggctcgttgacggtgtcgatatagagggcgccgagctcgttgcagagctccatgatgtcggtcgacccggtatcgaccgagagattgacgcaaaagccctggccgccgccctccgtgagcagcggggtcagcacctcgcgataattgtccttggtcaggcccttctggatgaatcggacattgtgcttctcgcaaagcgccttccggccctcgtccttcggatcgagcacggtgatgcgcgacttgtcgtagtcgagatgccgctcgatcagcggcaaggtgcctttgccgatggagccgaagccgaccatgacgatgggaccggtgatcttcgcgtagacctgcgaggcggggctcatgggatggttctccgaaacgtgctggcagacaaagggtgggggacggatcaggcgcggcggcgcttctcagatgctgcggcgtttggcggtgacttcgatctcgaccttcatctcgggcttggcgagggcgctgacgacaagcaacgtcgctgccggcctgatgtcgccgagtacctcgccgcagacggcgaagtggacatcgatgtagctggtgtcggtgacatagtaggtcgcacggacaatgtcggccatttcgaagccgccctccttcagggcagcttcgatggtcttgaagcagttgcgtgactggctcgtgacgtcggccggcatcgtcatcgtcgtgtagtcatagcccgtggttcccgcgacgaaggcgaactcgccgtcgatcacggcgcggctgtagccggcggtcttctcgaacggggagccggtggaaatcaggcgacgggacatgctctcggacctcgaccagggggatgtttcgcggggttaaagggcgtttcaggcgcctgcgcaaccccaaaggaactggcttggcgcaggcgcggtcgggcgttgccgctcaacgcggcctggggcttcgcgatgcaagggatcccttaagccgcgcgcgcctcaggtgcgcgaaccgccctccgtttgggcagggcagcgccggtcgggacgatcatcccgacgcagccatcgagtgcgccctcggcgaactcgattgccagcaggcggtctcgctcgaacgggccgggcagcgacagcgcaccggttttctccgtcgagaagccgaaccgggcgtaatagggggcatcgccaagcaggatcacggcggcgtgcccgcgcgctcgggcggcagccagcgcctgatgcatcagcgcggcgccgatcccgagctcgcggcaggcagggtccaccgccagcggtccgaggaccagggcaggcctgcctccggcgctgacgtgccacagccgcacggttcccacgagcttgccctcgcgcaccgccgacagggcaaggcctgcagcgggtgcacgtccgtcgcgcaggcgctggcaggtgcggccatggcggttctcgccaaagcaggcatcgagcaacgcttcacgcatcgcgacgtcggcagcacgttccgcacggatcacgaacggagcggccttcgaggtgagggcgatctgtggcttccgaggagcagtcatggcgcgtcagtccccacttgaaccgacgtgcgcaaagcacgccggttcaaggcgtcgtcagaaatcgaaatgtgagggaggagccggcaagccggctccgggttcgtcaggcctcagaccgagaggcggatctgatgtggcagatcagatgtgataggtcttcagcggcgggatgccgttgaacgccaccgacgagtaggtcgacgtatacgccccggtgccttcgatcagaaccttgtcgccgatctccagcgtgaccgggagcggatacgggttcttctcgtacagcacgtcggcgctgtcgcaggtcggacctgcgagcacgcacggcgtcatgtccgcaccgtcgtgacgggtgcggatggcgtagcggatcgactcgtccatcgtctcggcgagaccgccgaacttgccgatgtccaggtagacccagcgcacctcgtcctcgtcgctcttcttcgagatgagcacgacctcggattcgatgacgccggcgttgcccaccatgccgcggcccggctcgatgatggtctccggaatctggttgccgaagtgcttgcgcagcgcgcggaagatcgagcggccgtaggtcaccaccggcggcacgtccttcaggtacttggtcgggaagccgccgcccatgttgaccatggacaggttgatgccgcgctcggcgcagtcgcggaacacctgcgaagccatcgccagcgcacggtcccacgccttcaccttgcgctgctgcgagccgacatggaaggagatgccgcacggctccagacccaggcgtttggcgaggtcgagcacctcgactgccatctccgggtcgcagccgaacttccgcgacagcggccactcggcgccggcgcagtcatagaggatgcggcagaacaccttcgcgccgggcgcggcgcgggcgaccttctcgacctcggcggcgcaatcgaccgcgaacagccggatgccgagcgtgaaggcgcgcgcgatgtcgcgctccttcttgatcgtgttgccgaaggagatgcggtcgggcgtcgcacccgcggccagcgccatctcgatctcggcgaccgtcgcggtgtcgaagcaggagcccatggaggcgagcagcgacagcacttccggcgccgggttcgccttgacggcatagaacacgcggctgtcgggcagcgccttggcgaagctttggtagttgtcgcgcacgacctcgagatcgacgacgaggcacggctcggtgtcgaggccatccttgcggcggttgcgcaggaattcctggatacgttcggtcatggcactctcccaaacggcccagcgacgggcccgttcaaaacatgacgtcggataagagcgctctggccgatcgcgcgatggaggcgcgacgaagccacaagactcaaatcagactgtgctgccgtggattggttgggagtgttcccgcccgcacacctggcaatgaaggacaagccttttcagtagcccgcgccggcgttggactgccggtagagaccaaaaaagcccgatccgtcgttgctttaagtcgcgtcccccgttgagagcggggtgcgccggttcgcctccggctgccagtcacggttgcaaagagcgaagtcaccttcgacatggcatccctttgagagagatgctgggcgctccgggtttgcctcggtctttcgacttccgcgcttccgaagagcccctcggcttcttcaccccttggcggctgtccggcctcttgtccggatacctaccgactgacacacgaccacaggcacgtgcgaaattgggcaagtccgcacataagtgttttgactctgcttcgcaagattttttttaggctgcgagcagaattgcctaacatctgcttgcgcgctgttgcgcgagcgacgcagaagatgaacgagcgttaagttttcaacgcagcgcgtatatctcgcgcgcgcgtggaagcgtcagcggcgcttggtgaagggctcgatgcgctgagcggcgcggacgaacgccgtcatcaccagcacgcccagtgcgaacagcacggcctggaggatgtgcgcgccctgatcgccgagtccgaacaggatcgccagcgcccaacctccggcgaaggccgcgccgaacacctccgcgccgatcaggatggcggcgctgatgacggtgatgacgctcggccaggcgatctggcgggaagaggaggcaggcgcgttcatgagctgaggtccgtggcttcgagggccgcaatctccccgaaaaggcggctcggagcaagggcaaacggcccaaaaaagccccatcgcgtgctatagctggccgcaacaatcgcccatgaaaatcggacttgtgatgtcagaatcccgccaaattacggatgccgagaccaatccgctgctgaaggcctgggtgacgccgttcgcggccccgcccttcgacgagatcaagccggagcacttcctgcccgcttttgagcaggccttcgccgaccacgccgccgagatcgcggcgatcaccaacgatccggccgcgcccgacttcgccaacaccatcacggcgctggagcgctcgggcaagctcctgagcaaggtcgcggcggtcttctacgatctggtctctgcgcattccaacccggccatcctggagatcgacaaggaggtctccttgcggatggcgcgacactggaatccgatcatgatgaacgccgtgctgttcggccgcatcgcccagctgcacgaaaaccgtgccaaccttggactcacccccgagcagctgcgcctcttggaacgcacctacacccgcttccatcgcgccggcgccggcctttccgaagaggccaagacccggatggccgagatcaacgagaggctcgcgcagctcggcaccagcttcagccaccatctgctcggcgacgagcaggactggatcatggagctcggcgagggcgatcggcagggcctgccggagaatttcgtcgcggccgccaaggctgcggcagaagagcgcggcctggcaggcaaggcgatcgtcacgctctcgcgctcctcggtcgagcagttcctgaagagctcggcccggcgcgacctgcgcgagaaggtctacaaggccttcatcgcgcggggcgacaacggcaacgccaacgacaacaatgaaaccattgtcgagatcctgaagctgcgcgaggagagcgcaaagctcctaggctacccgactttcgccgcctaccggctcgaggattccatggccaagacgccggaggcggtgcggggcctgttggagcgggtctggaagccggcccgcgcccgggcgctcgccgatcgcgacgagatgcaggccctgatcacggaagagggcggcaatttcaagctcgcgccgtgggactggcgcttctatgccgagaagctgcgccttcaacgcgccaatttcgacgacgccgcgatcaaaccgtatcttgcgctcgacaacatgatcgccgccgccttcgactgcgccacccgcctgttcggcgtcacgttcgaggagcgcaaggacgttcctgtctggcacccggacgtccgtgtctgggagatgaaggggccggacggcaagcacaaggcactgttctacggcgactacttcgcccggccgtcgaagcgttccggcgcctggatgacctcgttgcgcgaccagcagaagctcgacggcgacgtcgcgccgctcgttctcaacatctgcaattttgccaagggagccggcggcgagccttcgctgctgtcgcctgacgatgcccgcaccctgttccacgagttcggtcacggcctgcacggcatgctctccaacgtgacctatccctcgctgtcgggcacctccgtgtttacggatttcgtcgagctgccgtcccagctctacgagcactggcaggagcggcccgaggtgctgcagaagttcgcccgccactaccagaccggcgagccgttgccggacgagctgctgcaacgcttccttgccgcgcgcaaattcaaccagggctttgccacggtcgaattcgtctcctcggcgctgatcgatctcgaattccacacccagccggctgccgccgcgcaggatgtgcgcgccttcgagagacgcgagctggagaagatcggcatgcccgaggagatcgcgctgcgtcatcgtcccacgcaattcggccacatcttcaccggagaccattatgccgccggctattacagctacatgtggtcggaagtgatggacgcggacgccttcggcgctttcgaggaggcgggggacatcttcgatcccaaggtcgcaagacgcctgcacgatgacatctattcgagcggcggatcggtcgatccggaagccgcctacgaggccttccgcggccgaccacccgagcccgatgcgctgctccgccgtcgcggcctgctcgacgacgcaaaggcggcctgatgaatatgcgcgccctgttcggatgcctgcttgctgccgcgatgacgctggcagcgggtgccgcgaatgcgcatccgcatgtctggatcaccgcgaccagcgagctgctctacgcggcggatggctcgatcaccggcgtgcgtcacgcctggaccttcgacgacatgttctcggcctatgcggtgcaggggctcgagagcaagaccaaggggacctatacgcgggaggagctcggcccgctggcgcaaaccaacgtcgagtcgctcaaggaatacgcctacttcaccttcgcgcgagccgacggcaagaaggaacgattccaggagccagtcgactatttcctcgactacaaggatacggtgctgaccctgcacttcacgctgccgctgaaggccccggtcaagcccaagcagctggtgctcgaagtgttcgaccgctccttcttcatcgacttcaagatggccaaggacaatccggtcaagctggtgggcgcgccctctggctgccagatgaagctggatcggccgaacgacggcaccgccagcgcgcagcagctgaacgagcagacctttctcaacggcgagaactcgaatttcggcatgatgttcgccaacaagatcacggtggattgcccttgaagccgcaactctccccgctcgcgcgcgggctgctcgcctgcgccgccgttctgctcgtcgttggcgtggccgatgccgcgctccatcatctgctcgcgcagacgccgttcggcgcgccgcggccggcgcaggcggccgattcggaggccggcggcctgatcggctggctgctggcgaaacagtcggaattctatcgccagatgtcggcgaccatccgggccgcgaagtccgacggctcggcggtgtggacgctgctcttcatctcgttcgcctatggaatcttccatgccgccggtcctggccacggcaaggcggtcatcgcctcctatctcgtcgccaaccgcgagaccgcgcggcgtggcatcgcgttgtcgttcgcctcggcgctgatgcagtcgctggtcgcgatcctggtcgtcggcatctcggcctgggtgctgaatgccacggccaagaccatgtgcaaggcggaggcggtgatcgagatcgcgagctacgccctgattgcggcattcggtctgagactggtgtgggtcaagggcggcgccttcatccgcgcgctccaggtcgcccaaccggtgccggcgattgcgggcgtgccgcacgatcatgatcacggtcatcaccatcatcatgatgcgcatgaccatgacggccatgatcatcatcgccacgatcagggccatgcacacgcccatcatcaccacgctcatcatcatgggaacgatcacgtccacgacgagcattgcggccactcccacggccccacccccagcgagctcgccggtccgggcggctggcggcgcggcttcgctgcgatcctgaccgtcggtatccgcccttgttcgggtgcgatcctggtcctggtattcgcgctggcgcagggcctgttctgggccggcatcgccgcgaccttcctgatgggtttgggtaccgcgatcacggtcgcggcgatcgctgtcgtcgccgtttccgccaaggacatcgccgcccgcctcagcgcggggcgcgacggcggcggcgcgctgttcatgcgaggcatcgagttcgccgccgcaggcttcgtgctgctgttcggcgtcggtctcttgttcggctacatcgccgccgaacggaccacgtgcttctaggctcgttctgacccttcctccacgggctaagagctaccccgtcgcggcgtgatagccgctttgcgaacctccctccggccgctattgagacaagaaggttcctatcggggggtctccatgtcgcgcgaggatttctggttctttcatccgtttcgggtgcgttattccgagatcgacggccagggcgtcgttttcaacgcccattacctgacctatttcgacaccgccatcaccgggtactttcgcgcgctcggctttgaccagtatgcggacgcgcaggcgagcggcatcgatttccacgtcgtcaagtccgtcatcgaatacaaggcgccggtccgcttcgactgggagctcgatgtcggcgtgcgcgtagcgcggatcggcaattccagcctcgtgttcgagctcgccatcttcctgaagggcggcgcggacgcgctggtgaccggcgagatcgtctgggtctacactgaccagaagacccatcgtccggtcacgatcccggcatcgatgcggtcgctgatcgcgacgcgggagcgtcatctgacggcgtgaggccggcgcctcacaccggcaggaaccgcttcaaagccggcaggaagaagatgccgagattgatcgcgaagccgacgctccagaggatcgagcgcagcgtcgggcgattgccgagataggtcagcacatacgcgatccgcacgatcaggaacagcgccgcgagctcgtcgatcagccgctgcggcgcatctctgaactcggcgagcagcaccgcgaaggcgaagaacgggaaagcctcgatgccgttctggtgagcgccgagcgcgcgctgcgcgatggcatcctcatagaaggctgggtcgcgcggccgggaattatcgaagcggccgaacctgatccatttgatcgaggcgatcgttacgagataaagcagcagcgctccgaatacgcaccattctgcgagcgtcatcgttcctccccccgccggggtgcgaccctagcgaaccccggctcatcttgacaagttcggaccaacgcgcgacccaaccagccatgaacagcgtcgccccccccgagactgcgaagccggtcacccgatccgccctgccgcgcgtcggcgtactcctggtcaatctcggaacgcctgacacggccgatgcgccaggcgtgcgggtctacctcaaggagttcctcagtgacgcccgcgtcatcgaggatcagggcctgatctggaaggtggtgctgaatggaatcatcctgcgcagccgtccccgtaccaaggcgctggattaccagaagatctggaacaacgagcagaacgagtcgccgctgaagaccatcacgcggtctcaagccgttaagctcgccgccgccttggcggaccgcgaccatgtcgtggtggattgggcgatgcgttacggcaatccctcgatcaaggccggcatcgacgcgctgatcgcaaagggctgcgaacgcattctggctgtcccgctctatccgcaatattccgcttcgacctcggcgaccgtctgcgacgaggtgttccgcgtgctcgcgcagcttcgcaatcagccgacgctgcgggtgacgccgccctattatgaggattccgcctatatcgaggccctcgcgacctcgatcgaggcgcatctagcgacgctctcgttcaagccggagctgatcgtcgcgtcgttccatggcatgccgaaagcctatgtcgacaagggcgatccctatcggcagcactgcatcgcaacgacggaagcattgcgccgccggctcggcatggacgaaacgaagctgctgctgaccttccagtcccgtttcggcaacgacgagtggctccagccctacaccgacaagacgatggagcggctcgccaaggaaggcgtgcgccgcatcgcggtggtgacgccgggcttttccgccgactgcctggagacgctggaggagatcgcgcaggaaaacgccgagatattcaagcacaatggcggcgagcagttttccgccatcccctgtctcaacgacagcgatccgggcatggacgtgatccggaccctggtgctgcgcgagcttcagggctggatctgatgtttcacccatgaaccgccgctcgtgtctggcgtttctcgggatgatcgcggcgctccccgcctcggcgccggcccagcagcggaacgtggtgcggcggctcggtgtgctctcggtcaccgccgccgaggacgcgatcggacaggcacgcagcacgatcctggccgaggcgcttgccggctacggttggaaggagcgcgacaacctcaggatcgagtggcgcagcggcggtgccgatcgcgcgcgcatcgcgcagcttgcggacgagttgatcgcgctcaagcctgacatcctgctcgcggtcggcacgccctcggtggaagagctgcgccggcgcaccaccacgatcccgatcgtgttcgccgtcgtcaccgatcccgtcagccagggttttgtcgaaaacctcgcgcatcccggtggcaacatcaccggtttcaccgattatgacggcccgctagccggcaaatggctggagatgctgacgcaggtcacgccatccgtccgccgcgtgttcgtcgtctacaatcccgccaccgcgccgttcgcgcccttgatgctgcgcacgatcgagggcgccgcacggactcttcacgtgatggtcgagcccgcgcccgtccatgacgccgcctcgatcggagcgctggcttcgcggaaggacggtgccatcctggtcctgccggacttcttcacattggccaaccgcgtgcagctgctcgcgacgatcgcacaggcgcgggtgcccgcagtcttctggagccgcacctttgtcgatgagggagggctgatgtcctacagcaccgacactgccgaacagctgcggcaggccgcctcctatgtcgatcgcatcctcaggggagcgcaggcggccgatcttccggtccagaaccccaccaagcttgagctggtgatcaacctcaagacggcgagggcgttcggcgttacgcttgcccccgccctcgtcgcgctcgcgaacgacgtcatcgaatgaagctgctgataccgagctgcacggtgttatctgccggtagcctgcgccgcatccgctgttcgcggctcttgcagaatcgcaccgataccggcgttacttgcggctgctgaaccggtagggtcgcgctcccgaccaatgacagcgcgggaagggcttttcccggcttcttttcctgccttggaggacgtatgagcggtttcgacatcttcgcaattgttctggtcttgctcgtcatcgtcaccctcgtcgccggcgtgaagacggtgccgcagggctacgactggaccatcgagcggttcggtaaatacacccagacgctgagccccgggctcaatctgatcgtgccctatttcgatcgcgtcggacgcaaggtcaacatgatggagcaggtgatcgacattcccgagcaggaggtcatcaccaaggacaacgccaccgtgacggtggacggagtcgccttctaccaggtgttcgatgccgcgaaagcgagctacgaggtcgccaacctcacccaggcgatcacggtcctcaccatgaccaacatccgttcggtgatgggttcgatggacctcgatcaggtgctctcgcaccgcgatgagatcaacgaacgcctgttgcgcgtcgtcgatgccgcggtctcgccctggggcgtcaaggtcaaccgcatcgagatcaaggacatcgtgccgcccgccgatctcgtcgaggccatgggccggcagatgaaagccgagcgcgtcaagcgcgccgacattttggccgccgaaggccagcgccagtcggagatcctgcgcgccgaaggcgccaagcaggggcagatcctccaggccgaaggccgccgcgaggccgccttccgcgacgcggaggcgcgcgagcggtcggcggaagcggaggccaaagcgacgcagatggtcagcgaggccatcgccaagggcgacgtcgccgccttgaactatttcatcgccgacaagtatatcaaggcgttcggccagttcgcggaggcgccgaaccagaagatcatcatgttgccgatggaagccaccagcatgctcggctcgctcgccggcatcggcgagatcgccaaggcgacgttcggcgaggctgccgcagctgctgccgcgcgccgccccggatcggtgccgccgaccggcagcacgccgccggcggtgccgccgcggcagggctagtgagagaggtcgcgtcatgaccgacatgttcgtatcgctgggcaactggaattggctgatactcggcttcatcctgatggcgctggaggtattggccccgggcattttcctgttctggcttggcttggctgcgctgctcgtcggtctgatctcgttcgcgcttgccgtgtcctggcagatccagctcgtgatgttcgcggtattcgccgctgccgcggtgccggtgtggcgccgcctcgcccggccgaagccggacgcgaatgccagcccgttcctcaacaagcgcaccgaagccttgctcggtcgcgagttcacgctggagaagccgatcatcgacggttccggcacggtgcgtatcgacgacaccgtgtggcgcgtggccggcccggatacgccggcggggacgcgcgtcagggtcgtgcaggtcgatggtgccaacctcaccgtcgccgtgacgtagcgctcgtatcctccaggcgccggcaagcgcggtcctacttcctccacctctccgcaaaccggtgcagcggtacgaacgtctcgcacaattcctgtccgagcggggtcaatccgtagccaccaccgtcgccaagctcgacgaaacccgcctcgcgcagctccgtcagccgcgcctgcagcaccgtcggcgaagcctcgtcacaggctgcgcggagtgctcgagaggtgaggggctcgtcccgtagctcccacaatatccgtagactccagcgccggccgagcagatcgagcaatgccatgatcggccgcccggtgcgcgagccgcgcacgctgcgtgtcttggagtcagcctctttcgccatcgccgcctcttgcgtcatgctacaaataatgtagcgtcatgctactataagtgtagcaaaggagccgacccatgtccccattcgcgccgcgtatcgccccgctcgcgccgccttatcccctggagatccaggcgcagttcgagcgcatcatgcacggcgcaccgccgctgatgctgttccgcgtgatggccggccacggccgcgcctgggacaagttccgtgccggtggcctgctcgatcccggcccgctctccttgcgccagcgcgagatcgtcatcgaccgcacctgtgcgctgaaccgatgcgaatacgagtggggcgtgcacgtcgcgatcttcgccggaccggcaaagctcaatgaggaggaggtgcgcgcgacggtgctgggagatgcgatgtcgccgtgctggtcaccgtccgagcaggcgctggttgcggccgtggacgcgctgcatcgccgcgcgacgcttgacgacgaggagttcgccgcgctctcggctcattacgacgaggcgcagattctggagatcatgctcctgtgcggcttttatcgcacggtgtcgtacctggcgaacggcctgagattgccgctggaggagaaggcggcgcggtttccgacaccgctctaacggagaagagaggcgtgctacacactctctgtcattccggggcacgcgaagcgtgaacccggaatccattgggtagcgacctcggagatgaatggattccggcttcgcgcccaagcggccgcgccccggaatgactccgtggagagagcgggccctacgccacgcccgcgcgcagcaggtcgtgcagatgcacgatcccgaccaccttgcccgcctccgtcaccagcagggtcgtgatcttgcgggtgttcagcacctcgatcatttcggtcgcgagcatcgacgggggcaccgtcttcggctgcctggtcatgatctcgtcgaccgttgcggtcagaagatcaggccgcatgtggcggcgcaggtcgccgtcggtgatgatgccgaccgcctcgccggcatcgttgatgatacagacgcagccgagccccttggccgacatctccaccacggcttcggacatcttggtgccttcgggcttgatcggaatctcagtgccggtacgcatgtagtcgcggacgaatttcagcatggcccccagcttgccgccggggtggaaatgcgcgaactccagcgcggtgaagccgcgcccctccagcagcgcgatcgcgagcgcatcgccgatcgcggcctgcatcaaggtcgaggtggtcggcgccagattgtgcgggcaggcttcgcgcgccttcggcagttcgatcacgaggtcggcggcctggccgagcgaggaggagccgttcgaggtcaccgcgatcatgggaatcgcgaaccgcgccgaatagttcacgaggttcttcatctccggctgctcgccggaccaggacagcgccatgatgacgtcgtcgggcgtgatcatgccgagatcgccgtggcccgcttcggcggcgtgcacgaagaaggccggcgtgccggtcgaagccagcgtcgccgcgatcttgcgccccatatggcctgatttgccgagcccggtgacgatgacgcggcccttggcattgcgaatcagctcgaccgccctggcaaaggtctcgccaagcggaccgcgcagggcggcggcgagcgcgttgatgccgccgctctccgtctccagcgtgcggagtgcggattcgacgcttgtcggaatggggccggatgatgcggtcatcagcgctttcgaactcggcatggtctggtccagggaggaggggctttcgcccattggcgcctgcttagcatgccgcgcccggggaggcgacgcgccccccggcaccctcaacgggtcattaaccataattgttttaactccattaacgatggttcccgccagccggcggagacgatcgtgaaagtgtctgatttcgttggagttattccatcgtggggtcgtctccaggcagtagccggagcaaacgcgcgcagttgctgcgcgcggttttgccatgcctggcgctgacggcccttggaagcggctccgcggctgcccagagccttacgccggacctgttcaaccccaaccgcggcggctttgcctcgcccgatacgctgccgacgcgccgcacggccggcgtcccgcaggcgccgtcggatgcattgccggcgctgcccgatcccaatgccgatccgctcaaggcccgccaaaggcctgcggcctcgcgcgtcggtcaggtcccgacctacggcctgcccgcggccaccggagcgagcagctccgcttacgactcgctcaaccgcaagcggcagcagccgaagctctatcccggtcagccgaagccgaagcgacctgccggtcccggctcgccggcgccatcggtagcgccgcctgcgtcaacgctcggcccaccgcggatcgcgcccccgccctcagcgtccgcgaacagggcgcccgtgccggcggcgatggcgggcaccgtgcccggccagccgttgcgccggcgcctcagggccgatgacgatgcgtttggggccatcggcgattatgccggcagcttcctgatcaagggcgggctcgagctctccgcgggctacgacaccaatccgacgcgcctcaacaggcccgtcggttcgccggcctatgtgatcgcgcccgatctgctcgtgatgtccgattgggagcgtcatgcgctggtcgccgatctgcgcggctcgttctcgggctacaccaacgacatgccggcgagcatcaacggcttcgcttcgccgtcgccggtcgaggccaatcgcccggacttcaccggccatgtcgatggccggctcgacgtcacccgggacttcaagcttctttcgcagctgcgtctgcggctcgccaccgacaatcccggcagtccgaacgtgcaggccggcttgcagcgatatcccgtttacgccgcctacggcacgaccatcggcttcgaccagactttcaaccgcttccaggtcgccgccggcgccaccatcgatcgcaccgcctataccgattcgaagctcactgacggcacgaccttccccaacaccgatcgcgacttcaatcagtatggcggcgtcggccggttctcctacgacctcaagccggggctgaagccgttcgtcgagatccagggcgatacccgcgtccacgaccaggcggccgaccgcaacggctacttccgcgattccaacggcggctacgccaaggtcggctcgtccttcgagttctcgcgcatcctcaccggcgagatctcgatcggctattccgcgcgcaactacaccgacccgcgcctcagccagctcgccggcttcctcaccacgggctcgctgatctggagcgccagcggcctcaccacggtgaaattcttcaccgacacgcaaatcgccgagaccacgatccccggctcctccggcgtgctggtgcgcacctacgcggccgaagtcgatcacgacttccgccgctggctcaccgctgtcggcaagttcacctacggcacgctcgactaccagggccagaaccgcaacgacaagacctactcgttcgagagcaacctgatctacaagctcaaccgcaacatctgggtcaaaggcacgctgcgccacgacatcctggattcgaacgtggccgggtcgagctcgcaggggacggtgatgctggtcggggtgcggctgcagaattgagagacaccatggctgctcgaattaccttggacatcaattcggctggcgaattcgagctatggctcaatccgggaggtcgagaccttcttgtgaagcagctactggctctgagcgaaaccaacgagcactttcacttgatgccaagtgaagtcccatcggacgtcgaagtttcgacgcgtccctatcggccaaacgacaagcttctcgaatacggcaaggtgctgttccgacttgacgagtgggacgcgcagcactttccgcgcgtcttgggttgaggcctgctctctaaccgttcacttcattgtcatgccccggcttgaccggggcatccagtacgccgcggcctctcgtttcaatgacaattgtctctggaatactagatcgcccggtcaagccgggcgatgacacctttttccggtttggcggcggagcaaaaactcagcgcggcagatccgtcttccccatcaggaatgtgtcgatcgaccttgcgcacagccggccctcgcggatcgcccacaccaccagcgactggccacggcgcatgtcgccggcggagaacacgttgggccgcgaggtctggtagtccagcgtgttggccttgacgttgccgcgcgggtcgagctcgaccgcgagcagcttgagcaggccctcgtgcacggggtggacgaagcccatcgcgagcaggacgaggtcggcgtcgagctcgaactcggtgccggcaatcggcttgaacttgtcgtcgacgcgcacgcagtgcagcttcttgaccttgccgttctcgcccgaaaacttctgcgtcagcacggcgaattcgcgcacggcaccctcggcctggctcgacgaggtgcgcatcttcagcggccagtacggccaggtcaggcccttgttctcgcgctcgggcggcgagggcatgatctcgagctgcgtcaccgacagcgcgccctggcgcagcgaggtgccgatgcagtccgacccggtgtcgccgccgccgatgacgacgacgtgcttgccattggccaggatctcctggacgccgccgagcggctcctcggagacgcgccggttctgctgcggcaggaagtccatggcgtagtggatgccggacagctcgcggccggggatcggcaggtcgcgcggggcttcggcgccgccggtcagcgcgatcgcgtcgtactcgttgagcatctcgcgcggatcgacattgccctcggtgccgacatggctgttgtagtggaaggtgacgccctcagcctccatctgcgccacgcggcggtcgatgacgcccttctccatcttgaagtcgggaatgccgtagcggagcaggccgccggccttggcgtacttctcgaacacatgcacgtcgtggccggcgcgtgccagctgctgcgcgcatgccatgccggcggggccggagccgatcacggcgaccttcttgccggtcttatgcgcggcgatctcgggcgtcagccagccattgtcccaggcgcgatcgacgatcgcgcattcgatcgtcttgatggtgacggggttgtcgtcgatgttgagcgtgcaggacgcctcgcacggcgccgggcagatgcggcccgtgaactccgggaaattgttggtggagtgcagattgcgcgaggcttcttcccagttgccctgatagacgaggtcgttccagtcggggatctggttgttgaccgggcagccgggcgtgccgggcgcgaccgagccggtgccatggcaatagggaatgccgcaattcatgcagcgcgcagcctggtcgcgcacctccttctcggagaggggaacgacgaattccttgtaatgcttcacgcgttcggcgaccggcgtgtacttgcggtcgtgccgttcgatttccagaaagcccgtgatcttgcccattaaacccgaagtccctgccggctaattcgtttgttgcttcttcaaccgtcattgcgaggagcgaagcgacgaagcaatccagtctgttgctcaggagaaagtctggatagcttcgctgcgctcgcaatgacgggcgctgataatctttaagccccgatcgcgattttcggctcggcgtccgcattggcggccagttcgcgcagagcgcgccggtattcgaccggcatcaccttgcggaatttgggcagccattccttccaattggcgaggatgtcggcggcgcgcttggagccggttgccttggcatggcgcgagatcaggacgtgcagccgctcgacgtcggaggcgagcaggttcttgaacacgtccacccggccgtgcgcctcgaggtcaccggaggcgtgatacgtttcggcgttgatcatctcttccgacagcaccggctcgagctcgaccatgctgaggttgcacagcttgtcgaagtcgccggcctcgtccagcacataggcgacgccgccggacatgccggccgcgaagttgcgtccggtcttgccgagcacgaccacgatgccgccggtcatgtattcgcagcaatgatcgccggcaccctcgacaacggcgacggcgcccgagttgcgcacggcaaagcgctcgccggcgatgccgcggaaatagcattcgccttcgatcgcgccgtacatcacggtgttgccgacgatgatgctctcctccggcacgatggcagagttcttcggcggcttgacgatgatcttgccgcccgagaggcccttgccgacataatcgttgccctcaccctcgagctcgaaggtgacgccgtgggcgagccaggcgccgaaggcttggccggcggtgcccttgaggctgacatggatcgtgtcgtgcggcagcccggcatggccgtagatcttcgccaccgcacccgacagcatcgcgccggcggagcggttggtgctgttgatcgtggcctcgatcttcaccggcgcgccgcggtcgagcgcgggctgcgccttctcgatcagcgtgcggtcgagcaccgcctccagatgatggttctggcgctcggagtgatagatcttctggcccttctcttccttttgcttgacgaacagcttggagaagtcgaggcccttggccttccagtgcgcgaccaacttagtctggtcgagcagctgcacctggccgaccatctcgttgaaggtgcggaaaccgaggcttgccatgatctcgcggacttcctccgcgacgaagaagaagtagttgatcacgtgctcgggctggccggtgaagcgcttgcgcaggacggggtcctgcgtcgcgacgcccaccgggcaggtgttgagatggcacttgcgcatcatgatgcagccggccgcgatcaacggcgccgtggcgaagccgaactcgtcggccccgagcagcgcgccgatcacgacgtcacggccggtgcggaagccgccgtcgacctggaccacgatgcggctgcgcagccgctcgcgcaccagggtctggtgggtttcggcaaggccgatctcccaaggcgagccggcatgcttgatcgaggtcagcggcgatgcgccggtgccgccttcgaagcctgcgatggtgacatggtcggcgcgggccttggcgacacccgcggccaccgtgccgacgccgatctcggagacgagcttgaccgagacgtcgcccgccgggttgacgttcttgaggtcgtagatcagctgcgccagatcctcgatcgagtagatgtcgtggtgcggcggcggcgagatcaggccgacgcccggcgtcgagtgccggacccttgcgatggtcgcgtcgaccttgtggccgggcagctggccgccttcgccgggcttggcaccctgcgccatcttgatctgcatcatgtcggagttgacgagatactccgtggtgacgccgaagcggccggaagcgacctgcttgatcgccgagcgcatggaatcgccgttcggcatcggcttgaagcgttcggcttcctcgccgccttcgccggtgttcgacttgccgccgatccggttcatggcgatcgcgagcgtggtgtgcgcctcgcgcgagatcgagccgaaggacatggcaccggtggcgaaacgcttgacgatctccttggccggctcgacctggtcgagcgggatgggcttgcgcttctcttcctcggcgctcttgatccggaacaggccccgcagcgtcagcagccgctccgactgctcgttgaggatcttggcgaaggcgcgatagcgctcctgagaattgccgcgcgcggcgtgctggagcagcgacaccgactcggcggtccaggcatggtcctcgcctcggctgcgataggcatattcgccgccgacatcgagcgcgttcttgtagacctgagcctcgccgaacgcgtcggcatgacggcggacggcttcctcggcgatctcggcaaggccgacgccttcgacgcgggtatgcgtgccggcgaagaacttcgcgacgaagtcggccttgaggccgaccgcgtcgaagatctgcgcgccgcaataggactggtaggtcgagatgcccatcttggacatcaccttgagcaggcccttgccgatcgacttgatgtagcgcttgacgatctcgtagtcgtcaagcgagcccggcaggcggtccttcatcgcgatgatggtctcgaacgccagatacggattgatcgcttcggcgccgtagccggcaaggcaggcgaagtgatgcacttcgcgcggctcgccggattcgacgacgaggccgaccgaggtgcgcaggcctgtgcggatcaggtgatgatgcacggcggcgcaggccaagagcgaggggatcggcacgcggtcggtgccgaccatgcggtcggacaggatgatgatgttgacgccctcgcgcaccgcgctttccgcgcgcgcgcagagctcgtccagcacctggtccatgccggccgcgccgaggccggagtggaaggtggtgtccagcgtgcgcgacttgaaatgcgactcggccacttccgagatcgagcggatcttttccaggtccgcatcggtcaggatcggctggcgcacttcgaggcgcttggtcgttgccatgccctgcaggtcgaacaggttcggccgcggtccgatgatggacacgaggctcatcaccagctcctcgcggatcgggtcgatcggcgggttggtaacctgcgcgaagttctgcttgaagtaggtgaacagcggcttggccttgtccgacagcgccgagatcggcgtgtcgttgcccatcgagcccgcggcttcctcgcccgttgccgccatcggcgtcatcaggatggcgatgtcttcctggctgtagccgaacgcctgctggcgatcgagcagcgacaaattggagcgcacgccggtggtcggcaccttcggcagctcttccagcacgatctgggtccgctccagccactccttgtagggatggctcctggcgagctcggccttgatctcgtcgtccgggatcagtcggccctgctcgaggtcgaccagcagcatcttgccgggttgcagacgccacttggtgatgatctggtcctcggggatcgtcagcacgcccatctcggacgccatcacgatgcggtcgtccttggtcacgagatagcgcgcgggccgcaggccgttgcggtcgagcgtcgcgccgatctggcggccgtcggtgaaggcgatcgcggcggggccgtcccacggctccatcagcgcggcatgatattcgtagaaggcgcggcgcttctcatccatcagcggattgccggcccaagcctccggaatcatcatcatcacggcgtgcggcagcgagtagccaccctgcaccaggaattcgagcgcgttgtcgaagcaggcggtgtccgactgtccttcgtaggagattggccagagccggttgatgtccttgccgtagagctcagagctcaccgacgcctggcgcgccgccatccagttgacgttgccgcgcagcgtgttgatctcgccgttatgcgcgatcatgcggtagggatgcgccagcgaccaggccgggaaggtgttggtcgagaagcgctggtgaacgagggcgagcgcgctctcgaagtccttctcgtgcagatcgggatagtacttgccgagctggtcggcgaggaacatgcccttgtagatcacggtgcggcaggacatcgagcaggggtaatagcccgcaaggccgcggtcgcggcgctggtagatcgcctgcgagatcgacttgcgcaggatgtagagccggcgctcgaactcgtcctcggtcttcgcggtgccgttgcggccgatgaacacctgcatgcaggccggctcggtcggcttcaccgtgacgccgagcgaggaattgtcggtcggcacgtcgcgccagccgagcagggtcaggccctcttccttgatctggtcggcgatgatgctcttgatgacgttgcgccaggcggtctcgcgcggcatgaacagcgcgccgatggcgtactcgcctggcgcgggcagcgagaagcccagctccccggccttgcggctgaagaaggcgtgcgggatctgcaccagaatgccggcaccgtcaccggcgcgcgggtcggcgccgacggcgccgcgatgttcgagattgcagaggatgctcagcgcgtccgagacgatttcgtgcgacttctttcccttgatgttggcgatgaagccgacgccgcaggagtccttctccaggctcggatcgtacagaccttcggccttggggcgcgaattgtgttcctgaatcggatcggtcgttttcgaggcgaccgtcggcgacagctcttctgccacgatgtttgcgcgctcgaattgcgacccgttcattgttcctgtcctctccgtgcggcaagctgcctcaccgccatcttcggcgcaccttgggcgtaccgcggcacccgcctctgggtcaccgctcgtccgctgcgagccgcattttcttaaataggcctaggcgttcttcgtccccgagaacggctttgcctggtaccttgccgacgctcgagagcatcggttttcgctgcaatccctgtgccggggtggcaagcaaaattgagacagtcttcctgtcctaaccatcaccttgccaaatttttgtctagcacacaagcgtgggaaagtcccgattcccgataagtcaatcaatcgctttccaaaagttgcgcagccccggttttgaagcaaacgcgccgtgttccggccccgcgcgcgccgaaatcgcaaatgaagcttcggatcagcccttcggagagcgcgccacgccgcgagaagcgaaagatggcggccatccgggggcctgacaggagcgtctcgaccatgaagtttttcacaggatgtgtggccgtcgccacgctgatgctggcggcaagtgcagctcaagcgcaggttcccgcgcgcggtatcgcgggaggggccgtcatcgcggtgtcggatttcgacgggccttatgcgtcgccagaggtggcgccgcctccgtccccgcgttacggctacggctacgaggagcgcggttcggtcccgcagttgctgccgtccaccgaggtctacgcggtgttgcgcgacaacggcttcctgccgcttggcatcccgcgcctgcgcggcagcgtctacaccatcgcggtgatcgaccgccgcggtgaggacggccggctggtgatcgacgcccgcgacggacgggtcctgcgcttcatgccggccgctgatgcctacggcatggcccccgcctatgacgagcgcgcggtcgcgccttacggcccgcaaagcgcgctgccgccgccgaccgtgatccgcagcggtccgccgcgcccgccaggctcgatcccgcatgtggcgagccgcgccgtgccgctgcccaaggcagccccgcgccgcggcgagacgccggtggctgccgcgaagcccgagccggcggaggcccaagcccgtcaggcgttgccttcgcagcaagcggccaaggcggccgagcccgtgccgcaagcttccgcaccgaccgtcgggcaggcgaagccgtcggccacgatcttgccgacgcaggagatgcctgcggcgcaggggctggattagcgccgcgagttggacacgatggcgccagccatgatcacgtttgtcgtccctgcgaacgcaggaacgaaagctgagcaaacgaaaggcgccgaatgctcaggcgcctttcatcaagcagtcgcggctcagctccgcgggtaccccgccgcttccaggatcaagttcgcaatatccttcggatgcgacaccagggacaggtgaccggcgtcgagctcgatcgtggtggcgttcatgcgcttggcgaggaagcgctcgaagtcggggttgatagtgtagtcgttcttcgacaccgcgtaccagctcggcttggagcgccacgccgcctccgtggatcgaagccgcggtcggccattgtacggcatagagctccttggcctggttcggcttcacgccgttggcgaagtacttcaggaaagcgtcttccgagagcttggtgtagccatcgcgctcgacgacgccggcgcgcgcgggcccggtcggaaactgcttcgagagcgccacgaaatcctcgttggcatcgggtgcgcgggcggcgacgtagacgaggccggtgaccttcgggtcggtgccgacctggctgatcacggtgccgccccaggaatgcgcagccagcacggtcggaccatcctgctcggccagcgcgcgcttggtcgcgtccacggagtccgcaagcgaggacagcggattctggaccgcggtaacatgcaggcctgccgcttgcaggatcgggatcacctccgaccagctcgagccgtcggcccaggcaccatgcaccagcacgacgttcttggctttgaccgtctgtatggcctgcgcatgagcaaggccgaggggagccgccagcaggcccgcggcgacgaaaaggctgcgccagagtgagatgatctatctccgtcttgtttgggttcgatgcccaaaggacggagggagaaatggcggcgttacgcgctttcaccgccctgtgaatgcaatgcacaacggagaaacgccccggggcaccggggcgtttcgcaacctggacgtttgcttggcttaggcggcttgcgccgagttctcgatcacctgggccttcgcgccggcgttgatcgcaatctggcgaggcttcttggcttccggaatctcgcgcacgagatcgacgtgaagcagcccgttctcgagcgaggcgtccttcacctgcacgaagtcggcaagctggaaggcacgctcgaaggcacgcgcggcaataccgcggtagagcacttcggacttggtgttttcgttagcgactttctcgcccttgatcgtcagcgtgttttccttcgcgacgatggagagctcgtccttggcgaaaccggataccgcgacggtgatgcggtaggcgttctcgccggtgcgctcgatgttgtagggcggataaccggggctgccgtccgagctggcctggtcgagcaggttgaagaggcggtcaaagccgacggtggagcgatagaagggggtgagatcgtaagtacgcatggtcaagtcctccattgagcgactgttaggcaacccgcccgccatcgggccgggctcatctctgtgtgcagcctgatgttccggttccgaaacactggtagcggcctgcacggaaatgatatgggtggaacgagacggcgttcaagagggcggcatttgcgccttttcggcgcttcagccccttgatttgcagtgcttcccgcctatgacgctggtctcaattcccgccaatcccgtccctgaaaacgtcgtcagcggcaccatcaagacccccgacggcgtcgagctgcgctttgcgcggtgggcgccgccggcgggccgcaagggcacggtctgcgtcttcacagggcgcagcgagcagatcgagaaatatttcgagactgtgcgcgacctgcgcgaccgcggcttcgcggtggcgatgatcgattggcgcgggcagggccattcctcccgccgcctgcgcgatccgcgcaagggctatgtgcgcgacttcgccgatttcgagatcgacgtcgagaccttcgtgcagcaggtggtgctgccggattgcccgccgccgttcttcgcgctcgcccactccatgggaggcacggtgctgttgcgagtggcgcatgccggcaagcggtggttcgaccgcatggtgctgtcggcaccgatgatcgacctgcccggacgcaccacctcgtttccggtgcgcgccctgctcaagacgatgcgcctgcttggacagggcggccgttacgttcccggcggcagcgatcgcctcaccggcctcgatcctttcatcaacaatcccctgaccagcgaccccgtgcgctatgcgcgcaatgccgcgatcctggaggaggatccgacgctcggactggcgtctccgacggttgcctgggccgataccgccttcagcgcgatgcataccttcaagcgcgcgaactacccctcgcagatccgccagccgatcctgatgctcgcggcgtccaacgacaccgtggtctcgaccgcggcgatcgaggagttcgcgtatcatttgcgagccggctcccatctcgtgatcgccggggccaagcacgagatcctgcaggagcaggaccgctaccgctcccagttctgggccgccttcgatgccttcgtgccgggcacgccgctgttcaagtgagcgcgtgagcgagggatcgcgacacgaactcgtcatgcccgggcttgtcccgggcatccacgttcatggtaggcggaaaggttcgtggccggcggggacaagcccggccataagacgaagaactctggtcgcgttaaagcgtcttcagatactcgatcaggtcgtagcgctcggcatcgtccttgaaaatgcggccgatgacgccggcacgtttcggctcgccttgcttcagctcgaaggaatggccgagcacgctgttgccccggatcggctggccgtcagaaccgatcgctgaaaactccgtttctcccgtcctgcagctctcgttggcggtgactgcgaaacccacggtttcagggtcatagtcgcgacggcccatgcagaatttttgcggacgctcgttctgcggcttcagcagccagtacagcgaagggaccgagccgttgtggaggtaaggggccgttgcccagatgccgttcagcggccgcgcgcggtagcgcgggtctggcgctggattgaggcagttcttgcgcgccagattccacatcctccctcgctcggcctccggaatgttttcatcatccatccacttgcggacggcgaggtcgaccaccgtcatcaggccgagcgcatagaccatctcgttgggcgatttgctcgcggtcgggacctcgcattgccaccatgtctgcaggtcggccgtattcaccttcaggaagccgggcacgtcgacgatcctcttgctgaggacgagcgactgctcgggatcagtcttgatctcatcgagagggatcgtcaccgcgttcaggaccttgctgtcgccgctcggctcccagcgcttcgacgaccagaaggccggcgtgtcgacggccggcaaatgacatccagagcacatctccgcgtagatcgcgcggccgcgctcgacgcggtccggcttcagcttccaggcgtctccgagaatgtgcgagggccatttcggcgcgagcaggccgccgaacttcggaccggcaacaggatcggccgttttgaacggatcggggcctcgcagcatgtcctcgatccagccgagggttctgacatttaccgacgaacgccaaagcctgtcctcgggaaaggcgtcggacaggttgagcagcgccgtgacgccgagcgcttcgccggcattgcggatcagcggctgctcgatcgaggcgtcgtactgggcgaacttgaaccacggtacggtccagatcgcggggtagctcaccggggcgtcctgggcgtgcagattcttctcgaaccccttgacgccgctcattgcgaggtcctgcgagaagacctggttgccgatgcggttgagggcgtcgaggcggccgaatccttcctcggtgtcctgctgctgcttgccgtcccaggtcttcttgccctcgatcgtcttgtcgtaattcttggcccagtcgatcaggaagctgccgatcgtgctgagcttctgcttgagcgcggcgcggtccgtgtcgctggcctcagggccgagcacgcgatcggcaaagcgctggaagcggaatgggacgtacagcgtgtaggcgatcgacaggccagtcgcgagctcgagcttcttcaggtcggtcatggccgcaccgccatcgaagcggatgtcgacgccctgataatggatctggccggtatggcaggccgcgcaggtcagcccgatcatgtcgtcttcgcggcgcccggtcgcgggatcgaccacgccgttcatgcgcgcgaagccgaccggcaggccgtcgacgttctccgccggcgtccatcgcgtcgaccagtccgacacctgcgccgtctcgtagacattggcgtagccgaagcggcgcagcgtcgccgtgtcggcctggatcgtctgcgggctcgggatgaagccgaaacgctcgagataggcgctgtccttgatcatgccgggcttcgagaacagatgaagccgcggctgctccagcgccacgaaccactcatagggcaccgggaaggtcgcagtgccctggctagcatggtggaaccagtgccggtccttcagcgaccagttctgctcgagccagtaagcggccttcgtctcgggcacggtcggcaggggcggcggcagcaggttcacgagcactcccttctgcggcagcatggcgcgaacctggttggggaattcggcgacggccactaggactgcgaagccaagaccggtgacgagcgccgtcagcgcggccgcccagcgaaagcgaagctggcaggacgacagcagcggctgcgacaaaatccgctgattgatgcgctcggggaatttgcgctcctcgaacagcgtgcgcacgtcggccacgctgagatagcgctcctcgtcctgcttgcccttgcccatgatcttcaaaaggatcggccattcgaacttcatcagcaacgggtagtaccagcgcgcggcgttgcccgcgcgcttgaggttgtcgcgcatgaaggtcttgatttccgcggcgttgaggccgggctcgctgctgccggtgtttggatcaatgtaagtccggccgaagctcgcgagccgcgcgatctcgtcctcgttgaccttgccgtccacgccaaggatgcgcgagccggcaccgtgcttgtccagcggcccgccgcgcagcgcgtcgagctgcgcacccgaccagatgctcttcaggatgtgcttgaagccgttggcgatgagggcgacgcagcggacctgaatgcgcgccgagaccttcttcagcccggtctcgccggtcgcgttggcgatggtctgcgacagcgtgttgagcgggaccgtcccgccgtcgacgaagccttctccgacgaggccgcgcaggaacgggcagggattgttcggcgagaccgggatcgagggatcgaggggcggcttcgaagcggggtgatgcatggcccaatcctgaagacagcgaatcgtgaaaagcaggcgcgccgttagagcgcggaaagtcctaacaaaccggcacaatatacgacttgggcgtgtgacgaagtgtggcggagttcacttatcgcggcaagagcaggcggccgccgatagggcgtgatggactcgcagcccgccgttcaggactcggcggcgcgtttgaggtcgctctgcaacagggtcagcttactgagcggcacgccggccttcagcagcccctcgcgataatgggcgatgtcttcgggccgcttccaatggaaatttcgcaggtgccggtcgacgttcagcgacggatagtttgccatcaacacgccggcggcttcgctcgcctcgtcgcttcgcccaagttgcgccagcgccgcggcgcggatcgccagcgcctgcatgtggttcggattgatgtagagctgctcgcgggcccatgacagggtcgcgtcatattggcgcaacaagtagtggctgaacgcattcagcgccgcccattgatagcgcgggtcgctgttgtcgcgctgcgaggccatcgagaacagctcgatcgcctctcggtgctcgccgatcatgaaatggcagatgccgagcacgccgcgtgcgccattgtcgtagggattgagcgcgaccgcgcgctttgcggcatccatcgcggcctcgtgatgtccctccagcgaatgggcccaggacaggatcgagaacgcgaacgacgagcgcggatcgaggcgcacgctggtttcggcgaggttcatcgcctcggcccacatctcccgcgtgcccttgacccagccgaactgaatgctctggatctggatcgtgcccagataggcatgcgcgatcgacagtttgggatcgagccggatggcctcgcggaacaggtcgacggcggcggccagatcctccttggtctgccggtagtaatgcgacagccccttgaggaaacggtcccaggcggagacgtcggtcgagagccgcgccggcgccgaagcttcggcccgcacgatttcggtggcgatggcggcggacaggttggtggtgatctcgtcctgcatcgcgaagagatcgccgatgtcgcggtcgtagcgaccggtccagagctgctcacccgtctccggcgcgatcagctcggcggtgacgcggatcttggccccggcgcgccgaaccgagccctggatcagataagtggcgtcgatctcgcgcgcgatcagtcgcgtgctggtgttcttgcccttgaagatgaaggtcgagttgcggctcagcacgcgatagaaggattgcagcgacagcgcgtggatcaggtcctcggtcaagccgtcggagaaatactcgtcctgtgcatcgctgagattggcgaagggcagcacgccgacgatcgcggtgcggtactgctgcgagagagcggacgcctctctcagctcgggagcgagcgccggcgcgccctcgggcgtccaggtaaagaccccgatcgcatccttgatgttcttgaagcgatggttgccggcatcggtcagcggcatcgccagatgcttgctcgcctcaccataggctttggccgagatcgcgaacccgccggggctcgctaccgattccaggcggacggcgatgttgacgtcgtcgccgaagacctcgtcctcgtcggcgatgacgtcgcccatatggatgccgagccggaactgcatggcgcggtcggcaggcagatggcggttgcgctcggccatcagcgtctgcatcgagagcgccgcctcggtggcgccgacgattgaggcgaactcgagcaggaagccgtcgccggtgttcttcacgacgcgaccgccgtgattgaggatgatggggtggattgctgcacgatgggccttgaaggcggcatgcgtgccggcctcgtcgctgcccatcatgcgcgaatagccggcgacatcggcgcagacgatggcggccagacgtctttccatatcggcgaagctccgagggataggagaccgaccacggcgtggcggtcgccttgaatcccgcatttcaagaaccctgcctttataaagcagatgcggccgagcggaagcacgatccgcactgcaatttcgggtagatcttgcgcggccgacggtggacgggtccgcgcgaaccgactaagtggaaccaacacgcccgggcgggtggcggagggtggcgcatgctgggcattcacgaaatcgggcttttcgtcctctcgggcgtgctgctcaacatcacgccggggccggattcggtttatgtgatcggccgcagcatgcagatgggctggcggggcggcgccgctgctgccttgggcatcagttgcggctgctttgtccatgtcgcgggcgcggcgatcgggctttccgcgctgctgatggcctcgtcgaccgccttctcgatcctgaagctggtcggcgcggcctatctcgtcgtcaccggcctccagatgctgtggtcgcgaccggccctcgtttcggccgtggacgagccggtgcggagctcgttgcgccgggtcttcctccagggcgtcttcaccaacgcgctcaatcccaaggtcgcgctgttcttcctggccttcctgccacaattcgtcgcagccgatgcgccgcacaagccgctcgccttcctgacgctcggcctgattttcatcttcacgggcacgctctggtgtctggtgctcgccgcctctgcggccagggccgcccaccggctgcggcagtccgagggcgcgatcgcctgggtcaatcgcgctctcggtgggctgttcatctatctcggaatccgcgtcgccatgctggaggcgcggtgagctcacctgtcccagggggaggaggtgaatcgggcgtcacacctggatcgaattccgggctctcaggcgaactcctgcgccagcgcgctgcccgcaagatagaggccgagcagaatcatcgcgatcaggaaccagcggcggaacgcttctgccggcatccgcgcccgcaccgattggccgaggaacatgccggcaaaggccatggcgaggccaacggcacccggcagggcattggcgggcgtcagcaagccaacggccgtaaggttgaaggcgagcgccagcgttgccgtcgtgaagaacacgccgatcgcctgcaccagctcgtccttttccatgccgatcgcctgcatgaagggcattgaggggatcacctgcacgcctgtcgaggccgagatcacgccggtgataacgccgaccaccccgccgacccatttctcgttccgcggtgaaacgtggaaatggaatttgttcaggccgatcaccgcgtagatgacgagcagaatgccgagcacgatcgtgccgtagcgcgcatgcgggccggtcagtgcgccggcattgagccagcagccgaccacagtgccgatcatcagcggccatagccgcctcaggatgtcccgcaggtaaggaccgacgaaggtctgccagatgttggtgacgatggcaggcacgatcacgatcgcaatggcgcggctgggggccatgctcaccgcgagcaggcccatggacaccgtcggcaggccgaggccgatgacgcccttgacgaatcccgccagcaggaagacggcggcgatcaggatgaggagcgggtcgatcatctcagcacattgacggaagctgcgcgccggcacaatctggaggttacggagagagccttcgctgcaaacgaaggcatgaaagacctcttatgcgcttcgacctcgtcgatctccagctcttcatcgcggtcgccgaccagcgcagcatcacccgcggcgcggagcgctcgcacctggcgctggcctcggccagcgcgcgcatcaagggtctcgaggatgcgctcggcgtcgcgctgctcaagcgcgggcgccgcggcgtggagttgaccgccgccggcgagagcctgctcgatcatgccaggctcgtcatccaccagatcgacgccatgcgcggcgatctcgccggatttgcctctggtatgcgtgccagcgtgcatttcctcgccaacacgtcggggctgtcggagcatctgccgaaggcgctcgccggcttcctgcgcgcgcatcgcgacatcgccgtcgacatcgaggagcgcgagagcaccgacattgcggcggcggtcaccgccggtgcggccgatctcggcttcgccgccgagcacgcgctgcccgatcatatcgagcgcttcgtcttcagcgaggaccgcctgacgctggtgacgtcgaagcgcggccccttcgccgaccgccgccggatcgactttcaggaggcgggagcctgcgactttgtcggcctgacaagcgccaccgcgctccagatgcacatctcgaggcacgcggcgcggctcggtatgcgactgcatgtccgcgcccgcctgcgcgacttcgacgcgatctgccagatggttgccgccgatgtcggcgttgctctggtgccggaagctgccgcccgtcgctgcgccaggaccatgccgctcgccatggtccgcctgcgcgatgcgttcgccaaccgtcgactcgtgatctgtgcgcggagcttcaaggcgctgccaaagccggccaagatgctggtggagcatttgcgggcagaggcggtgtgagcgaacccttaccctcccctggagggggaggggccatcgtgcgaagcgtgagcggggtgggctgacagtctctccattgaggcactgcctgtgtggagagatcaccccaccccgcttcacctctcgcttcgctcaaggcgaagcgcccccctccaggcagggtaagaaccacctatttcgccgtctcccgctcccgcgtcggtcatgcaagccctccgaccgctcgctactggttcaaaagcttcaacgcttcttcgtgaacccgcgcatcgccggccgcgatgatgcggccgccgccctgggccggctcgccttcccatgtggtgacgacgccgccggcgccggtcacgatcgggatcagggccgcaatgtcgtagggtttcagctcggtctcgaccacgagatcgacgtggccggccgccagcatgcaataggagtagcagtcgccgccatagcgcgacagccgcgcagcccgctcgatgcggccgaacacggcgcggtcgctctcgttcatcagcagcgggctggtggtgtagctcgttgcttcagacagcgaagcgcagcggcgaacctggagccggcgctcgccggacggacctttgtagttggccgaaccgttgtcgccggaaaagcgctcgccgatgaagggctgatgcatcatgccgtacaccggcgcgcccttgtgcaaaagcgcgatcagcgtgccccagatcggaaagccgccgatgaaggatttggtgccgtcgatggggtcgagcacccagacatagtctgcgtcctcgcgctcgttgccgaattcctcgcccacgatgccgtgctgggggaagcttgccttgatcagcctgcgcatcaccgcctccgcggcgcggtcggcctccgtcaccgggtcgaaatccctggtcttgctcttgtcatcgatcgagagcgacgtgcggaagaacggcaggatggtttcgccggaggcggtggcgagccgtccgatgaaggcggagaaatcgatcaccgtcacgggaatcctcgaagcgaaagttggatgaagctcgccttctgcctagctcaattcgtctccgacgtgcagcgctgtcttgatttgctccctggtattttggatgcccggagcgactgctcgttcggtcatcccggggccaaaaatcgatcatagagttgaaagcttagttccgaggttggggcgcgcgcccccaaaacggctatcaacccattgaattcccttatcaaagaaactgaatctgggtttccaaggaagcaagtgagccatgtgctaattgcatgggaaacggctcaaaagcccttgcactttgtgcggcgcggccgcatattgttgcggtgcggtagcgcttggcgttaccgctgccctccttgggcgtttcctccctagacttgggccgcttgcgtcattcgcgagcggcccttttttcttggggctccggtttcattcggtgcgcggaaacttgcgaagcgaaagcgggttcgcgcttcgcatgggcaatacgaatgcagcttgctctattccgccgcggcttggaacgggccgagatcggcgaaggggatcgtggtcgccagcacgtcggcgaggacaccgaaatcggacgccacttgcgcgaagcgcgcgcttcgctcgcgtcgccgctcatccatgtagatcgcgcgattaagctcgagctgcaccgcgtgcagaccgcttgcggggttgccgtaatgttcggtgatgaagccgccggcatagggcttgttgcggccgatcgaatagccgagcccggtcatggtctcctcgacgcaatcgggcagcagcggcgtacagctcgtgccatagcggtcgccgatcacgacgtcgggacggcgcggctcgtctctgctgacaccgaccgagggcatcgagtggcaatcgaccagcaccacggtgccgaacatctgatgaaccttgttgatcaaccggcgcagcgcgcgatggtagggcttgtagagcgtctcgatccgccccagcgcttcgtcgaccaggatgcggtcgcggtagatctcctggccatcgccgaccacgcgcggaatcgtgccgaggccgccggcgacccgcatcgagcgggtgttggcgaagctcggcaggcggccggtgaacatgcgtgggtcgagctcatacggctcgcgattgacgtcgacataggagcgggggaagttgacccgcaccgtcggaaagcctcgctcgctcaaatggccgatcagctcgtccataaacgaatcttccgaacgccgcagcgtcggcaggtcgattcgcgaggccgccaggaattcgtccggataggttgagccggaatggggcgagttgaagatgacgggcgcgcgccattgcgcgggctccacgatctcgaaggctggcgacgtctcgccgtcaaaccgggtcatcttctcaggtttcgtccctcgggccgggatctggcaggagccagttcgcattgagttcggccgatcgagcggctcttatgtgtcgtcattgtccggaatcgcaaccattctgccaagcgaaaagatgtgacggcgcgttggaacacctcttaaccgtgccgacagggaggcgggatgggccaaggcggctcgattgattcgagccgctttccggttcagaagagtgcggcagcgcagccgactcagggtaaagattttcaccccaaatttaccctctgtcgggcttagtgatctctgctgatatcctctggggatgcgacatttcctgccatgccaaagatcctgctcgccgaagacgacaacgacatgcgccgtttcctggtcaaggcgctggaaaacgccggttttcaggtttcgtcccatgataacggcatggccgcctatcagcggctgcgagaagagccgttcgagatgctgctgaccgacatcgtgatgcccgagatggacggcatcgagctcgcccgccgggcttcggaactcgaccctgacatcaagatcatgttcattaccggcttcgccgcggtcgccctgaattcggattcggacgcccccaagaacgccaaggtgctgtccaagccggtgcatctgcgcgagctggtcagcgaagtgaacaagatgctggcggcctgaatcaggccccttccgtccttgcgccggctcccctgagccgttatagggacccacccgatcttagacgacctctagggcacgtagctcagcgggagagcactaccttgacatggtaggggtcacaggttcgatccctgtcgtgcccaccatcctcttcaacgatttgggcgcccggcgcctggggctgaagaggaggtttctacaagatttccacgaagactcatctcgatgcgggctgcccccgtgcatctagcgcgcggattccgccgatctgacagcgcgcggtagccgcgtcacgcgaagcgcctctgtcgtcaacagcgcgtttcggagccaagactctccgggctctccggggggcggtcagattttccgacctgatggaggaagctggcggctctcaagttccgtccgttttgtggtccatcgccgctgcgcacttcacctcgcaccagtaatggccggacggtggaactcgcgggcgccgcggtcgttgcttggccgcggcagcaggagcgagtaggagagcacgtgaatcgacgccagcttgttcgagggtcggcgttgctgccggcgctgctgctcgcctcgcgcgggcgtttcgccgcggcgtcagacgacgcgttcagcccgtccacggtgagggacttggcgcggatgctggcgggcaaaccgtacgaggcgccggacgagaagctcccgagcgcattgaaggatctcgactacgataagtatcgttcgatccgcttcttgcccgagcgcgcgctctggcgcggcaagaatcttccattcgaagcgcagttcttccatcgcggcttcttctacaagaacagagtgaacatcttcgaggtcgtggacggaaaggcaaccgagctcaagtaccgcaagacagacttctcgttcggcgagaagattccggcgttcgaggacatcgatctcggcttcgccggctttcgcatacacgcgcccatgaaccgccccgactattacgacgaggtctgcgccttcctcggcgcgagctattttcgcgccgttgccaaggggcagacgtacgggctttcagcccgcgggctctcgatcgatacgggcgaaagcaagggcgaggaatttccgctcttcaaggcgttctggctcgagcggccggcgcctggtgcgtcctcgctggtgatccatgctctgctcgacagcaagagctgcgcagcgagctaccggttcacggtgcgacctggggacacgacggtcttcgacgtcgaaatgtcggtctacccgcgcgtcgaaatgcagcgggccgggctcgcgcccatgacgagcatgttcttctatggtccgaacgaccgcaacgacatcgatgattttcgtccgtccgtccacgattccgatggccttgcgatcttcaacggaaagggcgaaagcctgtggcggccgctcagcaatccccgcgacctccagatcagcactttccaggatctcaatccgcgcgggttcggcttgatgcagcgggagagagacttctccgtctatcaggacatcgagtccagcttcgaaaaacgcccaagtctctggatggagccgatcggcgattggggcgagggcggggtcatgctgttcgagatcccgaccaaggaggaagttcacgacaacatcgctgcattctggcggcctaagggcccgctgcaggccaagggcgaacacaactacacctaccggctgcattgggggccggatagtccgaagccgcattcgctcgccaggttcacgcgaagcgggataggtgccaggggtgaggacgcgcgcctcttcgtccttgatctgctgggcgacaacctgaaaggcgtcgatccggctggcgtcaaaggcgtggtgacggccgaaaagaccgaggtgaagaacatcgtcacgcagcccaatccgtacaccggtggttggcggctgagcttccaatgccaggtgaagaccgagccgatcgagctgcgggcctttctgaccgcaggtgacaagcccttatccgaagtctgggtctaccgatgggccccgtgagccgcgcgcagcggccgatcgccgaagacatcgcggcccagcgcctgctgccggcggaagctccccttccgatggctcccggcgacctgggaaagaaccgggtacgcgaccggattcccgcgcctgtcacccccgcaatggcctggcggcgcggcctcatcctcctctcgacggcggcgctcacggggggcggcgggtatgagatgtatcgcgtgctgcaggtcggtggcgtaaccgtccttgaagcgatggtgctggcgctgttcctggtgctgctcgcctgggtcgccttctcgttcgcctccgcgatggccggcttctttgtgctgcttgtccatcgtccgggcgccttcgcaccagacggggagctccctgcgatcgcaagccgcaccgccatgctgcttcctacctacaacgaagacccacaccgattgacggcgcggcttcgggcgatcatcgaatccttggagacgacctcgcgcggaaagctgttcgactggtacgttctgagcgacagcaccgatccggacatctgggtcgccgaagaaaaggcggtgcttgcgttgcgacaggccgttggaacgcggctgtactatcgccaccgagcagacaatacggcacggaaagccgggaacatctccgagtggatcacgcgattcggcggcgtctacgacttcatgatcgtgctcgacgccgacagtctgatgagcgggcagacgatcgtgagattggtccatgccatggagagcaatccgagcgccggcctcgttcagacgctccccatggtcgtcaacgcgcgaagtctgttcagccgggtccagcaattcgctggccgcctgtacggcccgatgatcgccgcgggcgtagcctggtggcacggctcggaaggcaattactggggccacaatgccatcatccgggtgaaggcgtttgccgaagcggcagcgctgccgcaactccgcggacgtaagccgttcggcgggcacatcctcagccacgatttcgtcgaggccgcgctgatgcggcgggcagggtggggcatctacatgctgccgacgctcgggggcagttacgaagaggtgccgccctcgctgcttgatttcgccgcgcgcgaccgacgctggtgccagggcaatcttcagcatctcgcagtggtgcccgcgcgggggctccactgggtgtcacgtctgcatttcgtggtgggcataggggcatatctgacggctccgctgtggctcctgttcctgctgctggggatgctgatctcgctgcaggcccgcttcgtgcgtccggagtattttcccaagggcttctctttgtttccgagctggccggcccaggatcccgtgctcgccatctgggtgttcgctgcaacgatggggctgctgttgttgccgaagctgctgagcctgatccttgtttggatgcggggctcggtacgacgccaattcggcggcgcattgcgagcctcggccggccttttcgcagagatcgtcgtatcggcgttgatggcgccggtgatgatgatcttccagtcgatcgcggtcgtcgaaattcttgctggccgcgatgcgggctggcagacgcaaaggcgcgacgacgggaccgtggagcgccgcgagctctatcgcaaatacggcgttccaacattgtgcggcgttgtcatgggggcaagcgcgtacgccgtttcgctcccccttctgctctggatgtcgcctgtcatcgttggcctgctgttcgcagttccgattggcgcactgagcgccaggcccgcgtccggcaaattgttcgtcacgcccgaagagcgggagccgcctgcggtgttgcgacgagcgaacgaattgagcgcgtcggccgatctagcgatcaaacccgcgctcgtggaactgcgcggagatgccgcactcctggccttccacgttgcgcaactgccgcctcctcgcgccgcccggcccgagaccgtcgacacaaacctggcggtcgggcgcgccaaggtcgatgccagcgagactttcgatcaggctgcggcgcatctgtcctcccgggaggttttttcgatcttgaacgatggttcggcgctctcggccgtattggacaagcgatgaacacgcgacgggtgcgcctctaggcgagaggcaggttggtccgggtattcgatgaggcggcggctccctagcgccactcgttttttcgcgacggcatgattgaacggttcaaagacgggcgtcgaaaaaggtcgcaccgctctccgagttgagaatgccctcctgcctaaaagccgcgcacaacgctagcgtctgcatcccatcccggttctcaccatttctcgctgcgcatgtaagggctcatctcggaaatcagtgttggatcgaatccattccgatagtcagccaggcaacctctctgaacgcagccttcgatggtgcgggacgacggatggctgctccaccacatcgcgattgccgcaatgaggatgatgatgagttgaagctggaacctttccattcccatgcaagcctgagtccgaattcgagcagcaccgatccgttcaacaggagagcaattcgttgtgcgctgatgaagcgctctggccggcaagacaagtgacgaattgccgcaaatccgctgacgacgcgcgtttcttggtacgcttccgcgccaactagaccaccagaggcttacgcgaagcgcttcggaagaaagggaatgggctgctgcttgcagcagcccatcgacgtggtgcttatcgacaaacgcgcacacgggtcacgacgcggtggccgtgagggccgcgtcttacgacggtgcgcagcttgcacaccttccgagaatgatatcgatggtgacggtgatagcggtggtgatagtgcgcttgcaccagctcggaagctaccgcaggagcaatcggacgcgccggcgccgcgttggctggaaccgagagtgttccgaaagtgagcaggacggcaatggcgagaccatgagcgagtttcttcataaagtttccttacaagatgccccatcttcagtgttgcgtcagcgggtgaatacgagatgaacggcaccgtcgcgcagagctgcgttgcgccgatcagtcaaacgatcttccgcgcatcaatacacttcgtcgggatacacgccccacagtctggtctgccgaacgtagcctgcggaagtctctgctcgaacgtgacaccacacgccggcgcacgcatctacgatgacgagaacgcgcggttcaacgacggcgttgaccgccgagtctggcttcggatgctttcgaagacgaaccggctttgcggccgaccagggagcaatcaacgcggtcctccggccggacaacagtgcgcccagcatccatccctcttcgccatcggcatcgcggatgcgccgccagtttccgaactccgcgagtatctccacgggaagatggcggcgaacgaaggtccatcgcagcggataatcgataccgggtccagcgcgaacgttggccggcttgctcttgacggaggcaaaacggggtatcggaaggccgctccgttggacgcgctcggaaccagacgccgagccgaccaggcttccgagcaagatcgccgtcgctgctgcgctcatcaatctctgcaacgacagctgcttccaaatgctccaattctccgtatctgatcgtcccaacaccctcgaaaccaaaccctctcctgatgatagtgcgacgcgcgcggtgagcgagaggacgtccgcacttcagacgcaagaacgcccgcagctcctcgacgcctgcgcgagccgttgcatacatcgtcggaagggagatttgcgcccgagatttgtacggtagaggaccaagcgcgagatcgaatcaagagagatgctcgcttcgtgcggcgtagttaaccatctctcccggctcgcccagtttctgccgtcgttcgtcgttgcactcgatcgtctcggctcctcaccgcccaggaagaagcttatgccgccgatgtcgcgcaatcgggtcatctatatcccgctgcttgtccacatgatgctattggctgccggttcggtggttgtcttcgcctccgaagcgcacggacataaaccgttagcggatccacagtccgactctcgtacctcaagctcagagcacgtgccgttcgcgcggaccgaaccgtctccagcacggcgagggaggtccttgccacgtcagagcgcctcgacgtccgatgcttccgatgtgattggccgattgctatcatcgaggaaggcggcgctccccttgcctcccgccgcgacgtcgcaggaccattctcccgatacgcgcttcgttcaccaggagacggaggcacggtcggttactgcgttcggcaacttgaaagagacgatccgtcttgcccgtcgcgggaagacgggattggcgatcgaacgcagcggggcaattcgtgaccgcgcgagccgtagactggcggagtgggtgatcctgcgttccgatgatgatgggatcgactttcaacgctacgcctcgttcgtccgcgccaatccatcgtggcccagcctcgatcgttttcggcgacgcgcagaagccaggctctggttcgagccgcacgagcccggaaccgtgctcatgttcttctccgagcggaaacccttgggggccttgggcaagctcgcgcttgcgcgagcgttgtcggagcgcggcgatcaagccgcagcccgaaaatacgtccgttccgcctggcacaacggccgcctctccgcgcagtccgaggcgcaagtgctggcgcgcttcggacacctgctctcggctgccgatcaccgggctcgcatggaatcacgtctgtatgcggacgacatcacgggatccctgcgtgcggcgaagcgcctcagcgcaaccgaccgagcgatcgtgaaagcgcgggcagccgtcatccaaaatgccagcaccagcggtgccttgctcgacgcggtagcatcggctgcaggcgctgagcctgcttacctcttcactcgtatccagtggcttcgccgcaaggaccgcattgcggaggccgcgcaactgctgctttccgccaagcttcgcgcatccgtttccgaccatgccgatgcatggtgggtcgagcgccgcatcctggtgcgtcgactgctcgatgacggcaaggcgcagatagcctaccgaatcgcccgcgatgcggcctccccctccagggagagtcttcgcgtcgaccagacattcactgcgggatggatcgcgctgcgatttctgaataacccccatctggccacacagcatttcgcgcgtatcgcgaggatgacgacccatccaacctcgctcgcacgcgcagcgtactggctcggacgtgctgcagaggcgggcggtgatcgggagaaggcgcgcggccactatgccgccgcatcgagacgcaccgcagcatattacgggcagctggcaagcgcccgattgggccggcgcgacgtttcattgccgcgaccgccaagcctcggtcctagagagcgcgcaaacctgtccaaacgcgatcttgttcgcgcagtcgaactgctctacgcgactggcaacagcgatctggtgatcccgttcgtcgccgaccttggccgtacggccgacattggactgctgacggtcatcgccgaagccgtcgccaagaggcgggatgcgcgcgctacccttgcggtcggcaagggcgcccttgcgcgtgggtttccgctggatctgtacgcgtttcccaatttcggcctgcccaactatgcctcggtcggcccgaaggcggctgcaagtctcgtctacgctgtggcgcgggcggaaagcgccttcgacaagggcgcgcaatcgccggcaaaagcctcgggattgatgcaggtgacacccgcaacaggccaaacgatcgcccgccggctgggtatcgcatttgagcccgggcggctgcgaagcgatccagcctacaatgtacaactcggatccgccgaactcgcagatcttctcaagacctatgatgggaaccacgtcctcgttctggtcggctacaacgccgggcgtgggcgggtcaagcaatggatcgcacgctacggcgatccccgagatccgaccgttgacgtcatcgattgggtcgagcgtatccctttcaccgagacgcgcatctacgtgcagcgtgtgatggagaaccttcaggcctatcggtcacgcttcgacgaacgtgcgcctctgggaatcgaggcggatatgcggggagctcactaggatgttccggagacggccgcatgcacaggtgcggacagccttgctgcggcagacatgccgttccgctcggctctcgagaaacggcgcttgggttccatcgattcgtgccccggcgcgaggcaccgacggttccgaggatctccgccgcctcatgtaaccggcacgcgtgtcgcttgggctgcgctcaatgtaaggcggcactcccgccggcatcagctgcactctgagcttcgtcagccaaaatgaaattgaacaatccggctgcgttactggtttcccgaggccttcctcagctacgtgccgaatagcttgcgcactgctggcaaccattcgccggtcatcgtgaactcgagcccgagtcgagctccgcaggcaattgccaacatggtgataggcgctgaaagagagagcgtcgagaatgcggtcaatccctggccgatcgtgcatcccatcgacatgacccctccgatgcccatcaggagcgcgccggtcatgtgccgcttcagctcgcgggcgtcgtcgcaggcctcccaacgaaagccgcgcgcgagcatcgccgcggcaaacgagcctgcgacgacgccgacgacggagccgatgccgaaattcagccgcgcaccggaaaaggtggcaatatagagaatggcatcgccgagcggagccacgaaggtgagcgaggagacccgcaccgcgtcgaactcgtcgtcggcaatccatccagtcgcaaaccagccgaacgcgatcgccgcgcccacggcaagaccagcggccagcagccgcggcgaccggatcagcctgccgtccgcaagggcccagaaggcgagcgcggtggcaatggccacgacgaggaccgcgcgcatcatgccgtcggcgccgagcagcgacgtcaaggtctgggtgctcccctcgggcagccgcaccgacaacggttcgatcagcatcagccgcagcacaccggtaataccgcgcatggtcgcgagcgccgaaaggccgagcacgagaaacaccacgatggcacgcagatcgcctccgccgacgcgcaccagcgtgccgaacccgcaagtgccgaccagggccatgccgacgccgaacatcagcccgccaaggatggccccgccaaggccgatcgacgccgtgaggtagatcgaccgcgacagatcgacgatgccgaactcggcaagcgcctgggtcgcgagcagggcgaccgccgcggccagcgcgaaggatttcagcctgcgataatccgatccgaagaacgcgtcctcgagcatcgccagcgtgcagaagcgtccggcgcggccggcaatgccgagcacggcgccggcggcaagcccgcatgcaaacgcgatggtcgaagggctcagcattcctcccgcttcttcttggttctggccgcgggtaatctgcgccggtggggcgcgaaaagccagcgcggagaactaccggcggcgccggcgcaccggctcgcagaacacgtcgtaaacggcggtgagaatcttgcggacgtcctcgttggcgaggctgtagtagatcgtcttgccgtcacggcgggtcgtccccagccgatcgagccgtaaccgcgccagctgctgcgagaccgtcgattgccgctcgcccaggaattgctcgagctcggtcacggatttctcaccctcggcgaggatgcagagcagcagcaatcgggactcgtgggacagcgccttgagcatgtcgctcgcctcgcgcgccttctcgatcatctgctcgagttcggctgagccctcgatctccttcagcttcggcaacggcatcgcgtcagattcctcttagcacaataggcaagaacggtcacgacctcccgggttctgatcccgtgcttgacaggattcggtccaagaggccgaagaagaaggcatccccgggatagccacgaatacgcccgatctcacggccctcttgtaccacgacaaaggtcggcgtgaagggacccggatcgattccggccagatcggcggggagggagccgttcaggtcgacccggcgcagcggtgcggcccggccctccccggtcttgccgtagattggcgcgatctccgcgttgaagcgcgcgcaccaggcgcagccaggccgctcgaacatgacaagctctgcggcgcgcgatgcggtcgccggcagcgccagcccgatggcgagggcgagcagggcgatgattctgttcatgctgcgtaaccgagccatttggacctgcctggcgggcttgcttttcggacgtcctcggcgctttatatcattaaattcgtatatgtgctagggatgggcggaaatgaccttggacgtgacgctgggtgcggcctttgtcgcgggcctcttgtcgtttctgtcgccctgcatcctgcctctggtcccgccgttcctgtgctacatggccggcgtctcggttacggatctgtccggcgacaggccggatttgcggccgcgcatcctgctctcggcgctgtccttcgtggcaggtttctcgctggtcttcatcgcgctcggctcgaccgcctcgatcgcgggacgcttcgtctccgcgcatctgtcgacgctcggtatcgctgcgggcgggctgatcatcgtcatggggctgcattttctcgggctgctcaggattccgctgctctatcgcagcgccaccgtgcaggtcgacaatcgtccggccggtatggcgggggcattcgtcatggggctggcattcgcgttcggctggacgccctgcgcgggcccgatcctcgccgccgtcctgctgatggcgggttcggaggacacgaccgggcgaggggcgctgctgctgctcgcctattcggtcgggaccggaattccctttctgatcgcagcggcgttcaccggccgcttcatcggagcgcttggccgcgtgcgtcggcatctcggtctggtcgagaagacgatgggcgtcttcctggttgtgaccggtctcatgttcctgaccggattgatgcccgcggtctcgcaatggctgctcgagcagttccctgcattgaccagcatcggctgaggctagccgaagcggaagtcgagcaattgggcgaaagattgcagctcgatgaggtaacgatgcacgagggggccgtcgccggccatggcggcatgagcgatctcgccgctgctggcgattgcgccatcgatcaggcggcggaattcaccttgcgcggcgatctcgccgtttgcccattcgttgcaccgtaaaagccggtcgcggaacgcgcctgcggcggcgacggtctcctcggcgttcgcttgtgccggccgttcgctgtagcgggtcgcagcgacacgcaaggcgtccatggcgggcgcgatctcgaagatgcaatcgccgagatcgtagaggcccgcgtgacgcctgagcgcgtggaaagctcgccgaaccgcaagcagctcgcgttcggcggccgcattgtctccgcggtccagcgcgcccattgccgttgtgagctgttcgtatcctcggtcgagaaatcccgacgattcagaagacgcgtgaactggcgggcgttcgcgggtgttcggctcgatccgtttccagcggctggccgcttcgtcgatctcgatttgtgccagcgcaacgttgccggtgcgcacatagctcgcggcaatgcgcaggttggccatgatcggcgccaccgcggatacgagatacgccggcttgtcgccatccgcgccaagcgcgagcgcgttggaggccagccatgccagcagcgcgatggtgcagcgcaagatcagaactccttgtcacattcctatatttgaatatcataataaaaacgatcggcgcgcaagatctccaaggcaggaaaccccaatgtcgctccgcatgcccacccgacgcggtctcctcgcattcgcggcaggcacggctttggcgggccgcggcgcggcagcggccgagccagcagtcggagaagacgggctctaccacgagccctggttcctgcagagctttctcgatctgcgcgaggacctggagagcgccaccgccggcggcaagcgcctcgccgtcatgtgggagctgcgcggctgtccctattgccgcgagacgcatctggtgaacttcgccgaccccgggatcgcgagctacattcgagccaacttcgaggtgttgcagctcaatctgatcggctcgcgcaaggttacggactttgaccgcgaggaattggccgagaaggatctcgcccggaagtacggcatcaggttcactccgactgttcagttctttccgccgtccgccgatggcgtggaagcgaaggaagcgatggcgcgcgaagtggcgcgggcgcccggctatctgaagcctccgcacttcctggcgatgtttcgtttcgtgcgggagcgcgcctacgagcgcggctcgttccgggatttcctggcgtcgaatggctgattgagagcgtcttccgaatttcgcttgacgcggccattcgtatgaacatatcatgataaatgaatttgatggacgttgaattccatcgtgatcaacagcgggcgtcaccccgcattcaagggcaggaaacatgcggcgctcgcttatggctgcgtttgcactttatgtagcggccgggggcgctctcgcccaagaaccggtcaaggagccgatcaagctcgacgtcgttgacgattccctgccgaaatccctgataggcgcgcccggaaatgccgccgccggcaagaaggtatttctcacgcgtacgctcggcaattgcctggcctgtcatcaggtcaccagcctgaaatccgaggaattccacggtgagttcggtccgtcgctcgacggcgtggccggccgctacaccgaggcgcaattgcgcctcatcgtcgccgaccccaagcgcatcttcaccgacacggtcatgccggcgttcttcaagaacgacggtctcagccgggtgcgcccggaattcgtcggcaagacgatccttacggccgcgcaggtcgaggacgtcgtcgcttttctcaagacgctgaactgacggcgaggaggaccaggaatgaaagccatcaatcgacggcaggcatttgcgctcgggggcggcttcgtcatgctgacccttgtaccgatggcggccggtgcggaagtgtcgaacgacgcggcaaagtggatcgagaagttcaccggcggcaagcagccggccaagggcaagatttcgctcgacttgccggagatcgcggagaacggcaacaccgtgccgctgtcgatcaacatcgagagcccgatgaccgcggagtcctacgtcaaggacgttctcatcattgcggatggcaatccgaacgccggcgtcgcgacattgtcgttcacaccgctgtcgggcaaggcggaagcctcgatccggatccggctcgccaccacgcagaacgtggttgcggtcgcgaagatgagtgacggttcgctgttcacggaacagaagaccgtgaaggtcacgatcggcggctgcggcggctgagggcgtcaggagaggaacaatggcagacaaaccacgcatcaagctccccaaggaagcggccaagggcgaggtgatccagatcaagaccttggtctcgcatctcatggaatcgggtcagcgcaaggacgcgcagggcaagcccattccgcgcaagatcatcaacaagtttgcctgcgagttcaacggaaggccggtgttctcttgcgcactggagcctgcgatctcggccaatccctacatccagttcgacgccaggatcgacgaggccgggacgttcaagttcgcctggaccgacgacgacggctcggtgatcaccgccgaagagaagatcgcgctcaaggcatgatgcgcatcgcgcagtgagggagactcgaatggcgtcacgatatgttgggtttgccgctgcaatcgtggccatcacgtcgggtgcgacgctcgtgtctgccgatgacgccgagcggaaaggtatcgcggcgccgccgggccatgtcttcaagaccatcatctccggctacgaatttcgcagcaaggagacccgcgccctgcaggacgacgatctggagaatcccggcttcctcgccgtggagcgcgcggcggatgcctggaagaaggcggaaggcagtgagggcaagtcgtgcatgagctgtcacggggaggcccaagccagcatgaaaggtgtgggcgccgccatgccgaaatgggacgacaagctgaagaagccggtcaatctcgagcagcgcatcaatctttgccgtagcgaacagatgaaggcggagccctggaaattcaaatccagggagttgaccgacatgacgaccttcgtccgttaccagtcgcacggtatgcctgtggcggtgaagattgacgggccgatctcgccctggttcgagcgcggcaagcagatctattacaaccgttatggacaactcgatctcgcctgcgcgtcctgccacgagcgcaacaatggcaagtttatgcgcgcggacttcctgagccaggggcagaccaacggcttcccgacttatcggttgcgtgaccagcgtgtggtgccgctgcatgagcggttcgaaggctgcatgttcgacgtgcgtgccgagccgttcaagccgctgtctgacgacttccttgccctcgagctctacgtggcctggcgcggcatcgggctgccggtcgagacgccctcggtgcgcaattgaagccatgaatatgcaggagcattgcgcgtgatctctcgccgcgagttcatccaggttgctgcggcaacggctgcactttcgactggtgtgggttctggcctgacccgggcggttgcccagcagcgcctgacccagactgagttgctcgccttcgagccgctcggcaacgtcacgctggtgcatgtgaccgacattcacggtcagctcatgccgctctacttccgagaaccttcgaccaatctcggcgcgggagacgcaagaggggtgccgccccacgtcaccggtcgggagtttctcagccgcttcggcatcgcgccgggctcgtcggcggcgtatgccttgacgtccgaggatttcgaggcgctggccaagacctatggccggatcggtggtctcgaccgcgccgccacggtgatcaaggccattcgcgccgagcgcggcgacaaggttgcactgctcgacggaggcgacacctggcaaggatcctggtcgtcgctgaagacgcgcggccaggacatgatcgactgcatggcgctgctcaagcccgatgccatgactgggcattgggagttcacttacggcaccgagcgcgtcaagcaggcgatcgaaggactcggcttcccgtttctcgggctcaatatccgcgacaccgaatggaacgaggcggcgttcgacgcctacacaatgatcgagcgcggcggcgtcaagatcgcggtgctcggccaggctttcccatatacaccggtcgccaatccgcgctggatgatcccgaactggtcgttcggcgtgcgcgaggaggatgtccagtcgcaggtcgacaaggcgcgcaaggggggggcgcagctcgtcgtgctgctgtcgcataacggtttcgacgtcgaccgcaagcttgcgagccgcgtcaagggaatcgacgtcatcctgaccggacacacccatgatgcgctgccagaggcggtgaaagtcggcaagaccttgctgattgcctcgggctcgtccggcaagttcgtgtcgcggctcgatctcgatgtccgcgacggcgaggtcaaggcgtttcgctacaagctgattccactgttctccgatgtgatcacggcggacgccgagatggctgcgaagatcgccgaggtccgcaagcccttcgcgtccgatttggccaaggtgctcggcaggactgaatcgctgctgtaccgccggggaaatttcaacggcacgtttgatgacctgatctgccaggcgctgatgcaggagcgggatgccgagatcgcgctctcgcccggttttcgctggggcaccagcgtgctgccgggccaggacatcacctttgaggatgtcaccaatgcaaccgcgatcacctatcccgcggtctaccgcatgggcatgactggcgcgcgcttgaaggagatcatcgaagacgtcgccgacaacctcttcaatgtcgacccgtattatcagcaggggggtgacatggtgcggatcggcggcctgtcctatgccatcgacgtcaccaagccgcagggcagccgaatctcggacatgcagatggtcaagaccggcacgccgatcgatcctgccagggaatatcaggtcgccggctgggccagcgtcaatgaagggaccgaagggccgccgatctgggacgtcgtttcgaattacctgacgcgacagagagccattcggctcgagcccaacagagccgtcaaagtcaccggagcgtaagaagcgatgtcgaagatggacagtccccggcaatcccgacgcagttttctggccgctggcgccggtgttgcggcgtcggtgctcgcaaagcccgccttggccggcggcggcaatccggcgaaccagcccccaaacgtgccggaatggaccaaatcgctcggcgaaggcgtcgccgtgcgtccgtacggcaagccgtcgaagttcgagaaggacgtcgttcggcgcgacgttgaatggctgaccgcctcgcgcgagtcctcggtgagcttcacaccgctgcatgagctcgaaggaatcatcaccccgaacggtctctgtttcgagcggcatcatggcggcatcgccgagatcgatccggtcgatcatcgcctgatgattcatgggctcgtcgaacgcccgctcattctcacgctggatgagctgaagcgctatccgcgcgtcaaccgcatccactttatggaatgcgcggcgaattcgggcatggaatggcgcggcgcccagctcaatggctgccagttcacccatggcatgatccactgcgtgcagtacacaggcgtgtcgctgcgcactcttctcgatgaagccggcgtcaagaccaacggcaagtggctgctggtcgaaggtgccgatgcggccgcgatggatcgcagcctgccgatcgagaaggcgctcgacgactgcatcatcgcctacaagatgaacggtgaggcgctctatcccgagcagggctatccgatgcggctcgtggtgccgggctggcagggcaatctgtgggtcaagtggctgcgccgcatcaaggtcggcgaccagccctggcacacccgcgaggagacgtcgaagtacacggacctcatgccgaacggcaaggcacgccgcttcacctggtcgatggacgccaaatcggtgatcacgagcccgagcccgcaggcaccgatcaggcacggcaagggctttaccattgtctccggtctggcctggagcggcaacggcaaggtcaagcgggtggatgtgtcgctcgacggcggccgcaactggtggccggcacgcctcgacgggcccgttctcgacaaggcgctgacgcgcttctactacgagttcgactggaacggagagccgctgctgctgcagtcgcgggtacaggatgacaccgggtacgtgcagccgagcaaggccgagctgcgcaagatccgcggcgtcaactccatctatcacaacaatggcatccagacctggcatgtgcaggccaatggtgaggtcgagaatgtcgaagtcgcgtaagttcatggcagtggcgctgacggcctgcgtgctgggcgcgccggcgcttgcgggccagaggacggacaccaagagcggtccccgctatcacatcggccgcgcgccgaccgcggacgaaatccgcggttgggacatcgacgtgcgacccgatggtcagggcctgccggagggcaagggcacggttgcccagggcgagaagctgttcatggacaattgcgcgagctgccacggcgagttcggcgagggcagcggtcgctggccggtgctggccggcggcaagggctcgttgacctcggacaatccggtcaagaccgtgggctcctactggccctacgcctccaccctgttcgactacatccgtcacgccatgccttatggcaatacgggatcgctgtcggtcgacgaatattatgcactggttgcgtatgtgttgcatctgaacgacgtgatcacagatcagaatttcgagctgaccaataggaatctcgccacgatcaagatgccgaacgagcagggcttcgtgatggacgaccgcgccaccagcgagaagtcgttctggcagaaagacccctgcatgaaggattgcatcgcgccggtgaagattacggggcgagctgtcgccatcgacgtgacgcctgaggacggcaagaagtcccggggtgtggagtgaaccacggccgggtgagccgtcgcatgctgctgcatgcgagtctcgttgcgggttcgctcataacaatccacccggccgcggcggaagcggcggagccgcataggctcgcgctgcagatcagcgatgacgaccagagcaagatgcgagccgtcctcgatgttgcggccaacgtctcgcggcattattccgggcagggcgaggatgtcgaactggtggtggttgccttcaacggcggtctcgacatgctgctcgaggaccgctcgccggtgaaggagcgcctcgcaaacttcctgaaatcgatgcccaatgtgagcttcatcgcctgcggaaaaacgctggagacgctggcggcgaaggagggtaagcaaccgcggctgatcgagggcgtcagcgtcacccaggtcggggtcgctgcgttgatggatcttgcggaaaagaactggacgattgtccgaccctaggggagacaggcgccaatgcgatggttggtgggattgatagcgttgctcgcacttgcgacgtccgcaggtgctgccgagcaggagctcgaattgtcgctcgacggccgcacgacgctcgcgaccctgcgcacccccagctcgatggggcccgatacgccgctcgtggtcatgacccacggcacgcttgcgcacaaggacatggaagtcattcagggcattgccaaggcgcttgagcagcgcggcatcgcttcgctcgcccatacgctgtcactggggctcgatcgtcgcaagggcatgtatgactgcgccgcgcggcatgattatgtcatcgaggacgcaattgccgagatcggcgcctgggttgcgcgggcgaggggcatgtcccggctcgtcctcgcattcggccattcgcgcggcggcaatcaggtcgcgcggtacctcgccgcaggcgaaaccccgcctgttgcgggtgcggtgctgctggcgccggtgaccgcaaaggccgaggccgacttgcgcgcctcctatgcccagacctatggcaagccgctcgagccccttgtggagctggcgaccaagtcgatctcggctggccgcggcggcgagtggatggatgtgccggggttcatttattgtcgcaatgccatggtcaccgcgcgggcgctggcctctttctacggtcccgatgccggccaggacacggccgcgctcgtggcccgtgtgaaaccgccggtgctggtactcgtcgcggccaaggataccgtcgtgcccgacgtggcagcgtccttcgcttcgctcgcgggttcgggagggggaagggttcagctcgacgagatcgaggatgccgaccatttcttccgcgacctgttcgcagacgatgttgcagaccgaatcgccgagttcatcaagcgaatgagatagaagaaggctgcagcggcgtgttgcggctcgccgagctgcaacagcacggatatgccgattcgcgttcccgagggcccctttggtccgggatccggcggtgtctggctttgatctggctcatgggacgcgacgaccagatcgctagaattgcaaactcgcagcaacagccgggacgaacgtgctgacgccggttatcgatttccttggtgaagaccggctgtcatggctcggaggtctcctcgtcggaggcctgttcgggttcttcgcccagcgcagtcgcttctgcctgcgcgccgcagcggtcgaattctcccggggcgagggcggtccgcgccttgcggtctggctgctgacctttgccgcggcgctggtcggcacgcaggcgctggtcgcgatcggctggctcgacgtgtccgaggcgcgccagctcgcgcagcagggcagcatctccggcgcgctcgcgggcggcgtgatgttcggctgtgggatggtcctcgcgcgcggttgcgccagccgactgctggtgctctcggccaatggcaatctgagagccctgctttcagggctggtgtttgcggtgaccgcccaggccgcctatcgcgggctgctgtcgccggcacgcgaatgggtgaccaatctgtggctgatcgatggtggaccgtcccgcgacatcatggccgttttcggcgccggtgcccccgaaaagctcgcgtttggcggactgtggttgattgccggattggcttttgcctttcgcagcaacctgccacgcgatctcatgcttgccgcccttgccacgggagcggcagtcgttgctggctggctcttcacctaccagctcgcgcaggcctcgttcgcacccgtgacgctgaagagcctcaccttcagcgggccttcggccgagttgctgatgcttgtgctgaacagttcgcagctccggctcggcttcgacctcggcattgttccgggcgtattcctcggctcattcgccgcggcggcgcgcgcgggtgagctgaaactggagggattctcggacggcctcggcatgaggcgctatctgttcggcgcggtgctgatggggttcggcgcgatgctcgccggcggctgcgcggtcggcgccggggtgaccggagcctcggtctttgcgctcacagcctggctcgtgcttgctggcatgtggctcggggcagggctgaccgatcttctcgtcgacggtgccggcatgccgcgaccccgccgcccggcaaagtcgccgacgccgggcgcctgaccattattttagagattgctaaatctaattccttgaatatgatttcccccgatgcgcgccgctcgagccgcaggaacgcggtaatgcgccgctgccccggggaaaaggcacatgaccaccatcacggaaagctacgttcgcgaagcgccgcgcaccgcgcggatcgactggtcgccctatctggtcggcgccggaatcggattgttgagctgggtcgcctttggcgtattcggcgatccgctcggcgtcaccaccgcctattcgcgcatcgcctcactcttcgccgtcccggtgatcggaccggaagctgtggcacagaactcctactggaagagcatgccgctgaagtgggattacggtgtttggtttctcgtcggcataccattcggcgcgttcgtctcggcagtgatatcaggcacgtggcgcctcgagctcgtgcctgatgtctggaaggaacggttcggcccgtcagttgcgaaacgcttcgccgccgcgttcctcggtggcatcgtgatcatgtacggcgccaggctcgccggcggttgcaccagcggccacggcatctcgggcggtttgcagcttgcgctctcgagctggctgttcctggcggtcatgttcgccaccggactcgccgtttccgccctcatgttccgtgcccgctgaggagaactgacatgaccgcaatgatgaccatccttgggccgctggtgatgggtgccgccttcggcttcctcctgcagcgaggcaaggtgacgagctgcaacgtcatcgagaatcagtttcgcttgcgcgacttcaccgtgctgaaagtgatgggcacggcgatcgtggtcggcggcatcggcgtgctgctgctcgtcgacaccggcaacacgaaatattacgtgaaggatgccaacatgctggcagtcgcgctcggcgccgcactgttcggcgtcggcatggtggtctatggctactgtcccggaacggcgcttggcgctattgcgaccggcagtgtccatgctctcgtcggcgcgctcggcatgatcgccggcgccatcctctacgcgctgagcttcgattggctgaaggcgaacgtgctcaacgtcggggcacttggcaaggttcgcctgccggacgtgacgggcatccccgacgtcgtctggtttgccgcactggcagtcggtgccgggctgttcttctggtggatcgaatccacggaagccaggcagaagaagggctaagtcctgttgtccgcgccgagatgcgcggagacaagctcatcgtttccgaggacgacagaagagccggtgcagggttgaaaacaactcttcaacccgcccgtccgcgatgcgataccacatcgtttgcccgtcgcgccgggcggcgacaacgccctctgccttcagcttggcgaggtgttgcgacagtgccgagggcgaaagaccgacgtcgtcggcgagcgcgcttgcggcaatctcgccgtattccaccagcctgcagaggatgagcaggcggtgctcgttcgccaacatgcgcatgagcgcggccacctccttggcctgccgctccagctcggtcgtctttaattggcgcatgacggagagttcaatagcatctgtatcgccgcagtcaaaggcgctcgcaggagctatatttgcggaagcgtcgcgacgatgtcggtagcggcggcagcgagaccgcgacagcttgtgcgtcgccctgatcaacgagcgatggcagcacgacaatcccaggaaagcaaacggttgatcccccaatttgccgacagatcccggaacaggaggcagattgcggccgcgaccatacgatgcggtccaacgtgccgccattccctgagggccgcgatcagatcgccgacggtgtatgtgagatcgagaagagtaggacgccgggacagccactgaaaccaatgcgtccgtggtcgcgtccgccggcgccgcactggccgacacgagcagtcggcgctggcttgccttccccgcaccggtcattcgcgttccgtcccagagcgcgatcagctcacgtctaagtctgcaaatcagcaggacatccagagccgggtcctcaatttctttcagctcaagagatccagagtgccctgaagagcgtcacgacggctcgcatctccggcggtggtgcagccgggcgccgcagggttcgaatgcccgggggtgggagcgaagccgcttgtgaaccagagaagccgaacggccgagccttcctcccgcagcgcacagtcggcgcacagcagcaagagcgtgccgttttgattctgaagggtgaaaggaaaacacccaccgcgatatttgggagttcgcagccgacctcaagtatgaaagctcgttgatctgcgtcatgagacttgccttgatgctcctataggttacctaccggttcacaagcacaattgcggcccaaatgaccggaggggatcaatgcgcattcttcttcttctcggcgagacggagtcctcgcttagcgcgcgggagtttgcattcgatctcgcccgtcccggcggactactggtttccggcctatctggtatcgatctgtcttccctcactgttccaatgattggcgggattggcgcgtcggcacatcaagccaagctcgaggagatccgggggcggcaagcgcgcgagagtaacgcgcggctacacgcgtcatatgctgaagcatgtgatgcgaggggcgtcgagttctcctggctctctttcgaaggtgatccgcctgaggccttccgcgctgcttccgagacgcgagatttgatcgtcaccggtcacgatacgaccttttcggtcgaccaggctccctcgctgccggaattgctgtccaaccttctgctgctctcgccacggccagtcgtcgtctgcggcgacgagtatcgccgtccgcgcgacgtgttggtcgcatatgacggcagtctgcccgccatgcgcgccttgcaaatgtacgcacttctgggattgtggcgcgaggctcgcgtgcacgtgacgtctatcgcagcggaatcggagcttgcgacccgacgcgctcatgctgcggccgacttcttacgtggccatgacgtacactgtacggtcgttccgatcgaggcgagggtggacccgtccgaggcgatccgaattgaagtcattgatagggacattggtctgctggtgatgggcgcgtttggtcatcgcggctggagcaatgccctgtttggctcgacgacgcggcgactggtcgagcggccgccttgtcccctgttcctcttccactagaaccggcgtccgtgcccgtgcaggtacgcgccttacaccgcttcaagatcgagcagatcgaggaggcttacgggctatgcgccaatcagcgcgaggacgtcctcgaagtggcgatctcgccctgacaacgcagcggatagcaagctcaaccgaaacacaactccgggtctcacaattgagcaagaacgagcgcgaagcacaccaccacgcaatgtccgtggaagcggtcctcgccgctctcgaggctggtgcaagcgggctttcggcttccgaggcggcgcggcgcctaagccgatacggacccaaccggcttccggaaccgccgcgacgcagtgcgatcctgcgtttcctctcccacttccacaacttcctgatttatgtgttgctgggtgcggcggcgatcactgccgctctcggtcatctcgtcgactcgagcgtcatcctcgcggtggtgatcgccaatgcggtcatcggcttcattcaggaagggcgcgcggaacaggcgatggatgccatccgccagatgctggctccgaaatcctccgtgatgcgcgatggcgaacggcacagcatcgacagcgcctcagtggtcccgggcgatatcgtgctgttggaggcaggcgagagagttcctgccgacttgcggctggtagaggcgaccggtctccggatcgaggaggcaatcctcaccggcgagtccgttccgacagaaaaggaaacgaagcctgtggcaagcggagcgatgatcggtgaccgatcgtgcatggctttcagcgggacgctcgttgccggaggcgccggtcgtggcgtggccgtggccaccggagcgtcaacggaaataggccgcataagcggcatgctgtcccgagtcgagacattgaccacgccgctggttcgccagatggacgggttcgcgcgatggctgacaatcctgatcctgatgattggcggcgtgctgctcgtctacggctatttcgtggggcatctgcccttcgccgagttgttcatgagcgtcgtcggcctgtcggtcgctgcaatcccggagggactaccggccgtactgaccatcacgctggccgtgggtgtccaggcgatggctcgccgcaacgccatcgttcgccgcctgccggccatcgagacgcttgggtctgtttctgtgatttgcagcgacaagacgggaacactcacccgcaatgagatgatggtgaccaccctggccagcgccgaccacatctattcggtcgcgggagacgggtatgcgcccgaaggcgctatccggctcgccgatgctgacgtcgacccggcggagcatgagctgctgctcgaattcgcccgaacctgtgctttgtgcaatgatgccgccttgcacagtcatgacgaagggtggaaggtcgagggcgatccaatggaaggcgcgctcaaggctctggccggcaagattacgcgtcagggcgctgcggccttcgccgattggacgcgaaccgacaccatccccttcgacgccaggcatcggtacatggccgtcctccatcacgatcatgaggggcatgcctggatccacgtcaagggcgctccggaacggatcctcgccatgtgttccgtccagcgggcatcagatggtagcactcacgctatcgacgcggactactggcgcaagcggatggacgacattgccgcgcatggacagcgcgtcctggctcttgccgcacgttcaacggcgccggatcacgtcgtcctgaacactgccgatctcgacggccatatggtgcttgtcggactgatcggcctgatcgatccacctcgcccggaagccatcgccgccgttgcggagtgccatggcgcaggaatccgcgtcaagatgatcaccggcgaccatgcaggcacggcagcagcaatcgcgcgccaggtcggccttcagcaccccggcaaagtgcttaccggggccgatctcgaggcaatgagtgacgccgagttagcggccgtcgtcgtcgacaccgacgtttacgcgaggaccagccctgaacacaagctaaggctggtgacagcgctccaatcgcacggattgacggttgccatgactggggacggggtgaacgacgcgcccgcgctcaagcgcgccgacgccggtatcgcgatgggacagaaaggcagcgaagccgccaaggaagcctccgatctggtcctcgccgacgacaatttcgcatccatcgccgtcgcgatccgcgaaggacgcacggtctatgacaacatcaagaaggtcatcagttggacgctgcccaccaatgcgggggaagccacgacaataatcgccgcgctgtttctcggaatggcgctgcccgtcacagcggtgcagatcctgtggatcaatctgatcaccggaatcactctcggcgttgcgctagcattcgagccgaccgaagaagacacgatgaagcgggcgccgcggtcacgaaaggagccactgctgactggcgcgctgatctggcacatcattctcgtgtccgtactgttccttgcggcagtcttcggcatgtacacctatgcaatcgacaaaggacatgcgccagacctcgcccggaccatcgccctgaacacgcttgtggtgctcgagatcttccacctctttttcatccgcaacatctacggcacttcgttgaccttgaaagcggtgcgggggacacgcgtcgtgtggatttgcgtgatcgcaatcaccttggctcaattcgctgtcacttatcttccgccgctccagcaggtgttcggcacgcaaccggtatcgttcttcgatgggatgctcatcgtggcggtcggcgcagtgttcttcgcggtgatcgaggcggagaaacagctaagaattgtcttccagcgcaccgagcaggcccccgcctcacagacgaccgtgtagcgacaagcacaattgaagaccagggcggcgcatggctctctctacttacgatacaagatagctcgcgacccattccgcgatcactcgagttgcggcctgatgcacatcagcgcactgcggccaactgtcacggtcttgcgtcggtgcggagccggtatggcatgaaggctggcggatacccttcgatgccgagagcgttatcgtaagatttcggagacttggtcgaccgaatcgcccgacaatgacagccagctgtaacggactcgtagatgaaactttcgcttgttgtcttgctgccggtcgtgggggccctgatcccgccgctcgcaatccaagcggggcggaatgtctgcacgaccgttacagccgccatcacgggactcgcactcgtcattctactcacggaagctccggccgtttattctggtggcgtcccgcagacgaacatgtcgtggttaccgcaactcggcctctcggtttcgcttttcgccgacggtcttgccctgttctttgcggcactgatcctagggatcgggctgctgatcatcctctatgcgcgattctacctgagccgcagcgactcgatgggtcggttcttctgttacctcctgcttttccagggctcgatggtcggcatcgtcctgagcaacaatatcctcctcctggttgtgttctgggagctcaccagcctcacatccttcctgctgatcggctactggtatcacctgccggcctcgcgtgcgggagcgctcatggctttggtggtcacgggcgccggtggacttgcgctgatgggcggcatgctgttgctcggtcattctgccggcagcttcgagctgactgagatcctgaaccgcggcgaagcgatcaaagcctcacccctctatctgccggcactgctgttgatcctcctgggagcgttcaccaagtcggcgcagttcccgtttcacttctggttgccgcatgcgatggccgcgccgacgccagtatccgcttatctgcattcggcgaccatggtgaaggctggtgtcttcctgctcgcgcgtctttggccggtcatgtccggcacgcaggaatggttcctgatcgtctcgttgaccggcctcgtcacgatggtgatggcggcgtggattgccctgttcaaggatgatctgaaagcgctgctcgcattctcgaccatcagccatctcggactgctgacgatgctgctcggcttcggcacccgcatggcggtcgtcgccgccgtattccatatcctcaatcatgccaccttcaaggcggcgttgttcatgtccgcaggcatagtggatcacgaggccggcacgcgtgacatccgcaggcttggcggtttgcgtcatctcatgccgatcacatcaggcctcgccatcgtcgccgcagcctcgatggctggggtacccttgctgaacggcttcctgtcgaaggaaatgatgctggaggaggcgtcgcacacgatctacgcgggacaggcctggatctttccgctttttgccaccgtcggagcgctgctgtcagcggcttactccgcccggttgatcttccacgtctttctcggtccgcagcggagcaattacccgcgccacccgcatgacccgtccttcgggatgtggctgccagttgcagtgctggtcatcccggtcatcgctatcggcgtggtgcccgcgacattcgccgtgccgatcgaactgaccgcgcgcgcggtcgcacacggaaccttgccagactttcacctcgccttgtggcacggcttcactcccgcactggcaatgagctcgctcgcacttgcggggggcctcgtgctgttgtggatctacccgtccgccaaccgcttgcgcctcgccgcgccacgggccgatgccatgacgatgttcatgacttccctcgcagccgtaatttgggcatcgcggcttgccctcagcagcatcaatggcggaggtctaccgcgctacctgagcatcatcgtcgggaccatcagcatcctggccctgactggattcctgggggcggcgcccgcgccaatggcaggcggtcgcgccgttcttcccgccacgctaccggttgtgacggctggctggtcttgctcctggcgtgcggaatgatcgtccggtgccactacgatcggctgaccgcgttgatcgtcaccagcattgtcgggctcgtggtatcgctcgccttcctgcagttctcggctcccgatctcgcgctgacccaaatctcggtcgaggtggtaactacgattctccttctgctcgcgatcaatctgttgccgcgcacgacgcctgacgaatcgcccttgcgtgcaaagctcggcgctggcggactggcgatggtcgcaggagttggcgtagctgcgctggcttacgccgtgatgacgcgcaacttcgagcccatttccggctatcacatcgaacaatcgaaacccggcggcggcggcaccaatgtcgtgaatgtcattctggtcgactttcgcggctacgacacatttggcgagatcatcgtgctcgcgatcgcggcactaacgatcttcgctttgctcgactccgcgatgcagggcgccgctgggcgccggctcgcacgggtgcgtttcgatccgcaggcccacgaccctcacccgctgatgctgacggtcgtgacccgcattctgctgccgctgtcgctgatggtcggcgcctacatcctcctgagggggcacaatatgcccggcggcggattcatcgccggcctcatcgtcgccatcgccttcctcatgcaatatatggcgagcggttatgtctgggcgcatcgccgcgctcgcttcgacgcccatgtgatgatcggcggcggtgtgttgatcgcaggtgcgaccggcctcgcagcgctcctgttcggccggccgttcctaacgagcacgttcggctatttcaacctgccagtgttcggcgaagtggaactggcctccgcaatggcctttgacattggcgtgttcttcgccgtggtcggcacctgcctgctgtcgcttgcgacattatctcgcgtggaagaacgcgcagagcaggcatccaaccagatggaggcccgcaatccatgagcatggaatttctcgtcgctacaggaatcggtgcgctcactgccgtcggtctctacctgatcctactgcggcgcacgtttccggtggtaatcggactgtcatttctctcctacgcggtaaatgtattcctgttcgcaatgggccggcttacgatcgacctgcccccgattgtcagccggtccgctgccggatacactgacccgctgccgcaggcactcgtcctcaccgcgatcgtcatcactttcgggatgacggcattgatcgtggtgttatcgctacgggcctttcttgagacgggcactgacgacgtcgctctgcatgtccggcgcgacgaggagtcgtgcggcataccccgcgacgagcgtttccgatgacagatgcatggctaattgttcctgtcgcggtgccggcaatgaccgcggcgatgctggtgctggccatgcgccacagtctggccggacagcggattttgtcagcggcggcaaccgcatgtcagctcgctgtcgcgatcgggctctacgtcggcgccagcgacggcgaaccacgaacatatctgcttgggaattggcctgcgccgtttggaatcgtgctggtgctggaccggctggcggccaccatgctgctgctggccgggctgcttgccgtcggcgtggtcttggcagcgatcggcgagtgggacaagcgcggacggcacttccatgctctgttccagtttcaattgctgggcgttaatggcgcctttctcacgggcgacctgttcaatctgtttgtattcttcgaggtgcttctgatcgcctcctacgggctcatgctgcatggcggcggcgcccgtcgcctgaaagccggattccactacgtcgcaatcaacctgatcggctcgaccgtcttcctgctcgcggtcgggacgatctatgctgtcactggcacgctcaacatggcggacctcgccgtgaaggtacctcaagtcgcgaccgccgatcaggcgctgctcgcagtcggggggcttctgctgctcaccgtgttcgcaatcaagtccgctatggtcccgctgcattggtggctgccgccgacgtacggatcgacgtcgccgcctgccgccgcattgttcgcaataatgaccaaggtgggggcctattcgattatccgtgtctatacgctgatcttcggttccggtgcaggcccgctgtcggacctcgcaacgccctggattctgccggccgggatgctgacgctcgtcatcgggacaattggggtgctggcaagccgccgcctgcttgatcttgcctgccattcgctgatcgcctcgatgggaacgttgctcattgccatcgggctggccagcgccgccggacttgccgctgcgctctattacgcggtgcagagcaccatcgccagcgccgcgctgtttctgctcgccggccttctcgctcccgggagaggcggccgcgcaaagttcgggtggtatcagcagcatgccgaattgttcgcaggattctacttccttctcgccatcgcgacggtgggcatgccgccgctcgccgggtttatcggcaagctcctgatcctcgaggccggacgcgccgcttcccatgccacgaccatctggcctgcggtcctgatcacgagcctcctgctgatcgtcggtttcgcacgcagcggcattcagatcttctggaaccggatcgagctaccgcaggtgtcggcggtgcgacctgtgccgatgctgccgacattcgtgattgccggcatgattgcgacagtggcggccctgggttttttcgctggtccggtgatggacgacatgaccgccaccgccgaacaattgctctcgccgcagcgctacatcgcgacggtgctgcagccgcgcgaaacctcgagcctcacgggagaataggccgatgcgcgcattgctgcctcatcccgtgcttgtcgtgatcctcgctctggtttggggcctgctgatcaacgacctctcatggggcgctatcctgttcggattgctgctcggggtggtgatcgcctggctgaccagcccctactggccggggcggtcgaagatccgaaacccgctgccgatcccggaatattttgccatcgtgctttgggacatcttcgtctccaatgtgcaggtcgcctatcttgttctattccgtcgcggagcaagcctgaagtcgcaattcgtcacggtgcccctctctctcgaaagcccggaggcgatcgccaccctggcgggcacgatcactatgaccccggggacgttgagtgccgatctgagcgccgatggacgatcgctgctggtgcattgccttgatataaccgaccccgccgccaccgtggccactatcaagtcccgttacgagcggcgcctgatgaggatattcgcatgatcgctgccagctgcgcctttgccatcatcgcgatcgcggcatccatcctgttgaacgtctaccgcctgattatagggccggacgtgaccgaccgcatccttgcactcgatacgatggtgatcaatgcgatcggcctcatcgtcgtggccgggatcgtgttcggaaccgccatgtacttcgaggcggccttgttgttcgctatggtcgggttcgtctcaaccgtcgcgttttgcaagttcctgctgcgcggcaatgtgatcgagtgatgaccatggcggcatttatcgaaatggcgagcgccgctttcatcgtgattggcggcgcgttcctgttcgtcggatcggtcgggcttgccaagctgccggatacgatgcggcgcctgcatggcccaaccaaggcgacgacgctcgggattggctccttgctgatcgcgtccatgctctatttcttggtgcgccatcaggcagtcggcatccacgaaatcctgatcacgctgttcctgttcctgaccgcgccggtgagcgcccagatgatcgcgaaggctcatattttccgaagtcaggagctgcagcggaccctgcctctcgatgcaggcggctccggatgggcgacactggccggccaagctaactcgcccaaggcttccgcacctagcgctcacccggtgtgcgcgagcaatccgccccgctcacagtccgactgattcgaacaaatgccgcattctgcctttgggcaccgaaagctgccagtgccgcacatcgggctaacctagcttcgaggatctctgccggtttcatcggaagtacggcaacgggtctgattgctgccttccggctcaagttgcccccccgtcatcttcttgagctctcgctccagggcgcgcttgaacctgagctcctgacgctccacaagcaagtaagcgcccatgaacgtcacggcaacggagatggcaagtgaggtgccgctggatgccgtaaaccgagcaatgaagagccaaactgctgcacctgttagagctcctacaaaggacgcgggaagtatcggccgtccaacctcctgcagggcggcctgcaacgctttcatgcggcagttgcggtcgatcggctgagaatactggcgcattgacgaccacctttgagctcagaaccgcggctccaaacggagcccgcgaccacagcgttgggccggcgaacatttccatgctcgattctgccacattggggagaccggacaatcccacgaatgttttggcatacgagctggatgtacggtcgcgtaccaactttcaagggcggacctttgccgatccacagcaccatcatcgcggaacccgccacgaacgattgcctccaatggcgagagtcgtcagctgggctgatgcgtgacgttatcgatcttgccagcgctgaaatgctcctaggcacatccaatcgccgcaggtaagtatctcttcggttatggcgcacctcctcttcgtgcggcagcgtaccagttaaattgaagttcgcacgttcggctccgattgcctggcttgcgacggggttgctttcatgagcagatgggatgcgatccaaacaacaagagacgcacgatcgccgagagggaggccggcctttcaacgagggccggccaactgttttggctggcagtgaaatgtcccaggtccaggccgagcctggactagcgtgaacgcaaggctaatgaacctgaaaactgcgggatctcgcaccttgcgcaaaggctcagttcgttgcatgcgcgacttcgtcatggctcaggtcgtcttaccgcgttcaagaagcaatcgacggtgcttctagctgtcgctggtctcgcatagcatctcaggcagtggaaacgacgtgcgaggtgccggatccgttctgaggagccgcgcgagggacgccggtgagattcaagaagacctgagagtcgctccttgcaggtcttccgacatctgctgcgtcggcaaaggtcaagagaagccggtaaacgaaatggcgatccagccgcaccagatcgtcagaaccacaaagatcgtggcgccaacgacgacgtaggatggatccactttcctcacttgatcactcatctgcgcgaccaccgacaggtgaaactccaacgctcgttcggtgttccgaacctatggcggaccggacaaggctttaccgagtggttcctggacggcggagctcgtcgactaagtcggtaggacgagtcaacacctcgcatattcgcagtcgatgcggccgaataagctcctgctgccgaggagtggatgtgcgagcgactgatcgaacgtcgcgttgcccggattcccgatcgatgttctggcacgggatcttggatgaagcttgcagttacctgaaacagcttggcagtctgatgatcctgccggcagtcacggctgcgtcaccttgcttcgaaggtggtcattcgcgctccattcccgtcgaggcactccgagagcgaggcggcagaatctgacgaccgagactccgccggcgcgccgtttggcacggtagcggacaatgttcggagcgtcgcgcagaactcctgacctcgcatctggttgtagtcgagcaatcgactttagcgcagggagtaccacaatgcacccaatgaagaccttcgtcacagctctcatgtttggtgcgttcgccatctccgcgtgccctgcgcaagctgatccgaaagttccgccggctcagccgacacaatcccaggagttcgcgagcacagtctacgatggataccgtgcctcccgattgctcgggagcgctgtgttttcgttgaagggcgagtatctaggagcagttcggaacgtgatcgtggcggaggaaggcaagatcgtttctttgttggtcgagggcctcagaaccaaagaagagccggaattcatgtcacgaattccattcgagcgcgtactgcgtccgcttcacgaaggcgctatcgtggcggatttctctgacctcagatcgcgggaatacggtctgttctttgatcccgatcaagggcgggaccagtcgcatgagttctcgatctcgaaggtcatcggcgattacgcgcgcttgcaagcggggcagggctatggctacgtatccgatcttgtcttcgatcgaaccggcaagttagcggccgtcgtgatctcgcgggaagcgtctgtcggcggagggacatatgcgttcccttacccgggccaattaggaaggtggagtccgaagctgagctattacggccttccctacgtcactgcggaacaggcgagcagagcagggctgcggctggacatgaaggaatttcagcagtcgtaaatgaccgtgagacggagagtctcgcttggttggcttggagtcggactgcagttgcggagtgggcgcacgggccgttgtgtccgacgtctgcatcgcgctcacttggctgtcctgtcacctccgaagccaagcttgccttcgatcgcactcttgtgccgctgcgcttttcgatgggccgttcgtcgccagctgcactcaatccagcgcgctgaaccacgcggctggcatcacgtcgctgggctccacggccgcatctcctcatttgtcgcatgcgccactgccgcattgctttggcaagaacaacagacgcgtcgttccttcagcggctttgctgccctgcgagcgtgctgagcgcgcctggagtaaggctgagaggtcgtcgctgcttcattcaattatgcaaagagccactacagcgggagattagttggaagatcagcgggatgactctgtccgtgatatcgagcgcacccttcgggtgagcgcaatcgctttgttcctcgcagcttctgtgtggctgcttcgcgacctcctcttgctctcattcagcgccatcgtcatcgcttgcgtcctgcgagggacaagcgatgccgtccggcggggaacacggctgggccccgtcgttgctttgcgtgatcctcaccatcggcctcacgctcggtgcgatgctgtggtggcgcggcagcgcttttctggaagagggcaacgagatcggccagcagctgagaacgcaactccagcgagtctggcgagaactggaaggcagctcatggggctcagtgctggcccagcagttgcagattgcgggaaggtccctgcgctcgggtctgacgggctatgtcccgggtgttgtcggctctgtcctcggcatcggcggcagcctcatcgtgacgggcgcgacggcgatatttcctcgccgcatcgccgcaactgtatcttcgcggggcgctgcgtcttcttccgatgacttggcggtctcgtggccgggaagttgccgcagagctcggcgccacgctcaggctctggtttctcgggcaattcatagatatggcgattgtcgggctgccgcttggctgggcatcttcctgatcggcttaccactggcgatgtcccttgccctgctggcgggatactcaattttgtcccttatgtgggcgcgcttgccggcgcggttccagcaattctcgttgccatggctcagtctcctgttcttgcggcctgggtcgctcttctattcctttcggttcaactgctggagggaaacgtgatcgcgccctggattcaaaagcggacgatcgcgctgccgccggcactcacgatgctttctcagacggttctcgggattctgtttggcctgatcggcctgatcgttgcgactccatttattgcggtccttcttgttgcggtgcgtatgatctacgtcgaatggttcttggagagaaagagcggcagcgactgtggtcgaaaggttgcggtctgcggtgccaaataaagtctgtacactgccgtacagcttgtaccccgacgttccctgaccctggaaaccaaggtagcaggcttcagttgaccgcactctgcagtgacaggagccagacatgcgtcaactcacactcgctctttctctgacgggcctgatagctatttcgcctgtcggcagcattcaggctgcacccctgacatcgctctcggcggcggcgaattctgcggaccatacgccgttcgtgcgtgacgatctcacgcgggttcactggcgtggcggttggggcgtcggcgccggattcgtggcgggcgcattgatcggctcagcgattgccactcctcactattatgcgggctataggccgctctacaggtaccgctatccatacggctatggtggttactatcccgcgtacgcctacacgccttattggggtggctacggctggggaccgccacgctactacacctggggcccgcgcccctggcgctacagccacggctggtctgcgcccaggccgtggggctacgcagtccggcgtgctcccccatggagacacagctacggctgggcgccacgacatcaccggaatcatcacggggtgattcgagcgcgccatcggtggtgatgaaccgcctttaggaagtgcccggcgcgatcgagcgtagccgcgccgggcaggcgagagcttctagctgagaaactggtccatggttgaactggccccagcttgggagacgctagtcgcacgatggcggccgtcgtggccttgtacatcgcgcttctccttgttcgaacattgggccagcgcgccttggcaaatagaacgccttcggcctcgtagcgacggtcgcactcggctctgcgatagcaacgggaatcctgtcgaaccgcgtttcgattctgcagagcactgcggcggccgctgcgcttctcggcacgcagttgctattcgctgccatttacgttcactcgcctggtctccggatgttttcgacccgtcccctcagcttatcgtccagcgaggcaagttcattggagcgaagctgaggaggcaccggatcgcggaacaggatgtctgcgccgcggctcgctcgcgcggaaccggccgcgttgaagatatgagtgccgaagcgtcgacgtgaacggacttcgtaacgctgagagttccgttcgattgagtacgacggcatcctggttgacattcgagatcggtgatcggagagccgcggccgcagcgccgggggacgaaccagaaccatgaatgacgcagctgtagatggttaccgggcacccctgatcgctgtccgtttcgcaagagtagaaaccattcttgcgcacgccaattggagaggcggggcgggtaaggatggagaattcaatgcaagctcaagcaatgatcagcacgcatccgcaggttcgcggcaatacaaacgacgccctcattcgctgcatcgaggagtgctactcctgtgcgcagacatgcgcgtcgtgcgccgacgcgtgtctcgcggaagacaatgtaaaatccctgacccaatgcatccgactgaatatggactgcgcagacatctgcaacatcaccgggaggatcgcgacccgccgaaccgggtccgacgaggagatgatccgaagaatgctcgatgcctgtgcagcggcgtgccggctctgcggcgaggaatgtgaaaaacacgctgagatgcatgaacattgcaggatctgcgccgacgcgtgtcgccggtgcatgagcgcctgcgaaaaggcgcggcccagcctggcacattagttgagcctcgggttcaccatcaacttcatcgtgcggtgatagcgacccgggccggcatcccgtcattgccgacgtgcgatttcaacatttccgctgccgccgaacttggcggtggcggccgcggcaatgctgtccagggttgctcttggcccaaacacctgcggaacctttgtccggttgaatcggcaccggttcatcgggctcgtttgacggtgcgccttgtaacccagcccagggtcgagccttggacaatgatgctgaacaaaacgaccgcataggtcgaggtgagaatagcgactttcgccgggctatctggcaccgatagggcaagtgcaacagaaatcccgccacgaacgccggcccaggtcaaaaagggcgcgttgcgcatcgagagaagccgcgtccacccgaacagaaaaggctgcactgcaaccgaaacgaagcgagcgaaaagaacaattggcacggtcgatgccgcaagaccgaagctgcgaagatcgaaacgtagaaccagtgtctccagcccaatcagcaaaaacaggactgaattgaggatctcgtcgataagggtccagagtgcgaaaagataactctgtgtctgctcgctcatcgcatatcgcggtcctcgatccccgatgaggaggcctgccgccaccatggacagcggcccgctgacgtgcaagtggagcgcaattgcgtaggttccggtgacaagagcgagggagatcagtacttcgatcgcgtagtcatcaatgagccgcatcgcgcgatacgcgagatagcccgtcagcaagcccagcacgatccctccgccagcttcgcggatgagcaactctgcgacctccgcgaccgaaacgtgcgctccttcctcggaactcgcaaactgaagcaagatcgtgaacaggacgaggccgacgccgtcgttgaacagtgcttcgccctcggtttcgatcttcagttcgctcggcacgttagtgttgcgaagtgtgctcagaacggcgacgggatctgtcgggctgatcaaggcgccgaagacgagggcccagggcagcgacactggtattcccatgagactgcagatgcaccaaaacaggaaaccaacggtcgccgttgaaatcgaagtgccgaacacggccaaaatgaacaccggaactgcgcggctcctaagggtcgccaaatccacatgcaatgcgccggcgaacagtagaaacgcgagcatcccattcaccacgatctctgcgaaatcgatctggcggagaccctctgaaagctgtttgagaagatgaacggcgggaattgccgcatccaggcctatgagaaacagcgacgtcgtgacgctcatcaccaatagtcccacgctgcgggacaaaggcaggaatttgtggttgagccagccaaataccgccgaaagcgtaagtagaacggccgcaatgtccatgagcgaaagcaccgccgaactccactttcagggctggacgattgaagcagccgcgtacatcaaggccacagccgctatggaatgaagtacagaaggtaacggctccggcggcggttcggcaatttggaacaggcgctcgcccatccaggcgatgtgtaacatttgacaattgtcttggcagcatcttgccccggctcccgcatgggcagacgaccgttgcctgatcagacattgagcgtctgcggccgagatcctggccacaatccgcgttccattgaggagatgaaaaattccagatggggcgaggtcgcgattgcagtccgatcaatgcggccccttgcagagacgacgaacctccgcatgaattcaaacgggacggacgtcgaattactccacgggccgcttggcgttagtcgcttgaggtttaccgccgatcgtacctccagatgatcggcgggccgcgacctccagcgccgcgaggccgaaagcggaaagcgccgtgacgaagacgagtagtagcaggctgccgtccattcagatgaccattgctgatctgcgctcctgcagagagcttaagcctggatactgtgccgtgccggtgtagccagcacgatgtaattgtcgatcaagcaattgcatacgcggataacagcaagcaggcgacgtatacgcaggcgaggaccatccccgtggtccgggctgcgcgggcatctgctcgcgaacctgcttttgctctgagccggggcagcttctgatactgcgcaaaaagttgtcggccggcgcgtcctcgaaagagtacgtttctcattatagtctccacgaccgatcgacccgctaaacgtgcgcttaccaagaacaaaatcggcccttgtgacgagcgagcctgttcgaccagtgcacgaaggatacagtagtgcgcggcggctcgccggacagtcgggacagcagttgaggtctgtcgggataatcctgacacacaacatcctggcgggcgcgaagtggatcgtggctcagaccgcggcacccgtccctgcttggcccagccagcccaccgcgacgccgtagcgaacgatgtcggcgcgcgtgaacaggccaagcttttccaaggctcttgccttgtaggtctcaacggtcttgatgctgatgttcagctggccggcaatttccttgttgctgaatccttgggcgatgaaacgcagcacttcgctctcccgtggcgtgagttcactgcctgtcgtctcggcagacggatgagcgccggcagaggacggaagtgccttctccgcgattgcgggatccagatacaagcctccgctggcgatggctcttaccgcccgctcgagctcatctgccgcggagcgcttgagcagatagccgcgggctccggcctggagcatgggctggacgtaggcgtggtcctcgtgaacggtcaacgccagcagacgaacctgaggcagctgcgtcgcgacagtgcgagccacctcgaggccgctgatgcctggaagtgaaatgtccacgatcgcgatgtccggcgtgacctcgcgaatgatatcgagcgctgtctgtccatccgttgcttctccgacgatctcgatgtcgtccaccgcctgcagcagcgccttcatcccggccagaacgagcggatgatcgtcagttaacgtgatccggatcgggcacatagcccatctcctctgctggcacgggaattctcatgaagagggaagtgccgcggcccggttcagactcgatcgccaaggatccgcccagaatcgtaaggcgctcttcgatgaccgacaggccgagctttgagtggcgggcatcactccgcgagaagtcctgaaggtcaaatccgtttccgtcgtcttcgacaacgatccgcagctctgccgtgcgccggtcgaccaccacgctgacgtttcgcgcctttgcgtgcttgaccacgttgtttacagcttcctggactgcgcggtagaccgcgatttcgacatcctggccgagacgttcccttctgcccaagggctgaagatcgacgctgatcccgaaccgccgctggatctcgacacagaaggcttccagcgccttgtaaagcccgagatcatcgagagcagtcggccgaagatcggaggcgacttgatggatgtcgcggccgattcctctggccaatccctggagccagttgagcttctccagccctaccttgcgcttgtgacttggcccgagaaactgttccaagttcttgagtcccagaaggagccctgtgatcgtttggccgatttgatcgtgaagctctcgcgcgatgcgacggcgttcattttcctctgcttcggaaagacgcctaagtagccgctgccgttccagctcggcccgtttcgtttcgtcgatgtccagaatgacaccatagacgacatctgggttcttctggtccagccgggagagccgaccactggcgcgcaaccatcgactgtgcggaggagcggtccggaagtctgcaatcgcgacgcttcctgaacgacatcttataagtgaagactcaaactgctgccggtcggcgggttcgatgcagttcagcatccgatcgataggcaagctagtgtcgccgtcaggggagccgccaatctgcaacatctctcgcgcacgaggcgacacgagcgcttccctggttgcgaagttccagctgaatacgcctaggtctgcggcatcaatcgtaagcctgcgctgctcttcactggcgctgagcgccaaggccgcctgagcctcctgctcgcgcctgcgaagagagatgtcgcggatcgtgtaccaggccaaggtaagtgccaggacgaagctcagcactccgcccccggctaggaaaatggctgatcgctgaactggaccattgagctcttgtgtcggtattccgaaatggaccgaccaaccactcgtgccgggtatgagcttgtagatcgagtcgacctgatcgccggtggatgtcgtcttgacatagcttccttccggcgccgaggcgatcgcctgacgcacggtagcgctggcggactgaccgagttccgattgctcgccgaacgtgcgagcgacaatgttgccctttgcatcaacgacaaagccatcccacccggtcggagctcccgcgcttttcaagatctggctcatcgcgtccgggacgagggcgatcgtaagaacaaacttcaattgcccatcgcgttcgacaggcgctcttaccgcaacgacgcgtttgcccgtgaccggaccgggtggtccgataccgccgatcgccggccggcgcgtcttcaggatctgctcgaaattctcccggtcggctatcacccgcattccgtctgccagcggacgggtgacgtccagcacctgattgcccttgggatcaacaagctgaatcgtttcccaaagcgtcctggcctcgttcacccgcgtcgcctctcgatagaatgcatcgagatccggcttgtccagcgtagcggaggccgcgatcgtctccgcgatctcgagctgcaggctgatctcagaggcgagcctgctcactacgctgtcgagggtttcgaccgctgccgcttgtgaatgattgcgttgctgctgggcattcagaaagacgacccagccggcaaacagggccagaggcatcgctgctgcgatgaagacaaggaccagcgggcgccgcgctgcgctccgtgtagtcgagcttctcgcttccctgtgagcaggagccgaatgtgacgacgaaacgcccacgtccacagtttccttcgtgttctggtcgtcagggttttcctgacagcgcggacggtcaccctgactcccgagatcgcccaatctgccccatgttacagacaatcgtagttgcggtccagaattggccttgacatggaacatcaatcaatgcggctgcttgctgagagcgatgcgctcgacctgaaacggccgagctatgagagcaaatccgtcgagctcagctgcaacgaactgatctcacgtttatcggagcgctcgcgccagtccttgctcgaaaggtgcgagagggtgccgctaagcaagcgtcaggtgctctatgaccgaggcattcctcttcgttttgcctattttatcgagagcggcggatgttcggtcacgacgcgcgccggcgattgcctgccggtggagattcacacgctcggaaggaaagactttgttggagtgccgttgattctcggcatgcgcgtgtcgccacatcggtgcagcgtgcaggtccgaggccacgcgctgcgcattcactgcgacgagttgatcgcgttgataaagcgagatgccgagctcgaaaggctgctcttgggatacgtgcaggcgatcctgattcacagctcccagctgtccgcttgcaactcccggcacacattgcaccagcgccttgcccgatggctggtggtagccagcgacaggctcggatcgcgggaagtgccctttacgcacagctacattgcgaacgcactcgcggtccggcgcgcaggagttaccgtagctttgggagagatggtgcgagagggagtgatcagttgccgaagggcggggatcgtcgttgtggatgcaacgaggttgagatcgatgtcctgtgattgtcacagcgtcatcctgtcggcgcacgagcgcacttgtacggtatcgcccgttcgcatggcttattcctagcccgctgatgcgccctggctgaggcgcgcgaacggcgaacggattcgagggatgctgggaagaggagcgccaaatggatggaggccagggtgagcaaggtgagaacggatgctgaggtcttggtggccgccgtagaggaagctcaacgcctgcttgccgcctatgagaatccccactgcaaatgctctagggatgacgtcatagccatggtcgaattcatcttgtgtgatccgtcagttacgcgggcgatgcttcgtcaaaagatgcgcacgcgcctcatgttggttggttagatgaaaaacgaggggttcacttccgagctttcgaacttctaggcgcgcggggagttggtgacgatccatcaaccttaggagagcactacatgaaaaagcttctgtgcgccgtttcgacagcgatgcttctgaccgctccggttgctgcgcaatcacctcaaaatagcgcgagtccggctgcccccaacctgcaaccgagcacggcctcgcccgcctctatgcaaaagcaaggcgaatggcgggcatcgaagcttgttggcgttgccgtctacaacaacaacaacgagaagatcggcgacatcaacgatatcatactggacccggccggccgagtcgccaatgtagtgatcggcgtaggcggattccttggaatgggtgaacgcaacgtcgcggtcggtttcgatcaactcaagtttgtaagggagccggtgaagacagcgtccaacgatgcctctgggaaagcaggtaatgccaatccaggaagcacgacaggaagcacgacgggaagcgcatcgacaccgtcgagccgaaatgacaactggtacccggatcacgtggtgctgaacacaaacaaggatcagctgaagcaaatgccagaattcaagtactgagccggtctcgagcagcaccccgaagctgctccagcctcacgaggcggcgtcatgcggatgacgccgccttcaagttgcctgcgtcattcatcccttgcgcgcctccggcggacgatcttgattatgtgctttctgaatagcccggcttgcgcagtgctggctgagatcgaagatgtctgacgaagagttgccgcatgatgtaaaggaactggtccgccgctacatccattcggtggcgcagctcgaggccctcctgtttttccatgagcggcccggtgagcgctgggacgtcgaatcgctgtccaagcgtctttacgcgggcaaggtagagatggccgacgccctggcgtcgcttaggcgcgatggcttcctggagggtggcccggcactgtatgaattcgctccacgagccgaattgcgggctgtcgttgaggccctccgcaaagcatattcgcggcacctcattccgatcacttacatcatccacaacaagccgcgccggattcaggcattctccgatgccttcaggatccgaaaggattagacatggcggcggtcatctacagcctttgcgcaataacgagcggcttctgtgcctggctgctggttcgagcgtactctgccagcaggtcaaggctgctgttatggagcgcggtctgcttcgcagggcttgcgctggagaacggcgctctgtggatagacaagatcgtctttcctcaagacgatctttccgcactacgcgtctcgatcggcttgttcgccatgacggtcctgctgcttggaatgatctgggaggccgagtaatggaccatctggctcccgtccttgaaggtgcgacggcattcgcatcactcatggcaagcatctatttcctgaagttctggcgcagaacgaccgatgtttttttcctgttctttgccgcagcattcgcaatcgatgccgttgcgcgcttcgtgctggcggtcgtgcaagcgacgaatgcaagtgagcctgtctacttcattccgcgcctgatcacattcagcctgatcgcgctttccattgctggaaagaacgcgatgcctaacaagccgaagtgaagccgtgttctagagacgcggatcgtacgcggcttggtgcggtaacgtacaactggcttctacgcgcgtttcttgcgaccttttgcccgcgctcgtgcagccgattctcggaacgcagcgcatgcctcctcgttggcacctcgtgcaaacagaagaggatatttcccatggcacccatgaagcccatgatcgtcgtgacggcactgatgtcagtcgcatgcactcctgcgcttgccgctccgatctcgccaacgtccatcaagcaggacacccatgtccagcaggtgcagtatcgaagctggcatggccacagaggtcatcgacacggtggatggcacagggatcgctatggctccggggccgcagcgctgggtgggctggctgctggcgcgatcatcggaggcgcgatcgccaacagccgggcacaggcggatgcgaatgcatactgctcgcagcgatatcggtcgtatgaccccgcttcaggaacatatctcggctacgacggaatgcggcatccgtgtccctgacgacgaccggcccccggtcgggtgatccccgaggggccgctggccgctgcgcgctgctctgccaagtctttgcgtcttcgcctccggcacatccgcaaggcatttcgtggcagggttggcggcagcgctgccgcgcatgaaatccggtacacttgcgtaccaaacatggccgactcggcccgctgccgcttgctcacggggctcctgaaaacgatagtgtccgcgggggctctcatgatcagaaaaccgaatcgaacggcactcatcgtggttccgcaagcatattgcttgtcttgtgaagagaagacgccgcatcggcatgaacgattggcaatccggggagcgcaggtggcacgcacgacttgcttggcctgcaacaatgagcgcggcggcgttacgccggagaggctgccgatcagtcccagctgacggcagtcactcacgggtgccaacatgtactaccgcaatgccattggcccagttctgttcggagcgtgagctgcgctgcggcttcaccattctctcgttcggatcaccatggtagcgcctgagtgatgccgatatcatacaagcagttgctccgctatggcatgttcggtttggcggtggcggcactcgttgcgtttggcatctcaccgttcacgggagggatcgtacagcaatggtcgcgaagcgatgttgagaccaggtccaagttggttttcaatgccatccagccgttgctcagccttgatgtggaagaacgtgcgtgggaccggctctccgaccttttcaagagagtagcactcgaccagaagatcctcgccgtcggattttgcgatacggacggatcgttgatcgctccgacacccgaaatgccggcggacttctcgtgcgaaaaactcgccagatctgaaagcgacagcttcgcaagcataacaagcggcggacggcgggttcttgtagctgcctttcccgtcgcaagcagccgtgggcggtcgtacctcgttatactgaccgacctcagctttgcagctgccagatcgagccaagtgctggcgtatctcctcgcggcgcttgccggagtcgtactggtgttgaccgtcggcaccatcatccttgccgtgatcatgatgaggggatggatgaatgccttgcggcgggcggtcgacgaggtgcgtcgcggtgctcagagggccgagcccaagccaagtggttcgtcaatcgatcgcgagattcacaagctcctgcgtgacgccgaacacattgcggttacaagtcaaattgagtggacgccacaatcgttgcaacaggtgctgcatggggcgctgcctggggccgaagtgatcgtcgtagccaatcgggagccatacatccacaacgcttcggaaggagggactgtggtgcagagaccggcgagcggcttggtctcggcgctggagccgatcatccgcgcctgcggcggcacgtggattgcgcatggcagcggcagcgcggatcgtgagacggtcgatgaacacgacagaattcgtgtgcccgaggcagctccggcctacacgcttcggcggatctggatctccgaagaggaacaggacgggtattattacggcttcgccaacgaagggctgtggccgctgtgccacattgttttcgtgcgtcccacgttcaggctcggtgattggcgactgtaccggcagatcaaccagcgctttgccgatgcagtcgttgccgaagcacgcaccgaggatcccgtcgtgctggtccaggactatcatttcgcgcttgtcccgaagatgatccgtgagcgcctgccgaaggcaacgatcataaccttctggcatattccatggccgaatgcggagactttcagcatctgcccatggaaggaggagatcatcgaaggaatactcggcagcacgatcgtgggctttcacacccagtttcactgcaacaacttcatcgaaggcgtcgaccgctttctggaaagcaggatcgaccgcgaagtgcaggcggtcagtcttggggggcatgagaccaggatacgcgcctatccaatttcgatcgaatggccgccgagggaactggagaagctgccggccgctgcgcaatgccgatccgacatcatcgcgcaattcggtctggcggaggggacgcggctgatcgtcggcgtcgaacgcttcgactacaccaaaggcattctcgaccgcatgcgggccgtcgatgcgctcctgtcgcgagatccgacctggacggatcggctcgcattcatccagatcgcggctccgacccgcaacaagctgagctcatattcgagattgcaggcggaagcagaggacttggcttcggagataaacgaacgacacaaaggtcgccaacgtgtggtccatttgatcgttcagcactacgagccttcggacgtgttccggctgttcaaaggagcggatgtctgcgtcgtcagcagcctgcatgacggaatgaacctggtcgcaaaggagttcgtgagttcgcgagaggacggcgctggggtgcttgtcctgtcgagctttaccggagcttcgcgcgagctctccgaagcgctcattgtcaatccatatgatatcgaagaaatggcatcagcgatcgagcttgcactctcaatgccgctggaggaacaggccgagcgcatgaacctgatgcgacagcaggtgaaggagcacaacgtctatcgctgggcaggagcgatgctgctcgacgcttcgagaagtcgcacccgcgagcgggttctcggtatggccaccagagcccgctcgccctgaaccccacctgaaagcattccactcgaaagaagggtggtcgagaaagtcagtaccaaagcgtacggtccaatctttccaggacgagcggatagtcgcaccctccagcttgggagcctttgctctctgagaaaggaaggcgtgcgtgaacatcctaatcggagctgttatgcttgcggccgcagccaccctgatcttcattgggcgtcccaatcgtgctggcgaacacccgaagttcttgcgcttcgaggccgcgttggttctgtatcctccaatcgttctgtcgttcactgcactcggcgccgtagcgttgatttcagggctgctatccagatagcacattcccgaattcggcttggggtgcgcgcaagcgaggcagccaatccccgaagggcccgggcctgctttgccgctacagtcgaattgttgccactgcctatcatcatcggccattcaaagcggcggaccgcgctggcgaaggcatgctcaagcagaaggcatgctcgagcacatgtctgttggagccggcaaagcgggagtgcaccggcgcaccatgtttgcgccgcgtctcacttgcttggggcaaggtcgagctgatcgctccttaagcgcatcaccctaatccggggatcggccttggcgcgctgattcggccaacctgactctcgggccagaaggcttcctgtgcaccgggtctatcgctgcccaggacgatgaactccgcgcagcagggagaggagccgaggaacgtaccgacagcgcccacgttgccgaagaaattcgtgtgatcgtgcggccctgttctggcgccagcgcatcgtgattcttgatggcggtgctgagccttagcaagcgctctcccggcacaaaggaggccatttatggtgcttcgaaacgtcattcttatgacgctggctgttgcgcttctcgctatgggcgtcgccttgatggtcggtggtctctggctgatttaccttggcggatcctggtactatgccctgtctggcctcgcgtttctggcgacctccatcctcctgtttcgccgagacgaacgggcattgtgggtcttctgcgtcctgaccgccggcaccctgatctggtcgctgtgggaggtcggccttgactggtggccgctggcagcgcgcggcagcgtcatcttcatcgtgggtgcaatcctgttgaccccctggattgccggtagcttggcccatgggggatctgcatcatctcgacttcgcgggggatcggcatggcatggcggcggactggcgctgtccatcgcgctatgcgctgcgatcctggttgctgtcgcgtcctggacgactgatccacatcgcttggcggcaaagacgacgtctgtctccaaggcaacgccggagccggcggctgtagaagcgcaggatctgccgccgggcgagtggcacgcctatgggcgcactggacttggccagcgttattcccccctcagtcagatcacgccgcaaaacgccgcgaaactcgaggtagcttggacctatcacactggcgacatgcgagggcgaccgggtgatcccgaggaaacgacgtttgaagtgacgccgctgaagattggcgatcgcctttatttctgcacgccacatcagtcggtcattgccttggaggcgaccaccggaagggagatctggcgctatgagccgaagatcctcgacaagcttgcccttcagcatttgacctgccgcgggctgtcctactatcccggcgcttccagcgcgaaccagactcccggcacggaagccgtcgataccgcagccggcccgcagactgatcctccggacgcggtcatcaacaagccggtacctgacatgccgattgccgtggcggacggcgtgccgaccaagagctgcacggcgaagctgttcatgcccaccgcggatggccgattgatcgcgctcgatccggaaagcggagcggtgtgccgcgactttggcaggggtaccggtcagatcaacctttgggccaacatgccgaatgttcggccgggtgcctactattccacctcgccggtggttgtcgcaggcggcctggtgatcgtaggcggtacggtgcttgataatgtctcgaccaaggagcaatccggtgtgatccgtggctttgacgtccggactggcgatctggtctggaattgggattccggtaaccccgaccagacggcgccgctgcccccaggtcagacctacacggccaattcgcccaacagctggtctatcatgagcgtggatgaagcgctcggactggtgtacgtgccgctcggcaatcagcctcccgatcaatggggtggcaacagaagccaaagcgtcgagcggttctcatcgtcggttgtcgctctcgaagtctccacgggcaaggtgcgctgggcgttccaaactgtgcatcatgacctctgggattacgacgtcccctctcagcccagtctgattgacctgaccatcaagggacagaccgttccggccttggtccagccgaccaagcagggtgaaatcttcgtgctggatcgacgaaacggaagcccggtcctcccggtgacggagacgcgcgctccgggaggtgcggccaagggagatcacaccgcgccgacgcagccggtgtccgcactgtcattcaatccgagaccgctcaacggcgccagcatgtggggggcgacgctgttcgatcagctcgcgtgccgtatccagtttcgccgcctgcgatacgatgggcgcttcacgcctccgtcaaccgatggatcgctcattcatcccggcaactttggcgtattcaattggggcggcattgccgtcgacccgcagcgacagattgcattcgtaacgcctgcctcgctcgcgttcgtgtctcaactcgtgccgcgtgcggacgatcggaccatgtatgtccagggcaacaacagacctgacaacagcctcccggcgctgaacgagaatttcggagcgccgttcgcagtgaagctgtcggccttcacttcaccgctcggattgccctgtcaggctccgccttggggctatgtgggcgctgcggacctcgccaccggaaatgtgctctggcagcacaagaacggtacggtcagagatctcatgccgctgccgattcctttcaagatgggagtgccaaacctcggagggcccatcctgaccgcgggaggcctcgcctttctctcaggcactctcgactactatctgcgcgcttacgacgtgaacacgggtgaacagatctgggagggccggctaccggctggagggcaagctacgccgatgacttacctcggtgccgatggacgtcagttcgtcctggcggtagcgggtgggcatggttcgctcggcaccaagacgggcgacgcggtgatcgcatacgctttgccgaaggagtgacgcttgtcatgtcctcctctggccgcggacgatccaagagtcggacgcgggctgagccatgcaattctcaaggccgccctcgccagggtcggagcgcagctcgccagattgaatcccgaagatcgcagcggcaccagatcggagctgacgttcgatgtatgatcagggtccggcgccgcggcacgagatgcgattgtttcgggcctatacgcaggtctgcgcgccgcccttcagcttcacggggatcgtgaggtagcgcaccccgttggcttcggccggcgggaatttgccggcgcggatattgacctgaatggaaggcagcagcagcctgggcgccgaaagcttggtgtcacgcgcctgccgcaaagccacgaattcgtcttccgaaacgccgtccctgacgtggacgttgttctcgcgctgctcgcgtaccgtggtctcccacgcgaacgtatcacggcctggggccttgtagtcgtgacacatgaacagccgcgtctccgacggcagcgccagcagccgcttgatcgaacggtagagcttgtgagcatcgccgccggggaaatcggcgcgcgcggtgccgtagtccggcatgaacagagtgtcgccgacgaatacggcatcctcgatcttgtaggagatgtccgccggcgtatgccccggcgtgtagagaacctcgacgtcgagttctccgatcttgaagcgctcgccgtcgcggaacagatgatcgaagtcgctgccgtcggtcttcaagtcggtggcgttgaagatcggtcgaaagatgcgctggacgtccttgatgtgctctccaataccgatcttcgcgccagtcctcgccttgatgaacggcgcgcccgagagatggtcggcatgagcgtgcgtctccagcacccattcgatggtgttgccggcatcttcagcagctttcagcatcgcctccacggatcgcgtatccacctcgcccgaactgtggtcatagtcgaacaccgggtcgatgatagcggcctttctcgtggcgggatcaccgaccaggtagctcaccgtgttggtcggctcgtcgaagaatgatcggatgatgggtcgtgacatgtctggaacctcctgatgtcatcgtccggttggtcttgacggatatattagcataaactaaataagcaatatctaaaataaaagagaaggcccgatggcgtcctcaacatttgatccggaaaccttcgagaagcaggccgtcgaggtcgccgccatcttgcgggcgctcgcgaacgagcgccggttgatgatcctatgcaggctggttgaatgcggcgaggacaacgtcggttccctggctcaagccgtgggcctgtcgcagtcggccctgtcccagcacctggcgaaaatgcgcgacgagggtctcgtcgcgttccggagggagagccagacgctctggtatcgcattgccgatccgcggatcgaacaactcttcgcaacgttctacaggctgttttgcgcgcctgtcagaactaggagcagataagccaacataggagccgataatgtcgctacccactatcaatcccgcacaagctcgcaatctcctggcgaaaggtgctatcctcatcgacatccgcgaggcgaatgagcatgcccgcgaaaggatcgtgggcgcccgaaacttgcctttgtccaagctcgacgaggccgatcttgcggcgcatcagggcaagcaggtcattttccactgcaagagcggcgctcgcacgcagatcaatgcgtcgcggctcgcgtcgaaactggacggaagctgcgaagccttcatcgtggaaggcgggatcgacgcctggcgcaaggcggggctgccggttgaaaacgaccgaaagtaatcgagcggcccaacgccgaacgcagaacggtgccgactgatcgccgcaatgatgcctgcctttggccgtctcgacgtcaagtgccctggaactgccggggctgccacgtgccgtcaggagctgcgtgacggcaaattgaggagctcacaatgctgtcgctgacccaaggcgcactcggcatcgcctccggttcgttggtcggcttctcgctggggctggtcggcggcgggggctctatcctggccgtcccgctcctgatctatctggtcggggtgagcgaccctcatattgcgattggtacgagcgccgtcgccgtcgcggccaacgcggctgccaacctggccaaccatgtccgtgccggaaacgtgaagtggcgctgcgccgccgtgttcgcggtcgcgggtgtggccggcgcctttctcggctccactctcggcaagatcatcgatggccagaagctgctcgcccttttcgccctgatcatgctggtcgtgggcgccctgatgctgagggggaactccggcgagggcgagccatcggtgaggctgagccgggagaatctgccgaagcttgttgccttcggcctcgccacgggagcgttgtccggcttcttcgggatcggcggcggcttcctgatcgtccccgccctgatcgccgccaccggcatgcccatattatatgcggtgggttcatctctcctggcggtcaccgcgttcgggctgacaactgcggcgaactacgccgtgtccggtcttgtggattggtctctcgccgggttgttcatcgtcggcggcgttctcggcgggcttctcggcgcccgctccgcaacctcccttgcgggtcgcaagggcgcgctgaatacggtctttgcggcgctcatatttgcggtcgcaatctacatgctggtccgcagccttggcctgatgtgacgaggcttgccccagcggttgctcctcggagccgtctggccgagaatccttccgagcatcggttccgcagacttgctgccgcggccattgctgcggtctgaccggcaagcttccatcaccccacaaagttggtccgacaagcgatcttccctgagattggatcttgtccctagccgtagggacagactttcgccgcggccggagcgacattgcgtcggcgaatagaatataagggaggacatcatgatcaggcgctgcctcgcagccttgagcgtttgcactgcaatgattctcgccatccccggcgcacacgccgatatcaaggtggggatcgtggtgtctgctaccgggccgggatcggcgctcggccagccgcagatgcggacggttgcggccctgcccaaggagatcggcggcgagaagatcgtctatatcgctctcgatgacgaatcggattcgaccaagggcatacagaacgcccggcgccttgtcattcaggacggcgtcgatgccatcatcggttcctcgctgacgcccgtgacgatgccgatgctcgatgtcgcccgggaagccaggacaccgatcatctcgctggccgcggcgaccgccatcgtccagccgatggacgagcggcgcaaatgggccttcaaggtcgttcccaacgacgacctgatggcgctcgcgattctcaagcacatcgccaagtccggggtgaaaaccctcggctacatcggcgtctccgacggctatggcgagggctattacaaggaagtgagcaggcttgctccgaccttcggcctgaccctgaccactcacgaagtctatgcgcgcgccgacaccagcgtgaccggccaggccctcaaggtcatcgcgacgaatccggacgcggtcttcattgcctcggcgggcactccggcagtgctgccgcagcaggcgctgcgcgagcgcggctattccggcaagatctaccagactcacggtgtggccaccgaggaattcatcaagctcggcggagccagcgtcgaaggcgccgtcttcaccggcgaggcgttcacgatcgccgatgacctgccggcggacgacccgttccgcaaggttcgggatcaattcgtgtccgcctacgaaaaggcgaacgggcagaagccgaacatcttcgcggcgcatctgtgggattcgatggcgctcctcaagacggcgataccgaacgccttgaagacggcgaaacccggcacggcagaatttcgcaccgcccttcgcgacgaactcgagcgcgtcaaggacgtatacctgaacaacggcctctccacgatgaccgcaaccgatcataacggctacgacgagcgctcggcgtttctgatcaaggtggaaggaggccgcttcaggctgatgaagtagccgccggcagcgggcggcttttcctttgcgcgaggcgtcgcgttcggcaatgaccgcgcgtttgcgcgaagctgccccttgccgcgcgcctagcagcaagcccttggccttgcgggaaacaggctcggggcaccttccacgtcgaggccggcgaggtcgaaccagcgggcaacgacgtgggcgccattgtcctcctgaagtcgatccgcttctgatcgtggaacgcggcatcgggaagctcgacctccgagatgaacggatcaatgcgttgatcttggtcaacgtggcggcggcgaaacggggcaagctcaacgaaaaggtgcagacgcggagattgcagtgcgtgcttgtctctttgggttgcctctcgcgatcgctgttctcggattctcgccggcgaacgcgggttgctggccgagcgataactttccgctcgtctgttggctcgataccaagggcgaggggtgttcggagcatcatgcgctaaccagcgccaaagcagtgatgtacccgcatccgaaccaatccatctatgagttcgagaccacccattggtggaccgggcctcccatcacggcctgtccgccgagcaagacgctcaagtttaccggcatttgggaccgcgagacgggcaaggcggaggaaaacgtgtccaccggctggtcgtcgtggtcgcgctacgtctattgcagcaacaatccatggaccggacaaggtccctcaacggtcccggtctgctcagggcctgccaacgacaagaatgtagggcagcccgtgacctcggcgatgctttcgcagagtcagcgagtgaatttgcttcaagttcaggagccactacacacgaagtgtttgcaggtcgaacctgacccgatggggtcggaatggcttacgggaaactcgatcgtccgggtcgtcgtttcgcaccatgaattccagaagatcgagtggcacgttttcttccaggagttctattcgttcgacggtttgaaggaagtccccgcgccgaagtcgaaggtcccgctgttctcgacgaaaaaatacaccgagcgccgcgtcgcgaccacgatgaggcagttctggctcaacaagcagggacgttggatgatcgtcgcggttccgaagccgacctcgcccgccgcccagctcgtggcaacgaccgtcaccaacgaatgcccgggcgcgcgattcaacatccagtgaaggcagatcggccataggggcccctcgaagtacgtgctgtgacatcgacagcaatgaaccagcatgcgagggcgcatctgcggcgacgcttcagccgtccctgctgctcaactccgcaacgccgttggttgagtgaagggcccgtctgcgcgacgatgtcgcagcagaaggtcgcggcacgccgccgcctctcgcctggcgccacagggaaagccgccggtactctgagctagatcaagctgccccgaactcgcgtgaatatgctcaggcagcatcagttcggagagtccaaatggcaatcagggacatcttgctcacgctcaccagctatcccgacccgaccccggtcgcggtgatcgaccgtgccgtatcgctggcctctctcctcggcgcccacatcgcgtcggtctcctgcgaagttcatgtgcaggtgcctggcagtttcctggcgggggccggcaatgtcggggcaatagtggccagcgaggcccacaagagccggaagaatgcccaggatctgctggcgaccttcgaatcgacggcacaaaaatccggtgttgcgcacgagctcgttctcgatcgttgtttgtcgtccgaggtgccgggcgttctggtggaatatgcgcggcttcgcgaccttgccattgtgccggtgccggaatcttacgatcaatggtatgctgaatcgatcatcttcggttcagggcggccgaccgtcgtgcttccggaagcgtcggcttccagggagttcgaactgaacagggttcttgtcgggtgggatttcagccgcgcggctgcgcgtgcaatatctgatgccattccgatcatggagaaagcgcgcgaggtctgcatcctcaccgtgaccaacgagaagacgatttcgagccgacgctcgtcgtccgaactcgccaagaacctgtcgaagcatggcatcgacgtcgtcgtggaggaggccgatgccgctggacgggcgatcggtagggttttcgccgagcaggtggcctcccgcagggcggatctccttgtcatgggggcttacggccattcccgtttccgggagttcgtattgggaggcgcgacccggagcatcctgacgaagccgccaattccggtgctgttgtcccactgatcaccggtcagataaggccccgaaggcggcgagcgggttatgcccatggacgcccaacagttcgaacaaggtaacaagagatccccggtgtttcacgccaggggtctttcgaagacctatcgaatgggagagatcgaggtgcatgcgctgcgcgacgtcgacctcgacatcttcgaaggcgagttcgtcgtgctcctaggcccgtccggatcgggcaagtcgaccctgctgaatatcctgggaggcctggacagtccgacttcgggcgaggctcattggcgggatcacaatctggtcggcgcaactgatgcggagttgacccggtatcgacgtgaacacgtgggcttcgtttttcagttctacaatctcattcccagcctgacggtgcttgagaacgtcgcgctggtgaccgagattgcggacaagccgcttgagccgcgggaggtgcttgcgctcgtcgggctcgaaaagcggaccgatcacttcccctcgcagctgtccggcggcgaacagcagcgcgtcgcggtcgcccgtgccatcgtcaagtcgccggatgtgcttttgtgcgacgagccgacgggcgcgctggactatgagaccggcaaggtagtgctggcggcgattgcgcgagccaatgagcgcctcggcaccacaacgatcatcatcacgcacaatgctgcaattgcgggcatggcggatcgcgtacttcggctcggaggcgggcggatcgtcggcgaggagcgcaatgcgcatcggctctcggcagacgaggtgcactggtgagcctgctcgatcgaaaactgctgcgtgacatcggcgcgatgcgagggcaggtgctgacgatcgcgctgctggtcggagccggcgtcgccgtcttcatcgggtcggtctccacctacgaatcgctcaacatggccgttgagcggttctacggggctgcgcggttcccgcagatcttcgtgacgctcaagcgggcgccgctgtcgattgtcccgcaactcgaatcgattgccggcgttgcgacggttgagccccgtatcgttcgtgaggtcatcgtcgattggccggctgcatcccagccggtgtcggcccggatcgtgtcgctcaaccatgcgggcgacgaaaggctcgcccgacttcacttgcgccgtggcacggcgcccgagccaggctctgcgagaactgcagcgattaacgaagcgttcgcggaagtcaacggagtgaatcccggcgacgacgtccgcgtcctgctcaacgggaaggtggaagctttccacgtctccggcatcgcgctttcgcccgaatatgtctatgccgtcaagccgggcctgccgattcccgacgatcggctctatgcgatcctttgggtcgaccgcagtgcggcggaagccgccttcgatatgaaggcagccttcaatgacgccgtcatttcgctggcgccgggcaccgatccgaagccggttatcgacgagctggaccgcttgcttgaacagtacggatcggtcggcgccgtccagcggcgggatcagccttctaaccgcttcctcgaggatgaactgaaccagcagaaggtgatgtcgaccacgatcccgttcatcttcttcggggttgcggcgttcctgctcaacagcgctctggggaggatcgtggcggtccaacgcgagcagattgctgcgttgaaggcgctgggttttccaacctcgacgctaactatgcactatctcaagctcatcctcgttatcgtgctgattggatctgcgcttggtgttggagccggctggagctttgggaaagcgatgattgcgagctatcaaagcttctttcgcttgcctgatctgccgtttcggctgacgccgtggtcgttggcgctcgggattgcgatcagcctggctgcggcatcgcttggcgtcctgactgcgctgcggcaggtcgtccggctggcgccggcggtcgccatgcggccggcggcgccgctgggctttcgccgctcgtggatcgagacacttctgccaggcaacgcgaccagatctcgcctcctgatgattttgcggaataccgccggacgtccatttcgttcgttgctgaccgtcgccggggtggcctttgccgtcccaatgatggtgttgggaatcttttggcgcgacgcgatcaatgagatgatcgacctgcagttcaacctggtggagcgcggcaacacgacggtgacgttcccgcaccctatggaccgggccataatgcgggatctggctcgcgagcccggtgtcttggccgtggaagggcagcgcatcctgccggtgcggctacgcgccggccagcagagttatttgacctcggtgatcggtctatccgcgggagatgagctgcggcggccgcatgacgcgacgctgcgcccgatcgcggtaagccccgacggaattacgctcacacggcggctcgccgaacgactcgacgcgaaggccggtgacatcctcacggtcgaggcgatggaaggacgacgacggaaacgcgatctgccggtcagtgccatcgtcgacgaggcgatcggaatggcatcttacatggagatcgagaccctgaatcgctttaccggggagggtgcggtgatttcggcggcgagcctgtacgttgagccgactgcgatgatagccttggggcaaaggttcaagagcttgccgaccatcgaatctgtgacgatgaaggcgtatgcgctcacttcgttcatggagaagatcgccgggctcgttttcgtgaccgccggaatccttgcggccttcgccaccatcatcacggtaggggtcgtctacaacagcgcgcgcatcagcttgcaggagcgcgcatgggaactggccagccttagggtgctgggctttacgcgcggcgaggttgcgagcatcctgttcggcgagttcgctatcgagatcgcgctggggattctgatcggcctgccgctctctcatgccgttatcgagctgatcgccagatttcactccaacgagagcttccagatacctgccgtgatcgccccgcagacttatctcattgccgtcggcgtcgtcctcgctgcggctgccgccagcgcccgcattgtcaaaggccgtgttgatcggatcgacttggtcgcagctctcaagaccagggagtaaacatgcacgtcacgggccgtcatatcgcaattgctgccggactcttggccgccgccggcgttacggcctggctcctggttccggcctcagtgccggtcgagaccgcagctgtgacaaaggggaggttcgccgccactgtcgatgaggatggcaagacgcgcgtccgcgagcggtacgcggtcgccgcgccgcttgcggggcgcttgagccggatccggttcaaggttggcgatcaagttcaggtcgacgacgccatcgccacgatcaccccatccccagcgcccctgatggacccccggacccgccgagaggtcgaggagagattgggagtggccgaagccaatctggagcgcgccagggcggtcgtcgagcgggctaaggcccagagcgatcacgccaataccgatttgaccagggcgcggacgctggctcagcaaggagcggcgacgacgcaggcgctcgagcgtgcagagcttgcggtgcatctcgccgaccgggatcttcgggcggcggaatttcagaatcatgcggccgagcatgagatcagccaaatgcgcgcattgctggcccggtacggcaatgatggcaacggccacccggatagctggaacgttgtgtcgcctgtcgccggcgtggtgctgaaggtcgcgcaggaaagcgaaacgatcgtgcagccgggtacgctcttgcttgacgtcggtgacgccagagatctcgaagtcgtggccgacgttctcagcaccgatgcggtggagatccgccccggagccgacgtcgacatcgacaattggggtggggagggaaaactgaagggtcgggtgcgccgggtcgagccggcagctttcacgaaggtctcgacgctcggagtcgaggagcaaagggtcaatgttctcgtcgacatcctctcgcccgcgaagcagtgggcacgactaggagatggctatcgggtggatgttcagatcaccgtcctcgcgcgggacgaagccacgatcgtcccgtcgggcgcgctgtttcgtcggggtgaaggctggaatgtctatgttgcgaagggcgggcgggccgaactgcgccaaatcgaactcctgcgccggtccggccgcttcgcggccgtcgcttccggccttgcgcctggtgaagaggtgatcgtctatcccagcgaccgagttgcaccggacgtgcgtatcgcacccagatcaccgtgaagagatcgccggagacggcgaatgcagtcgcccttatacgccgacattggccgcaatgacgaacacgttgagagcctccacccccgacctaaccgaccagatacttcttcaccgccgcctcgtcccatgcgatcccgttgccgggctcctcgctcggcagtgcgaagccgtccttgatcttcaatcgtgttgccagcaccgcatcggcccagtcgacatattccagccaatgcgcggtcggcgtgacgcagagcagatgcgcgctcacttccgagaacagatgcgtggacatctcgatgccggcggcgtgcgcaagcgccgcggcacggagccagccggtgacgccgccgatgcgttgaacgtccggcatcacgtagtcgcaggcttccgccgagagtgcggattgcatcgaaaacgcgctgtcgaaattctcgccgatctgcactggcgtatgcagcgcgtccgcaatgcgggcgcagccggcataatcgtcatggcggatcggctcctcgatccaggtgaggccctcgtcgtcgagcatctcgccgcggcggatggcctcggtcaccgtcagcgcctggttgtagtcgcacatcagcgtgacctgatctccgacggccttgcgcaccgcgcgcacgaccgcgagatcctcccgcgcatcgggccggccgacgcggatcttggcagcctggaagccttcggccagcaacttgtgggcttcctcgacagcggcgccggccggcatgatgccaagccccttcgaattgtacgccctgaccggcttcggtgcgccgccgagcaggcgcgccagcggcaggctgcgtgtgcgcgcaagcgcatcccaggccgccatgtcgatgccggattgcgccagccgttgcaggccggcgaggcccagcagcgtgaagcgctgggccagcttgcgttcgatctcgaacggcagcaactcgtctccggtgagaagatctgacatctccgtgaccatcgccgccagcggccgcaaggccgagggtgtgagcgagaacagataggcatggcctactgcgccctgatcggtctcgcagtcgatcagcaccagcggcgccttggcgaccgcgccggtcgcggtctggagcggcaggttcatcggcacgatcacgggacgcgcctggaagcgcttgatgcggatggtttcggtcatgggcttctcccggccgggcggatgcagatcggtgctgatcttaagcatccgtgatcaaacgaaaagccatttgctgcgaccccataaaatggggttgcgccggcctggaattattggctctgtgccgccgcattctttgtcgcagattctgtgcaatttgcgacaaaaccgtacataacggagccgcagggtgaaacaagagatctccgaagaacagcgcaagagcggcattctcacgggcgccgtgatcgtcttcctcctgcttgccctgcccctggcagtgtggctggacctgaccgagctgagcagtacggcgctgcgccgccaggcggtcgatctcaattcagtgatcacgagcgtgcgcagctactacgcatccaacgtggtcgggcgcgtgctcgccaacccgaacgggacgaccaaggtcgtgcacaattatgaatccgttcccggcgcgatcccgatcccggcgacgctctcgctcgaactcggccgggtgatcggtgcgcagcaggagaacatcacctaccgcttcgtctccgacttcccgttccagaaccgggcgccccaccagctcgacaagttcgagaaggacgcgctggaggcgcttcgaaaggatcccgaacagaagatcgtcgacaccgagacctccttgttcaacgacaaggtccgcctcgtggccccggtcaccatgggtcccgcctgcgtcagctgccacaacagccacccggaaagcccgaagaaggactggaaggtgggcgacgtccgcggcatccaggaggtgatcattgcccagccgatcgccgccaacatcttctcgttcaagtttctcctggcctatttcgtgattgccgccggcagcggtctggcgttcctgtcgctgcagcgccgccaggcgcttcgcatcaagggtatgaacaaggagcttgaatccgccaacgacttcctggcctctctgtcgatgaaaatctcgcgctacattccgcctcaggtctacaagagcatcttctcgggccagaaggacgtcaccatccacaccgagcgcaagaagctcaccatcttcttctccgacatccagaacttcaccgcgaccgccgagcggctccagccggagcagctgacgcagctgctcaacgaatatttcacggagatgtcggcgatcgcccacgaatatggcggcacgatcgacaagttcatcggcgacgccatgctgatcttcttcggcgatcccgagacccggggggaccgcgccgatgcgcaggcctgccttcagatggcctggcgcatgcagcagcgccttgccgagctcaatgcgaaatggcgcgcgtccggcatcgagcagccgttccgctcccgcatgggcatcaattcgggctattgcaatgtcggcaatttcggcagcgccgaccgcatggactacaccatcatcggcgcggaagcgaacctcgccgcgcgcctgcaatccatcgccgagcccggcggtatcgtcttgagctacgagaccttcgcgctggtcagcgacgtcgtgcgcgcccatgcgctgccggcgatcaccatgaagggcatcagccgagaggtgattccctattcggtggatgcgctgaacgacgctgcggcggcgaacagcggcatcatcaccgagcgcgcgcccgggctcgagctctatctcgaccccgcggtggtgagatcaggcgatgccgcgcgtgtccgctcgctgctggagaacgcgctcgccacgctgaagccggcatgaggcccggcctcggtctgtccagcccaacgccttgcgccggttacggcagtccccgcgcctccagctgccgcaccagcaggagcgtgggttcggcgaggctgtcgccggagccgtcgaggccgaaggcgctcgcaatgccgtcgcggctgcgcagcaatgcgctgcgcgggcagtggccggcgccgcagagcgtcttcttcagggtttcgccctgcgccacgaggccggcggaatcatccgcggcccaggccagcacgatcggcacatcgacattgaggatgccggggaagaccgagcgcttgtcgtactgggcggcatcggtgccgagataggccttctcgctgtcgctcgcgtccttgccgacgcggtagatcccggacaccagcacgacgccggcgacgtcggcgccgtcggtctgcagctcgggatgcgccagcagcgttgcgagatggaacgcgccggcaccgtatccgaccgcgacgatctcgcggtggtcgccgttgaacaggtcgatattgccgtggacccacgatagcgcggacgccacgtcggaggcgccggccggccaggtcgccgcgggcgccaggcggtagttgacgcggaccccgaccatgccgttgcgtgcggcaaagcacatgacctgatcctggatctgacgggccagctccggcgccgcgcggtcgccggtgaaggtgtcgcccgcgacgaacagcagcacaggccgtggcgtgtcggccttggtcgcgttggtcgcgacatccagcacgttggcctcgctctcgccgtagcgcagaccgcgcgagaaggtgacctgctcgcacagccgcgcggtgccgccggccgtggtgtcggaatcggtgaggcccgcccggacgagatcggacggcgcagccagccggtgcggcaaaggcccgtgcgccgaggccgtggtcatggtcagaaggaggaaaaatgccagataattcttcatcgtgatgcgggccctgtggggcatattggctcgccgatttggcctgtcttttcagttcgcctcattagttggctgcccttgaggcggattcacggcacccttggcgaggcgttgccggcttcgacccggtacgggccttctactgtgcatggggttgttttcgcggttttgtgttggaccgcccatcaggtccgtttcatcgtgcggaaggtgatggaatagcgccgcgcctcgacgggcgggatgctgtgttcccacacggagcgcgcctcgccgtccatcatgtaaagcgagcgcggcagggcctcgagcgtgtggcgttcccaccggtcgccgctgcggcggcggaagcggaacttgcagggcgagcccagcgacaatccgaagaccttgtcgaaatgcggcttgtcacggtgccagccgatgccgacactgacctcgtactcggtacacagcacctgccggacgctggcctccggcagccccgcccatgcctcgacccggcgggcgacgggcgtcacccaatccgggatcggctccgcctcggccagccgctgcagcgcataatcgtagcgatagccgaacgaggcgacccggcggttgccttcgaaggccccgaactggaagcgccgcagcggcaatgctgcgatgcgatcgatcaggtcctgctcgatggcggcgttgatgaagtcgtccgtgtagcggagccccgcagggccgtcttcgccgccgccgaacaaggccaactgggtcattctcgcacgtccgtgatggaacctcttggcggctgatacgacttacatatgacgcggggagtcatgtgcgaggctgtcatggcagagaagcattccgccgatccggcagagatcatgcgagcgaccggccatcccgagttggaatatgccgcaggctggaccatcgctggtctcgtgaccatcgccaccatcgtcgccgcctgggtgttcgccatctaggctgccgggaattggagttcgaaggccgcgcccttgtcggtgggcttgagcctgatcgagccgccatggctcgccatcaccgcgcgcgcgatcgccagtcccatcccggtgccgccctggtcgcggcgggtggtgaagaacgcgtcgaagatcctgtcgcgattcggcggcgagatcggttcgccgtcgttgctcacggtcagcagcagggtcgtgcgctcgaaggccgcctccagccggattgacctcgcctcgtgccgcatcgcgttgtcggcgaggtgcgacagaacgatcagcgccttctcgctggacatcgcgaccgggcggtcgaggtcgccgctggccgagatgtcgcctgccgggaaccggctcctgagatcggcaatgacgggggcaagctcggtgcgctcgttttgcggcaggctttcggcgcgggcgagctcgcgcagccgctgtgccattgcttccagccgttgggtgtccgacaggatgttggcgatgaacatcttctgctcggccggcgtcaggccgcccgatttgccctgaacggagtcctgcaacaactcggccgcccccttgatcgaggtcagcggcgatttcagttcatgggtgaggtgggccgaaaatgtcgcgatgtagtcggagcgccgcgccagttgctcggccatgccgagaaagctgtgcgagagctgggcgaactcgcgcgtgccgtagtgccggagcggctggaacgcctcgcggtcaccgcggccgattcgggcggcacggtcgatcagttcgcgcatcggcagcgtgatggtgcgcgagaagacgatgccgattgcgatcgtgccgaggatgacggcaaggccggccagcacgaacttggcccgctcctggtagagatggtcgaagatgttactcggcgtacgcgtggtgtagatcacgccggcgacgcggttgttgacgatgaccggcatcgccgagaacacatgcacgccaaggccgcggctgaaggagtagatcggcggcggcggcttgtccggcacacgattgcgcaaggtggcgcggtactgcccgtgcagtgcatcggcgacctcctcgatatgcgcaagggattgcccgatctcctgccgcccggcgatcacaacgccttgcggatcgaggatgcgaaaacctgccagggtcaccttctgggtctcgcggatgatcggcgtcaatcttgcgccgatctcgacaaaggcaggctgcgccggccggattgctgcttgggcaccgggccgacgccgcagcaggtcgttggcggtgagatcgagcgcggggcgaatcggcgtgacctggtcgccgggatcgggcagcacgcccgggggcacctcggtaccgagcgtcaggccgctgtcgagtcttgccgcgacctcctgcgcatagatcgtcgcgagcacgcggctctgcgcgatcagttcggcctgggtctggcggatcagctggttgtcatagaggcggaagaagaacagaccgaccagcggcaggatggcgaccgtggccagcaccgtgaagatgacgagcccaagcgacggccgccatttgtcgggcgccgcgctcatgcctctttctcgcagcgtccgagcttgaagccgacgccgtggatggtctcgatgacgttctcgcaggcgagcgccgcgagcttggcgcggatgttgcggatatggctgtcgatggtgcggtcggagacctggatattgagctgatatgccgcccgcatcagctgttcgcggttgaacacagacgttggccgggtcaggaaggcgcgcaaaatgccgaactctatcgcggtcagcttcagcggcgtccctgcaaacgaagccacgtgctgctcgggatcgatcaggagcccaccttgcacgagcgcggccggaccggacttggcctcgccattgcgcggactgaggcggcgcaggatgacattgatccgcgccactagctcgcgggggctgaacggcttcgtcacgtagtcgtcgccgccgatctcgagaccgagtatgcggtcgatctcctcgtcgcgcgccgacagaaacaggatcggcacgtcggacgtcttgcggatctcgcggcagacgtcgaggccgtcgaattcgggcaggccgatgtcgagcacgatcacatccggcctgtcggcggcaaagcgggcgagtgcctccttgccgtcgcgcgcttcgatcacgtccatgcccgccttcttgagggcgacacggatgacctcgcggatatggatctcgtcgtcgacgatgagaatgcgatgcgccaagaaactctccgttaactcgtcagcccgccggaccgctgccggactgagctctcgcctgcgcgtccagcctgcgctggagccgccagctccgaaatccccagcttcgccaggccaggtcccgacgttgctgttctacaagtcggtcgcggcgtgacacaaggctgccctggccggcgccgggccgcagcgccatcgcattgtcgatggcaggcagcgcttgcggcccgagtgtcagcagataatcgatgtccaactgcacgcctttgcccgatgcttcccggctgtgggcgacattgtagtcggcgatcaacgcatcgaagttcacgagggagcagccataaagcacgatcgacaacgcgatgaggttggcgccgacgagccataggttggacctgtcgagcacgatgcgcgcgacgatcaggatcaggccgagcgccaccagccccatccagatgaaggcggcgatgcgccagtaggtcagcatgtagatgtcgacgtagagatcgagccgaaggatggacgaggcgaccagaagcacgttctgccctacccagagatagaccagcggccggatcaccctcgatttctctgccaggccgcccgggcgcattgccaccagcacgaaggcggcggccagcaatgccgtcgcgatcaggggataggcgccgcgatgggcatagccggcataggtcaaattgtcgggcagcgccacatggccccagagatagatgccatcgaggacggtctgggccgcgaacagcaggttgaacaggatgagcgatcgcagaatggtcgaggggcccaagaaatctggcgagacgaggggcgcaacaggctccggctcggcgacattggctgccgcgtcgacagcgatcttccggcttcgccagcgcacattgatgaatggccagaccagtgtcagcatcaaggcccagaacagcacgcgcggaacgctgacatgctcgaggacaaccttcggattgagcagggatacccactgctcgatcaccgggttggccgcggcgaacagtgtgacgaatacggtgctcagggccatcggcatcagccacagcgcgatgcctttagcgaaagctgccttgtcgaagaccttgagcacatccggcaagaagcgaaagaagccgagcaggatgaaatctcgaagggcgcgggcgcggtctacaagtcctgccgtgtctggattcgtcgtgagcagcagggcgacgagcagcgctgcggcgaggatcggaaatgagagagcgttgatctcttccatcgcgggcacgaggccgagcgcgagaatcgcacctccaatcgccgcgcgccgaagattcagcatcgcgtggtttgtgaacatcgaggcacaggcgattgcgatcacaaagatggccagcgaaaacccgagccgctggccgtagaagagccaatcggcgagtgctgcgagcagcaaggccattgtgagttggaccggcagcgcggaaggcccgatcggttggatgtccgtcgtcgatgtcgaaggcaggctggtcatgtccagaagatcctccgtgaatggtggcatcacagagtctgaatggctcctgtgcagaagcctggatcgtcgtctgcacggtttcaggagtcttttgcagatttcgtgcaggtgcgttcttgcctctcgcgcaatgccgatcgcgctgattaggtgtgaagcattcgccactcacgagtgtgacgcatcatgcagttactccgacgtatcggtctcatcctgcttcggctggccgcgcctgtagctgcattcgcggccgcgaacaagaacgatccctatctggttctgctgcgcggcgccggaaacatcgcgcttgtctttgcaagcatcgcgattgtcatcgtcctgtggcgcagggggcgatggcgaagcattgcaggaaagctgctcgtcatgctttggtgcttgccgccactgctgatgtcggcggcgcatgtcaggttcgagctgcgcaagcacgctgtcctcgcctcgagtgaccccgaggcgcgacagctcggacctcacttcatggtcggctattcatcgttcccggaagtcgcgcgccttgccgagaagggattgatcggcggcgtctacatcacccggcacaacatccgggcgcggacggtcggggcgctacgcgccgagatcgcgacgctccaggatatcaggcgcaccgccggcctgccgccactgttcgtcgccgcggatcaggagggcggcatcgtcggccatctttcaccgccgctgacgaaagttccggcgctggcaacactcgccgggctcgcgccagacgagcagcaggccaaagccgaagagttcggccgcattcatggccgcgaactcgcggatctcggagtcaacctcaacctcgcgccggtgctcgacctgaagccgccgcccaggcgcaatcgcctcgatttccatacgctgatcgggcaacgtgcgatcgcgaccgatcccgtcgtcgtgggcacgatcgcgaccgcctatgtgcgtgggctggaggaatccggcgtcggtgccacgctgaagcattttcctggcatcggccgcgtggacggcgacacccaccacttcagcgcaaaccttgatacgcccgtgacggagctggaggcaacggactggcgcccgttccgggaggtgctgtcgcgttcgcgcagcgcgctcatggtcggtcatgtcacgctcaccgccgttgatcccgatcgcgccgcctcgcattcgaaacgcgtcgtccagggcatcattcgcgacaagtggaactaccacggcgtggtgatgaccgacgatctcgtcatgggcgcgatctaccagaacgacgtctgcaaggctgtggtggaggcgatcaatggcggggtcgatttgctgctggtcgcctatgacggcgtgcagttctaccgtgtctttgcctgcgcgctcgagggatcgcggcaggacaagctcgatgccgcgatgctgcgcgccagcgcggggcggctggacagtggccgtccggtcgtgcaggcccggactgtttcgcgagcgatcagcgccgatcgtcaggaatagttacataccggctcgatcgcgcagcaccgcctcgcgcaacggcgcgaggcagtccggttccggtcgtccgtgcgtcgggtcgtcgtgcgctccttattcggcctgctccagcgcggcgggcatcttcgcgaccgacatcagcgaccgcgccacctgattgagcaggaggtcggcattttcttcctcggcaagcgacctggagagcagggcgacaatcgcgctgtgccgaagctgctgcgccaggttgcgggccgtggtgtagccggacatctcataatgttcgacgcgctgggccgctgagatcagcgcaaggtcggcggccgcgtcctccttatcttcgccttccttcatgacctcctggccctcctcgatcaggcccatcatgcccttgcatggcttggcccgggcgttctcgccgagcagttcgaagcactcgttgatgcgctcgacctggttctcggtctccaccaggtgctgctcgaacagctcgcgcaattggtcgaagcgcgcggcctgcgccatcttgggaagcgccttcgtcagctgcttctcggcatgcagaatgtcgcggagttcgtggagcaggagatccgtcaggcccgcctcgtcgacgggcggtgaactctcggtgacgatcggggtcgcagcgccgggatccgaggattgcagcgcaggcgattccgtgaacacccagtcctctccttcgttccagggaccgcgggtgtcgatctcgccatggtcgccgctgcccgtggagtcgttgaagtactggttcaccaggccgggcgtcggcgcaatcctgcccacactgaaggccggcttcgacaggctttcgagcgcgcgcgcaaatgccttcatatgcgtgatctcgcgcgtcatcaggaattgcagcgcatccttgctgccggcatcgtcgcagaaattgatcagtcgctcgtagacgatcttcgcgcgcgcttcggccgcgatgttgctgcggaggtccacgtcgagttcgccggtgatcttgagatagtcggcggtccagggattgccctgcgaattgaacagattgacgcctcccccgccggcaatcgcaatcagcggatcggcctcggcggcctgacggtcgttcttcgaaggcgcgagatgcatgcgggcaaggcagccgacgacttccagatggctgagctcttcggtgccgatgtccatcagcaggtccttgcgatcaggatcctcgcaattcagcccctgaatcgagtattgcatcgcagccgcaagttccccgttggcgccgccgaactgctcgaggagcatattgccgaagcgcggatcgggttcatcgacgcgcacagtgaacatcagctttttgacgtggtgatacatggaagggctcgcgctgagagggaactacgccgacaacgaacgcttggaatgttcgttcctagccatcccaaagttgggattcgcgggggtgacgggggacgaggaggcgccatgccaccgcaaatgtggaccacttcgcatgaggttatgtgacccgcgatcctcgtcagcattgtgcttcgaacgcaggtgcgatatggctcgcgcgcctttcagaagcggagaccagccttgtcgaaacaatccctgcgcgaggaggccgaacgcctgatccgcgagtcgatggaaaagaagaccatcgtcgtcaagcagggcacgacccgcatcgaggcgatctgcggcaaatgcggcgcaccgaaccgggtacaggcggagaagggccaaagccgcgtcaagttcgcctgcaagaattgcgggcacaagcaggagacgctgtagtgcttgcgtgcagcgaacactccgcccgtcctcctgcggagcccgctgtaagcggtcgggccgggctgccccagccgggcctgcatggttcgtgacgcgcacaaggcgcgctcctcacggcgagggggcggcagtcacttcccctccacgaacgtcttgaacgcgtccgcgtagtccggatgccagcgtgacaatggcgggcggttctcgacgatgtcgccggcggcccagagcatgcgtttctcgtcgagggcgcgcggtacgtcgttgtccggacacaagatatagaagtcgcccgcctccagccgcatcagcatgaaatccacggtctgttccggcgtccaggcgccggccggcttctcgctgcgtcccttcgccgtcaggccggtgaagacgaagcccgggatcaatagatgtgccgagacctggcaatctttcgtgttgcgcagctcgtgttggagcgcctcagtgaacgccttcacgccggccttcgagacgttgtaggcggggtcgcccggcggcgtggtgatgccctgcttggaaccggtgttgatgatcaggccgcaccggccgcgtgcgatcatgttcggcgcgaagatccgcgagccgttgatgatgccccacatgttgacgccgatgatgcgctgccaattgtcgggatcgccgaacaatgtgctgcccggctggatgccggcattgttcatgaggacatcggtgccgccgaaccgcccgcgtaccgtgcgctccagttccaatacgctctcggcctcgctgacatcgacgactgaactcatcacgtttgtggcaaccgtgatggatgacagttttgttgcagcttctgctaaccgtgtctcgtcgacgtccgcgatacacaccttcattccagcgcgcgcaaacgcggtggcagcggcaaatccgatgccggacgcgccgcctgtgataacggcaacgttgtctctgacgatggcgggatgtggcatggatcgtctccgtggatggctctcggtcgagctatagcatggcagcaatccgaccctgcacaagtcggcatgggaggtcttccttcttcgctgcctttacgcctatccagcagggctgtatcctcgatcgaacgatcccgcccagatcgaaccaatcaatcacctgatagggagcgcagccatggctgtatcgcaggctattccgatcacgcgtcatccgttcgccaacggatcgtacaagcagatgctgatcgacggaaaatgggtcgatgcagcctcgggcaagcgcttcgagacccgcaatcccgccaccggcgagctgctcgcaaccgtcgccgaaggcgacaaagaagatatcgaccgcgcggtggccgcggcacgccgcgccttcgaagggtcctggagcaaggtcaagcccttcgagcggcagaacctgctcttgaagctcgccgatctcgtcgagagaaatttcgacgaattgtcacagcttgatacgctcgacatgggtgcgcccctcagccgcacccgcgcctatcgtctccgcgccgtaggcatgctgcgttactacgccggccagacgaccgcgatccatggcgagaccatcgagaactcgctgccgggtgagatcttctcctacacgctgaaggagccggtcggcgtcgtcggcgctatcatcccctggaacggaccgctgacggcgacgatctggaagatcggtccggcgatcgcgaccggctgcaccgtcgtgctcaaacctgccgaagaagcgccgctgacttcgctgcgtatcgccgaactcgcgatggaagccggcgtgccgcccggcgtcatcaatgtcgtacccggctatggcgagaccgcgggcgctgcgctcgcatcgcaccacgatgtcgacaaggtcgccttcaccggctcgcatgttacgggccagtcgatcatccgtgcctcggccggcaacctcaagcgcgtctcgctcgagctcggaggcaagtcgcctgacatcgtcttcgcggatgccgatctcgacgcagccgtcccgggcgccgcgatggcggtgttcgccaattccgggcagatctgcagcgccggcacgcgcctgttcgtcgaacagtcgatctatgacgaattcgtcggtcgcgtcgccgagttcggcaagaagctgcaggtcggcaacggcctcgatcccaacgtgcagatcggcccgctcgtctccgagcagcagctcgaacgcgtcaccggctatctggacatcggccagaaggaaggcgccagggcgctcgccggcggcggccgcgtcaccgaaggagctttgtcaaagggcttctttgtctcccccacggtgttcgcgggtgttgaagacaacatgcgcatcgcgcaggaggagattttcggacctgtgatctccgcgatcgccttcaaggacatggacgagctggtcaagcgcgccaacaacaccacgttcggcctcggctccggcttgtggacgcgcgacgtcagcaaggctcacgctgtggcgaagagtctgcgtgccggttcggtctgggtgaactgctaccaggcgatggacccagccgtgccgttcggcggctacaagatgagcggctatggccgcgagtccggcaagcagcatgtcgaggaatatctcaacgtgaaagccgtctggatcaagaccgcctaacatcaacatcccttccatcttccacgggagggaatatctgcctttgcgggggcggcacctttgccggtggccgcccttcgctatatgatccgcatccttccatagacatctggggcccatatgaaattcgaggcgttgtttcaaccgttgcaggttggtccgtataagcttgcgcaccgcgtcgcgatggcaccgctgacccgtatgcgagccgagcgcgagagcttttcgccgcgcccgctcaacgccgagtattacggccagcgtgcgacgaaaggcggcctgatcattgccgaggcctcgccggtgctctcgcatggccgcggcaatccggccacgccaggcatctattcggaggcgcaagtagccggttggcgtaaggtggtcgatgcggtgcacgccaagggcggcatcatcttcctgcagctctggcatgtcggccgcgtctcgcactcatcgttccatggcggcgcgctgccggtctctgcttcggcgatcccgatcaaggccgagggcatgaaggccatgaccgcagacggcaagatcgccgattacgagacgccgcgtgcgctggagaccgaggaagtgaagggcatcgtcgaagccttcagacagggcgcgaagaacgcgcttgccgcgggcttcgacggcgtcgagatccacggcgccaacggctatctgctcgagcagttcctgcaatcgcgcagcaaccagcgcaccgatcaatatggcggctcgatcgagaatcgcgcgcggctgctgctcgaggnnnnnnnnnnnnnnnnnnnnnnnnnnnnnnnnnnatgaacgagccgcctgatggattccgggcccgcgccttcggcgcgtcccggaatgacaatcgtgtattgttgcggtcgctatgacgacggggagaattccatggccaaagccgcagcagccgcgggcatagccaccggccagtgcctctgtggcaaggtcaccttcgaaatccacgttcccgcgcggtgggcctggcatgatcattccgccgccagccgtcgcgcacatggcgcggcctacgcaacctatgtcggaagctggaagaagcgctttcgcattaccgccggcaagaccgcgctcacgcgctacgaggacaaggcgacgaagaccgcgcgcagcttctgctcgcattgcggcacgccgatcgcctatgagcgaccgcgcggcccgcacatggtcaacatcccccgtgcgctgttcaacgagcgcaccggccgccagccgctctatcacatcgccatcgaagagctgcaggaatgggcctacactggcgagccgctggtgccgctcaaggggtttccgggcgtggtgtggcagcgatcgaaaaagaggatgcgtgcgcgcggcggtgatccgttcgaactgggaccgggagagatgtagcgcgcctctcccgcgcaacgcagccatgaccgcgtttccttgcgcccatcccgcaatctcggccatcatgcgttccgtccttgcggcaacgcccgctcctggaggaaacatgaagaacaagatcaccggccgttccgcctttctcgcgctgctcgaggacgagggcatcgcgcaccttttcggcaatccgggcaccaccgagctgccgatcatgcatgcgctgaaggatcatcctgacctcacctatgtaatggcgatgcaggagagcctggtggtcgcgatcgccgacggatacagccgcgcctccggaaagctcgtggcctgcaacgtccacgtcgcgcccggcctcggcaatgccatgggctcgctctacaacgcgcagttcacgggcacgccgatgattctcacggccggccagcaggagcagggccacggcctgatggagccggtgctttacggccccttggtgcgcatggccgagccgctggtgaaatgggcggtcgaggtgacgcggttggaagatctgccgcgcatcgtgcgccgtgccgccaaggtcgcaacgacgccgccgaccgggccggtgttcatttcgctgccgggcgatatcctaaacagtgaagccggcatcgatctcggccggtccacccggatcgatgcccgcacgaagccatcggacgaggcgctgaaggcctttgccgcgcggctgctgaaggcggagcgccccgtcatcgtcaccatggacgaagtcgtcaagagcgatgcgttgaaggaggctgccgcactcgccgaattgctcggcgcggcagcttaccagtcgtcgacgccatacggggcgcacttcctgtcggagagcccgagcttcgtcggcactctggcacgcgtgcagaaggtcgcgcgcgatacgcttgcgccttacgatctgctgatcgcgcttggcggcgatcccttgcggatgtcggtctatagcgaggtcgatgcgctgcccgatggcctcggcatcgtgcagatcggtctgctcgattgggaaatcgccaagaactacggcgctgagatcgcattgaaggcggatctgaaggaaacattgcgcgcgctcatcccggtgctgaaggagatgggcggcgcaacactggcgagcaaggcgaagcagcgcctcgccgagctcgcgccgaccaactgggccgcgcggcgtgccgctcttgtccaggagatcagcaagagcgcggaccgtactccgatcgatcccgattttctggtgctgcagatggtcgaggcgatgcctgacaatgccatcctcgtcgacgaaggcctcacctccagccgccagatcacggcgctgcgcccgcaccgcgaccgctacggctatcacggccttgcctccggcggcatcggctggggtctgccggcgtccgtcggcgccagcatcgccaacccggatcgtccggtggtgtgcttctcgggcgatggcagcgcgatgtactcgatccagtcgctgtggaccgcggcgcaccacaagctgccgctcaacgtcgtcatcgtcaacaatggcggctaccgcatcatcaagcagcggctgctcgccttccatggcgacgacaattacgtcggcatggacttcgtcgatcctcccgtggatttcgtaggcgtcgccaaggcactgggctgcgaggcgatcaaggtcagcgacccccgcgagctgaaggcgacgctggcgtcggcgttcggccggcctgggacgaagctgatcgaggtgatggtggacggcaaggtgtaggggcgggatgtcgcatcgttattgcgaggagcgtagcgacgaagcaatccagacagtctctgcggatgcatctccggaccgcttcgctaccctcgcgatgcgaggaggtggcaactatcccttcttccccacccgatactccgccgccggatggttcgcatcgagtcttgcccggcccgcgccaaacagcttctcacgcagcgtgcctttcgcgtattccggcttgtaccgcccgcgccgggtcagctccggcaccagcatgtcggcgatatcctcgaaatcaccgggcgagactgcgaacgcgacgttgagcccgtcgacgtcggtcgcctcgaaccactcttcgatcttgtccgcgaccatctcgggcttgccgaccacgaccgggccggcgccgccgatgccgacatgctcgatgacgtcgcgcacggtccagacccggtcgggatcggcccgggtgacattgtccatcgcactgcggccggcgtcgttctggacgtggcggacctgctggtcgaggtcgtagccggagaagtcgacgccggtccatcccgacatcagcgccagcgcgccctcggggctgatgtagcggcggtaatcggcgtatttttcctttgcctcagcctcggtccgcccgaggatgatcgtcatcatcgagaacatcaggatttcggccggatttcgcccccgcgcagcggcctcctgccggatcgccgacacgcgtggcgcgatcaccttggccgacggtcccgacatgaacacgcattcggcgtgacgtgcggcgaactgccggccgcgcggcgaggtgccggcctggtacagcaccggcgtgcgttgcggcgacggctcgctgagatgaatcgtgttgttgatacggaagttcgcgccctcatgattgacgcgatgaactttcgcgggatcggtgaagatgccgcgcgtccgatcgcgcagcacggcgtcatcctcccagctgccttcccagagcttgtagacgacctccatatactcgtcggcgatgtcgtagcggtcgtcatgcccggtctgcttgtccttgccggcgccgcgtgcggcgctgtcgagatagccggtgacgacgttccagccgacccgcccttcggtgaggtggtcgagcgtcgacatccgccgtgcgaacgggtagggtggctcgaaggatagattgctggtgacgccgaaaccgagattttgcgtcacggcggccatcgccgagagcagcaacagcggctcgttcgacggcgtctgtgctgcattgcgcaaggctgcgtcagggctgttgtcatagacatcgtagaccccgagcacgtccgccaggaaaagcccgtcgaagcggcctcgctcgagcgtcctggcgagatcgatccagtagggcaggcggttgtagtcggcggtgcggtcgcgcggatgggtccacaggccgggtgattggtgtgcgacgcaattcatcgcaaatgcgttgagcctgatctctttggccatgctgatctccgggcgctctgtactgggcgctcatcgaatgatagatgtgcgcgccaacctggcgaagttcttgcatatggttggcccttggcaagggccaaccaaggtttgggtgttggcaagatcaattcggcggtgccgctgcgcttggcaagccaatctcaaacgagcaggacgaaatcccgagacaactgcaagagaactacaacggaaactccagaactgtccaagcgcgccgctgtggacggcctttgtagcccgctgcgttcgcccgcgccgaaaccttgaaaccgaaagcaatgaccagagccgacgccatcgcccgcgcccgggacgacttcaaatccggtgcgtttctcgctgaactcgaccgtcgcgtcgcgtatcgcaccgaaagccagaatccatcgcgcggcgccgagttgcgcgcctatctgaatcaggagatgcagccggccttcgccgcgctgggcttctccagccgcatcgtggaatcgccgagcggtaaggcgcccttcctgctcgccgagcatcacgagagcgcgtccgcgccgactgtgctgatttacggccatggtgatgtcgtcgatggcatggagggcgagtggcgcgagggccgtgatccctggcgcaccaccgtttcaggcgcgcggctctacggccgcggcaccgccgacaacaagggccagcacagcatcaacatggcggcgctccgcgcggtgcgcgaggctcgcggcggccagctcggcttcaacgccaagttcatcatcgagatgggtgaggagatcggctcgcccgatctcggcaaggtctgcgatctccatcgcgatgcgctcaaggccgacctgttcatggcttccgacgggccacgcctgtccgccgaccgccccacgctctttctcggctgccgcggcggcatccgcatccatctcgacgtgaacctgcgcgatggcggccaccattccgggaattggggcggcgtgctcgccaaccccgcgaccatcctggccaatgcgatctcgacgctggttgatgggcagggccgtctcctgctcgatgccttgaagccgccgcggctcaccaatcagatccgcagctatctcgccgacgtgcaggtggtgccctcggcggacgagccggcactggcggagaattggggcgaggaggggctgtctgccgccgaacggctctatgcctggaacacgctggaagtgctcgcgatgtcctcgggcaacatcgagaagccggcgaacgctatccccggtcaggccaatgccgtgctgcaactgcgttttgtggtcgggaccaagatcgagggcctgatcgaggcgatccaggcacatctgaccgcgaaaggttttccgatggtcgaggtgcgggcggcccagagttttgctgcatcgcgcacggattttgacagcccctggatcaaatgggcggcggaatcggtgcaggcgaccacgggcaaggccccggcggtgctgccgaactttggcggatcgctgcccaacgacgtattctccgaaatcctgggcctgccgacgatctgggtgccccactcctatcccggctgctcccagcatgcgcccaatgagcacatcctgctgccattgaccgaagaggccttgacggtgatggccgggctgttctgggatctcggcgaattgccaaaaccactagcaggaccgcaaacaggcccgttaacctgagccgtcgatcccgccaaaagttacattctaatccggcccgatttgtgcttgcatccgggccgcatcatccgaaaggggaagagaaaagtgaaacatttccgtagcatcgggctcgcgctcgccgcgaccttcgtcgtcagccaggccggggcccagcagctgaccggcacgctgaagaacatcaaggacaccggcgccatcacgctgggcttccgcgactcctcgatcccgttctcctacctcgacgacaaccagaagcccgtcgggttcgcgatggacatctgctacaagatcgtcgatgccgtgaagaaggagctcaagctcgacaagcttgaggtcaagctcaacccggtgacgtcggcaacgcgtatcccgctgatggccaacggcaccatcgacctcgaatgcggctcgaccaccaacaacgccgagcgccagaagcaggtcgccttcaccaacacccacttcctgacggcgagccgctacgtcttcaagaaatcgagcggcctgaagtccattgacgacctcaagggcaagacggtggtctcgactgccggcaccaccaacatcaagcagctcaccgaagccaacgctgcgaagggcctcggcgccaacatcatcccggccaaggaccacgccgaagccttcctgatggtcgagaccgatcgcgcggtcgccttcgtcatggacgacatcctgctcgcaagcctcgtcgccggctcgaagtcgcccggcgactatgagatatccaaggacgcgttctccaagcccgagccctacggaatcatgctgcgcaaggacgaccccgccttcaagaaggtggtggatgcggcaacggcggcgctctacacctccggtgaagcccagaagatctacgacaagtggttcatgcagaagatcccgccgaagggcctgaacctcaacacgccgatctcggcccagctgaagaacgagttcgccaagccgacggactcgccgaatccggacgactacaagtaagacaaaacctcgatctttcgaccgggatcatgtccggccactcttgacaccagagtggccggacatcggacatttgcataggcgcccaggacatccatggcgcgttcgcgcgggggacacgtgaactacaactggaactggggaatctttttccagccgaatccgatggggaccggcacctatctcgatatgctgctgtcgggccttgcgctgaccctcaagaccgcggcgctggcctgggtcattgcgctgatcaccggctcgatcgtcggcgtcatgcgtacgctgccgtcgaaaggcgcgaactggttcggcttcgcctatgtcgaattttttcgcaacatgccgctgctcgtgcagttgttcctgtggtttttcgtgctgccggaattgctccccaaaggcgccggcacgtggctgaagcaactgccgaatgcgccgttctggacggccgcgatcggcgtcggcttcttcatgtcggcccgcgtcgccgtgcaattgcaggccggcatcggttcgctgccgcgcggacagaagatggcggcgaccgcgctgggtctgaccacggtgcagacctatcgctacgtgctgctgcccatggcattccgcatcatcctgccgccgctgacctccgaattcctcaacaccatcaagaataccgcggttgcgatcaccattggcttgctcgagctgaccggacaggcgcgctcgatgcaggaattctcgttccaggtgtttgaggccttcacggccgcgaccctcctttacctcctcgtcaacgcggtggtcgtgaccgcgatgcgcttcctcgagcgctgggtcgcgatccccggctacatcacggggaaatagcgcgatgttcgccaatctcgatttcgacgtcatccgccgcgcgctgccctacctgttctatgaaggcatgacgttcacgctgacgctgacggggctcgctgcactcggcggcctcatcttcggcacggcgctcgccctcatgcgtctctccggcttcaagatcctcggtcggatcgccggcatctatgtcgacttcatgcggtcgctgccgctggtgctggtgatcttctggttctacttcctggtgccctatatcgggcagtgggtgaccggcgcctcacggccgatcagcgtcggcgccttcgcgtcctctctcatcaccttcatcatgtttgaggccgcttacttctccgagatcatgcgcgccggcatccagtcgatctcgcgcggacagccggccgccgcgagcgcgctggggctgacctacgcgcagtccatgcgctacgtcgtgctgccgcaggccttccgcaacatgctgccggtcctgatcacgcagaccatcgtgctgttccaggacacctcgctggtctacgtcctgtcgatcacggactttctcggagcggccagcaaggtggcccagcgcgatggacgcctcgttgaaatgtacctgttcgctgcgatcgtctacttcaccatttcctgtgtcgcgtcatacggcgtccgccgcctgcaggcgcgcatcgccatcattcgctgaggctaggcgctcatgatcgaaatcagccacgtcaacaaatggtacacgccgagtttccaggtgctgaccgactgcaccaccagcgtcaccaagggtgaggtcgtcgtggtctgcggcccctccggctcgggcaagtcgacgctgatcaaatgcgtcaatgcgctggagccgttccagagcggcgacatcctggtcgacggcaccaaggtcaacgatcccaagaccaacctgccgaagctgcgctcgcgcgtcggcatggtgttccagcacttcgagttgtttccgcacctcaagatcatcgacaatctctgtctggcgcaggagaaggtgctgggccgcccgcgcgacaaggcgcagaccaagggcatgcagttgctggagcgcgtcgggttgaaggagcaggcgcagaaatttccggctcagctctccggcggtcagcagcagcgcgtcgccatcgcccgcgcgctcgccatggacccgatcgtgatgctgttcgacgagccgacctcggcgctcgatcctgaaatggtcagcgaagttctcgatgtgatggtcgatctcgcccgtgaaggtatgactatgatggtggttactcacgagatgggcttcgcccgcaaggtcgccaaccgcgtcatcttcatggaccgaggcgagatcgtcgaggacgcgtcgaaggacgatttcttcggcaagccccgcagcgaccgcgcgcagaagttcttgtcgaagatcctctcccactaaccgatggtcgtcccgggggcgcccgtagcgcgagcccgggatccatcaggcggcgtaacgcggggcgaaatggtttccgggctcgtcgcttcgcgctgccccggaatgcgaatagaggggtgatccgtccccctaactggcgtataagcgcgccaaatttcccatccccccaggagacccgcgccttggacccgatcgcctacgtcaacggctcattcgtcccgctctcggaagccaagatctcggtgctcgatcgcggctttctgttcgcggacggcatctacgaagtctcggccgtgctcgacggcaagctggtcgacaacgcctcgcatctggcgcggcttgagcgttccgttggcgaaatcaagctgaagctgccggagacgatcgagcgcatcaccgagcttcagaaggaactgatcgcgcgcaacaagctcgacaatggcctcgtctacctccaggtcacccgcggcgccgacaaggggcgcgacttcccgttccccaagggtgacgtcaagtcgagcctggtgatgttcacgtccgagaaggacatcgtcaacgccgcctcggcgaagaccggcatcaatgtcatcactgtgcccgacatccgctgggagcgacgcgacatcaagagcgtggcgctgctggcgcaggtcttggcgaagcaggccgccgcggaggccggcgcgggcgaggcctggatgctggaagacggatacgtcaccgagggcggctcgtcgtcggcgttcatcctgaccaaggacgacgtcatcgtcacgcgcaggaattccaacgcgatcctgccgggctgcacccgcaaagcggtgatcgcactcgccgaggaacgccagctccgtgtcgaggaacgttcgttcacggtcgcagaggcgctcgccgccaaggaggcgttcatcaccagcgcatcctccttcgtgcagccggtggtcgccattgacggcaagacgatcggcgacggtaagcccggcccggtggcaacgcgccttcgcgagatttacgtggagttcgccaaggcgacggcggtttgatcgtcattgccgggcctcacccagtaatccatcaggagtcagaggttcattttgatggatgcgcgggtcaagcccgcgcatgacgatctatatttgtgtcgacgtggttgcctgcgccatcgacgccttcaccttcaccggatggacggcgcggaacgcgatcgcgatcctattccaggcgttgatcgtcgcgatcagcatggtcaggttcaccgcctcctccgcggagaattgcgcgcgggcctgctcgtaggcgtcgtcgggcgcatgcgtctcggagatcagcgtcaccgcctcggtccaggccagcgcggcgcgttcgcgctcggtatagagcgaggattcgcgccaggcatcgaggagatagatgcgctgctcggtctcgccgcgcttgcgcgcgtcttcggtgtgcatgttgatgcagaacgcgcagccgttgatctgcgacgcccggatcttgacgagttcgatcagtgatttctccagacccgtcgactggatctgcgcctccagcgccatcagcgctttgatggtatcgggtgcggcctggtagtagttcatgcgaggcttcatcgtcgttctcctctgttggacttgagtcagtgggcgccgccagcggaagtctggccgggcttcttcaggaagaggacggcgagcagcgccacgatcagcgccatgccgagcagatagaaagtgtcgctgaacgcgaggatataggcctgcttctgcacgatgcggccgattgcgacataggcgcgatgcacggcatctgcatggtcgaggatgccgtgattgacgaagtactgggtgagctgctccagccgcgtgcgcgacgcctgatcgaatgccgacaccgactgcatcagcacgttggaatgatactgctcgcgcttggtcagggcagtctgaagtagggcgatgccgacggccccgccgagattgcgcatcatgttgaacaggccggaggccgagcctgcattctccggttcgatgcctgcggttgccacggccgacagcggcgccatcaccagcgcctgaccgagcgctcgcaccacattgggccagagcagctggtcggcggcatagtcattggtcatatggatgttcatgaagtttgaagccgcgaacagcacgaagccgatgccgatgatgatccgcgcgtcgaagcgctgcatcaggcgcggcaccagcggaatcagcaggagttggggcagcccggtccaggccagcaccatgccgatctgctcggcattgtagccctggatgcgggccagatattgcggcaggatgaacaccgagccgtacagcgcgatgcccagcagaaagttcgcgagcatgccgaatccgaaattgcggcggacgagcaggcgcagattgagcagcggcttctttaccgtgagctcgatgaccaggaacgagaccagtgcgatggccgcgatcacgctgagcttgacgatgaagggcgagccgaaccagtcgtccttgttgccttcctccagcacggtctggagtgcggataggccgattgccatggtgacaatgccggcccaatcgcctccccgcaggagcgacagcttcatcggcttggcctcgagcgcgtaccagagcatgccgaccatgatcgcgccgggcacgaggttgacgtagaagatgtactgccagccaaaattctcggtgagatagccgccgatggtcgggccgatcgccggcgcgaacgtcgccgagagtgcgaacagcgcgaggcccaccggctgcttgccgcgcggcagcaaggtgatgatcaacgtgaaggccagcggaatcagcacgccgccggtgaaaccctggatggcgcgcagcacgatcatctgcgacaggtcctgcgccagcgcgcaggccgcggagagagccaggaacaggatcgcgttggtgagcagatagatgcggatcgagaacacctgtgccagccagccggacagcgggatcaccacgatttcggcgaccagataggaggtcgagatccagccgccgtcgtcgatgccggcgccgatcgcgccctggatgtcggcgagcgaggcgttgacgatttggatgttcagcaccgccatgaaggcgccaagcgtcgcgccgatcaccgcgatccaggtcttcgcggatactgagggtgcggttggctcgctgcgggcggggcggccggcagcggcgtcgaaggtcggttggagggtgctcatgtcaacccccgctcgaacgagccgtcttgccggcgatctgcttggcagtcccccgctcggcgagcaccgtctgtttggtgtcgacaaccggcaccgcggacatgcccggccgcaggaggccggtcaggctgtggtcatcgagcacgatcttcaccggcacgcgctgcacgatcttcgtgaagttgccggtggcattgtcggggggcagcagcgcgaattcgagtccgctggcgggcgacaggctgtcaacatggccgcggagggtggtgttgcggaagctgtcgacgtgcagctcgaccggctggccggggcgcatatgcgtgagttgcgtctccttgaaattggcgacgacatagacggcgtcgagtggcaccaccgccatcagctgtgtgccggcttgcacgtactggccgacgcgcaagctgcgggcaccgaccgtgccttcgaccggagcggtgatcgtggtataggacagattgagcgcggcctgctccgcgacggcgcgggcgcgttcgagctgcgctgcggcctgggcgcgctgcgtggtgagaacgtcgatttttcgctgcgcggccagcaggccgaacttggcgtgctgcaattgggcgctgctggcgcgcagcgccgcatcggtctgctgtgcgcgctggaccgtacccgaccccgtcttcatgagatcgtcgtaccgggcgcgctcctcctgcgcgaatttcaggttggcctccgcagcagcaatatcagccgtgccttgctcgatgatcggctgttgcagctttaactgggcatcgatgttgcgcaccgacgcttcggcagcggcgacatcggcgcgggcctgatcgagcgccgccttgaagtcgcggtcgtcgatcttggcaagcacctggcccgccttcaccttctcgttgtctccgaccagcaccttcgcgatgtagccggagaccttaggcgcgacgatcgtcgagtccgccttcacataggcgtcatcggtggattccaggtagcggccggtggtgatgtagtcgtaaccgaagcgcccggccgcggcgatcccgagcgtcaacgccaggcccaaggccacccgctggatcgcttggcgggatggacggaggctgattttcttattggtttcagcaacataagcgatcgacatggtgtcctcggaattcccgcacgtcccggtgcgtcgggacgtgttgttgatgcgggtaagatgcgtcgtccctcccattgtgataatccgtcaaaaactggaatgattatccagcgaagattgataatcggggcgttcgacatggaccgctttacgagcctcactgctttcgtccgcgtggtcgacgctggcggcttctcagccgcggcccgccggctcaacatgtccaccacgatggtgagcaaccacgtccaggcgctggaggaccggcttggggtgcggctgctcaaccgcaccacgcggaaggtcagccttacggagatcggcaaagcctattacgagcgctcaacgcagatcctcgccgatctcgaacaggccgacgacatcgcgagcgaattgcagtcggtgcctcgtggaacgctgcgcgttcacgtcgctacccatatggtgccactggtggcgccggtcgtggcgcgacttctgtccacctgtccggagctcaagatcgacctgcgcatgggggaggccgaagtcgacctgatcgaggaaggctacgatgttgccctgcgcatgacgcaaccgcgggattcgagccttgtcgtgcgaagcctcgccacttggcgccacgtgctgtgctgctcgcacgattatatcgacaagcacggccgcgtgcagaagctcgacgagctcaccgggcacaattgtgggcggcacttgaactatccgttcggcgacgaatggcgcttccttgaccgcaagggcacgccggcctccgtgcggatctcaggcagcttcgtcaccaacagcggggaggcgctgcgcgaggtcgcgctcgatggcgccgccgtgtgcctgatggccgggtttctcattcaggacgatctcgaagccggccgcctcgtgcgtctcttgccggaatatcgtacggtcgagctgtccatgaatgcggtctatccgcaccgccatcatctgtcggctaaagtcaggaccttcatcgacctgctcgtgcaccacagcgccgagcagcagaagctgatcaacccctactcatgatcggcgcgggggcggcaatcgtccgaatagtgtctccagcgcgattccgatagcaagcaggtgacggtcgcttcctgcggggccatccagctcgagcccgatcggcagttggctggtgtcgcccagcgcaatcgggatctgaattccgggaataccggcattgctcccgggatcggtgttctggatgaagagcccgaaattttcgaggctgctggaatcgggattggaggcaatcgcgacgcgcggcgttgtcgggaaagcgatggcgtcgagcctgtttcccgaaaacgtttcgctgtacagcgcctgaagcgcggggcgcgcgatcttgatcgcggcatcgtagatcggcctggcatcgatcagcgtgtcgttggggcccggcagtttgcgcgggataacgagcccatcataggtgcccttcacgtcggggctcgagatctccttcgccagcgcttcgacgctgagatcagtaccggtgtgcttcagatacgcaaccatgtcgtcgtatgcttcatacagcgcgaccggaaacccgacctgaccgttgagctcggccagtcgtggcatttcgatctccaggatcgtgatatgccgggctttcatcttcccgatcgccgtgtcgaatgcggccgcggtgtcggaatcgagattggccagcatagacgtcacgatgccgatgcgcacctgcttcaaatcagccggtgcaatctcgtctccgcccgcgatgatgcggtcgagcagcgcgacatcggccatggttgcggccatgggccccgcggtatcgcgggtatgtgagatgggcgcgatgccgttctgcgggtagcgtccgatcgtcggccgcagcgaggcgcacccattcagggcggcgggcacgcgcactgatccgccggtgtcggtgccgagcccgcccgcgacgatccgtgcgccgatcgcggcgcccgtgccggacgaggagccaccggcgatccgcgcgcgatcataggcattgcgcacgccgaactcggcgccggtcttgaacgcggtgttgtagccggagatgccgaaggccaattcgtgcatgctggtcttgccgatgatgattgctcccgcggcgcgcagctttgccacgacgggcgcgtccatcgctggaatgtaatccttcagcgccggggtaccggcgctgcagggcagcccggccacctcgatgttgtccttgatcacgaccggcacgccgccgagcggcttgcttctgtcgcctgccgcgtcgaacgcggtggcggcctccaaggcaccggtctcgtccagcgtgacgaagacattgaggccagcgttggctttggcgcgagccagggcttcccgcgtcagcgcggtgctcgtaaccttcccggcgcggaggccgtccgcggcctcggtcagtgtgagctggtcgaaatccatgatgcaattgcccgatcgcgggagcgccatcagggcgtccctccagggtcagaggctgaagcctcgctggcgccacgtcaaccgtttgcgcgcatcctggccggcaacggcgcgggaagttcggcgagcagtcgctcgatttcggacttcaccttcccgatggcggcatccttgaccgggccatagccgcggatctccatgggagccgctgcaatcgcgacgaggtccgtaagaggcgccgtgtcgagccggccgagcatccgctcgatcagcgcctcataccagccgatcagttcgcgctcggcgcgccgttccggggtgtagccgaacggatcgaacagcgttccgcgcagcgccttcaggcgtgcaagcatcgccagcggcatttggatccattggccgaaggcgcgtttgcgcggacgtccacgggcatcgcgccgcgacggcaggaacggcggcgcgaggtgatactggatcctgaagccatcttcgaattcgttcttcagttcgtccatgaagccgctttgcatgtgcagccgcgccacctcgtattcgtccttgtaggccatcagcttgaacagcgcgcgcgccactgtctcggtcagcgcctcgctgttcacgttggcttcggcattgcggactcttgcgacgaacgcccggtagcgggttgcataggcggcattctgataggccgtgaggaactcggcgcgccgggcgatgagatggtcgagcgtctcggctttcggcgcatcatccgtgctcggcaaaagacccggatcggccgctgcaatccgtccccaggcgaacgcctgcttgttgcgttcgacggtgacgccattgagctcgatcgcgcgcagcagcgcctgcagcgagacaggaacgaggccgcgctgccaggcaaagccaagcatgatgatattggcatagacggaatcgccgagcagccgttcggccagcgcattcgcattgatcgtatcgagattgccttcgccgatgacgcggccgatcgcgcgcaagcgggcatgggaggcgagatcggcgtcgcggaagcggaccacgtcgccggtcggcatctccgcggtattgaccgcggcgcgcgtgccgcgacgataggtgcctgatgccttcggcgaggagctgacgacaaggtcgcagccgatcagcgcatcggccgcgccctggtcgatgcggacctggtgcagcgcttcgggcgaagcggtaagccggatgtagctcagcacgggaccgaacttttgcgcaaagccggtaaaatccaggaccgagacgccacggcgttcgagatgagcggcgatgccgatcagcgcacccaccgtgatcacgccggtgcctccgacgcccgtcaccagcagatcgtagggccgatcgagagttgcggtcgcaggaagggtgagagcggccgcgcggccgatcgcatcgatctggcttgcggacttcttccggcgcgtggcgccttcgaccgtgacgaaacttgggcagaagccgttaagacaagaaaagtccttgttgcatgcggataggttgatctgccgcttgcggccaaacggcgtctccttcggctcgacgctgaggcagttggactcgaccgagcagtcgccgcaaccctcgcagacgaggtcgttgatgtaggcgaagcgtctgggatcggccatctgcccgcgcttgcgccgccgccgcttctcggtagcgcaggtctgctgatagatcagcaccgagacgccggaaacctcgcgcagctcacgctgaacgacattcatctcctctcgcggatggatggtgacgccggccggaagctcggccgggctgaagtgcgcgggatcatccgataccagtgcgatgcgctcaacgccttcggcgcggacgctatgcgcgatggcttgtacgctgacggggccgtcgaccggctggccgccggtcatcgcgacggcatcgttgaacaggatcttgtaggtgatgttggcgcctgctgcgatcgcctgccggatcgccatcgagccggaatggtagtaggtgccttcgccgagattctggaacacatgcttgcggccggtgaagcgcgacgaggccgcccagttcacgccctcgccgcccatctggatcagcgaagaggtctcgcggtccatccagctcgccatgaagtggcagccgatgccggcgagcgccttcgatccctccgggaccttcgtagacgtgttgtgcgggcagcccgagcagaaatagggcgtgcgggtcgcgccgccgacattgatcgtgcgcgccgcttccggcatcagggcggcggcgcgtgccgcgagattgaggcccgggaacatcgggtcaagccggcgcgccagcacagacgccagcgcccgcggcgacaattcgccgatccaggagatgagacgtgctccttgctcgtcgtgcttgccgaccatgcgctcgggcttgctgcccggatagtcgtagaagtattccttgaactggctctcgatgatgccgcgcttctcctccacgaccaggatctcgcgcttgcccttcacgaaatccatcgcatcatggagtgccagcggccagaccatgccgactttgtagatgtcgattccgatgttgcggcaagccgcttcatcgaggcccatcaggcgcagcgcttccatcaagtcgagatgcgccttgcccgtcgtgacgatgccataggtcgcacccggaatgtcgtagatgtggcggtcgatcggattggccttggcgaaggcgtagaccgcatgcttcttcgcctccagccgttcctcgatctgtgggcccggcaggtcgggccagcgatagtgcaggccgccgggcggtggcgtgaagtcgggcacgagaaaagcgcgcggggggcgcagggcgacggaagcgccggactccacgatctccgagatcgccttgaagccgacccacatgccggaaaagcggctcagcgcgtagccatattcgccgaaagcgagatattcgccgacgcttgcggggtgcagcgtcggcatgagccagctcatgaaggcgacgtcggactggtgcggcatcgaggaggacacgcaaccatggtcgtcaccggcgaccaccagcacgccgccctgcggcgaggagccgtaggcgttgccgtgcttgagcgcatcgcccgagcggtcgacccctgggcccttgccgtaccagaggccgaacacgccatcgacctcgcggtcggcttgcgtttcgacctgctgcgagccgagcactgcggttgccgcgaggtcttcgttgacggccggaagaaattcgatgcggtcccgcttgagccgttcctggatgcgccagagctcttgatcgatgccgccgagcggcgaaccgcgatagccggagatgaatccggccgtgttgaggcgggccgcacggtctctgagtgcctgatcgagcgcgatgcggacgatggcctgcgtgccggtgagaaagacgcggccctcctcacggtcgtagcggtcggagagctcgtaggtgtcgagtgatgaaattgcgtccatgacggacctcgcgcggcatcctgcccgatggtggaaggttacgcccgcgcagccggtagatcttacctatctcaccgatttgatctgtcatttcggtagagttttgcgtcaacggcctaattgtggtaggttcttccaggtcggttgggggctttcatgatcgaagagcaggacacgcggattctcgcgcatctccagaaggacggccgtgccacaaaccagcagctggctgatgaagtcggcatgtccacctcggcctgctggcgccgggtgcgagcgcttgaggacagcggcgtcatccagggctatgcggcgctggtcgctcgcgagcaggcgggctttgcaatgtccgccatcctccacgtgtcattggagcggcacgatgcgaagttcgtcgatgagttcgtggccagggtcaccaagcgccgcgaggtgctggagtgctttgcgacgacgggcgatgccgattatcatctgcgtgtcgtcgtgcaggacatggccgcctacaacaggtttcttgacgagttcatgttccgcatccccggcatccgctacgtccgcagcaacgtggtcctgaaggagatcaagacgagtgtggagctgccgttttgaacctgactgatgtcggcgtctaacgcgcgtcccttgtgtctctggtgggcagcatgcgcgtcgcacgttccggcctgtcgcattgctgttcggcttcgccgagaaccacggcgagcgcttcgtcgaaatcccgaacgagcccgagcttgaccagaactctcccgagcgcgctgaatgcgtcgggcgcatcaggcttcagcctgatgacttcccggtaattgcgggcggcttccatatgctcgttgagagcctcgcaggactgcgcgagacagaaccaggacttgtgcgtctcgggcttgatcgccgtcagcagcttgaacaatcgccttgccgcaacgtgatttccgcgcgtggcatagagctggccgaggcggtggatcgcgtccggatttcctggctcgacgtcgaggatttgccggtagccgcgctccgcatcggcgagcttgacggcctggtgtagcctggtcgcctcttcgagggcatcaccgagggttctccggtcgagccggccaccgagattgaggccgtttctcgtgctgatggtgacactgcgaatgcgccgttccttgaccccgaacgaatacttgtagggttcatttccacgcagaaagtcatactccgcgaaaccgtcggcgatggcccggcgaatgctgtaggcatgcaggatcactccggccggcggtccgtcatggctttcgtcacggcccgtcatgtagaacaggaagctgcgttttctccggtcgatcagggtggcaagggccgcaagtgggcgatcattctgccacaatgtcggcaagaacagcaggccggacctgaagctcgtggtcagcatggcgcggtttgaacgaacgagcttgtcgacgagaccacccttgcgcggccgccattttgtttcccagagctggagaagcgtattgagatcgcgatcgatcgtctcggccgttgcctcggtgatgcgaaactctcccggagcgtccaccagcttgagcaggcgcctgatcttttgcctcgtattggcgctcaggccggcgaggtaagcgtcccagtcggccggaagcgaagcgaacgggcatacgttgttgtcgatgccgtcgaccttgttgatccggttgacctcgtcgtgctgaaacttcgccttcgggaaatgcgccatgagcaggcgataacgtgtcccggacaggcgaatattgtcgaggttcacgcgcgcccaattcatgcgcttgagctgtcttgcgaaagccgggatcgcctggctttcgaagcgagacgcgcacaggatgccggtataatcagcagagaaattgccggccatgttgagctcgttgcggaacttcccatcggttgacttgaagtaggtccgcaacggccaaaaagcgacatacggagcgccgtcgtcgtcgctctcgcgggcggccaggatcagccaaggccccgcaatctgccgaagccatccagccaaccatttccaggacagaaagagctgcgcgtcagggtccgcatcatacaccgcgttccagttgtcctcgatacgctcgaagtcatcgaacgtctctatcagatcgatgtgcacagtgccctcactctatcagttggctacgaattgacctgggactcccgtcgttaccgctcccggaatgcccgcatcatgctgtcgtggatcggcttcgcgatgtattggaagaaagtccgctcgtgggtcttgatgtagacctcgacctgcatacccggtgtcgggctgaaatcggggattgccatcgcttcgttcctgttgagcttcacccgcacgatgtagatgtcggttggtccgacctgctgcgatttgcgctcgtcggcgagcgtgtccgcggacaagtagatcacgtcgcctgagatcatcggcgtaatccgctggttgagcgcggtcaggcggaccatcgcgtgctgtccgttcttcatggtgtcaatgtcctgcggccgaacccgagcctcgatgatcagctcttcctgaagaggcaggatttccatgatggtcttgctgggctcgaccacgccaccctgggtgtgatagcgcagcttgaccacgactcccttgacgggggcggtgatccgaatgcggtccaatacgccttgggcggcgagcatgcgctcgcgtacatccgcaagctctccccgcacctcgtgcatctgctccacggcgaccttgatcgcggttttgcgcacgccgttgatttgctccttggaacgcgcgatgcgctccttggcgtcgccgatttcgccgaggatgcgaccgatctcgccctcgagattggcctttgtgcgctgcagaaccagcagttcaggcttgcgaacgaggcccgtctgcagcaggtaccgcttggtctcgatctcgtcgtccagcagagcgatttgacgccgcacgccatcgagctgcacatttgagccctgaatacgctcgctgagggcgttgatgccctcctcgatgccggcaatgtcgctattcagattgttcctgcgtgcgatgaaggtgagtttctgactttcgatgatctgcgaaatttccggatcgcttgtggccgagagaaccgaatccggaaattgaatctctgcatcctcgcgcatctccgcctggagcctggcatcgatcgcgctcaggcgcaggctgcgcaggtacaaacgccgcagctccgcgcgagggacggtgtcatcgagttcgacgaggagttgcttctgctcgaccagatcgccctcccgcacatggatggtgcggatcaccccaccctcgagatgctgaatgatcttgttctggcccgtggcgacgaacacgccggaggcgaccacggcgccggcaatgggagcgacattgccccagacgccaaagccgcatagcatcactgtcatcacgatgatgcccgcgatggtaggaagccgcgtcgaacggggcaaattcgcgtaccaggcagcttcgggcggttgttgacggagaacaaggtccttcgacattggacagtccgatcatgctctaggaattcagcaagggtggaccgtcgccgccgttcggcttccgtccggtgatgagtggaatgatctcgtccctcgtgccgaaggcctgaacggctccgctgctcaggatcatgatcttgtcgacgcttctcaggagggcggcccgttgcgtcacggtgaccaccgtgatcccgcgatccttggcgcgcaggagagccttggccagagcgcgttcaccactggcgtcgagatttgagttcggctcgtcgagcaccatgaggcggggattgccgtagaacgcgcgggcgagcccgatgcgctgcctctgaccgccggacaggggacttccgtccatcccgacgatggtctcgtacccctgtgcaaagctggagatcatttcgtggacgtcggcgagctcggctgcatcgaagatgtcggcgtcgatcgcatcctcgcgcatccgcgcgatgttggccttgatcgaggccggaaagagctgaacgtcctgcgggagatatccgcaactctcgccgaattgcctcggatcccagttgcgcaggtccatcatgtccagtcgcacattgcctgcggtcgggatgatcgagccgacgagcatgcgggccagcatggtctttccggcgccggagtcgccgacgatggccagcgactcgcccggctcgagctggaagctgatgccattcaggatgaccttcttcgttggcggcggaacgtagagaattcgctcgacgctgaggtgcccctgtgggcgcggcaggcgcagccggtcgagattgagcggagagctctggagcagagctttcacccggctgtaagcggatcgcgcctgaacgaagttgcgccaaccctcgatcgtgccttcgagcggagcgagggcgcgactggcgacgatcgagcctgcgatgatcatgccgccggtcagctggccttcgagggcaagccaggcgccccagccaagaatcgcgatctgcgtgcaaagtcgcaggaacttggagatcccggtcatcaggatgttgagatcctgtgcaatgacctgttccttcagtgactcgacggtctcgcgtccccagacgagaacgccctccgggatcatccccatcgcgttgatgacctgggcgttgcgcgccatggcctcggcctgcagatttgcccgcgttccgtaggcgttggcccgcgtgaatggcatcgccgtgattctctgattgagcaaggcgacacccatcaacagcacgcccgaggacagcacgatcagcccgagatgggggtgaacaagaaagacgacggcgaagtagatcggggtcacgggagcatcgaacatggtgagcaacaccggaccggtgatgaacgaacgcaggtgctggagatcggcaagggtctggaactcacggcttgatccggtttgcgccgcctttgctgcggcactcagcaccgggccgccgagccgcgcttccgtgtccacggcgacgcgcatcaggatgatgcggcgaagcacgtccatcagcacgtgagcggcgatcgcggcgacgacgatcatggtcagcatcacaagagtgtctgtgctgcggctggtcagcacccggtccgacatgttgaagagatagacggggatcgcgagtacgagcagattgaccattaccgagaagattccgacggtgacgagattgcgccgcgcgccggagagccccttgccgagcacgtcacggaactcgttgtccccggatcgtttgtgtaagggctgtgagccgccgccattgccgcgtccgccgccgcttgcggctccgccgccgcctccgccgggcggagctgggctggccgagccgttgccgatcgacgccttatcggtcgtcccgcgcgcgtcgctgcgcgcaggcgttcctcggggttgttgaacggctggctgctccagtcttgcggcggaggcgggcgtgggtgtcgcagcggacacggttccggacgtgggggtagggggcattgcgtccgggcttgggggctgcggtcgctctccgggcaacggagaaacgatcgatgcgtcgctgcggctttctcggccgtggggacggccgggaaacgtgagaactctggcggtatctccgtcggcagaggtgctgtcttcgatgtcgcgcgcgagatcgcgcttctcctcgctgccccaacccattgaccgccctcctgtatccgccattcaaccgatgcttctggttcgcctgcgttctagtgcatgacgttggagatggcgtcgtcgcagggcggtgggggcggcgctggtggcgcctgctgctcctcgtcctgcgcgtcggtcacgaatgccacgagctcggacaccaatgtttgggtatccctggcgagagcggggtcggcgtcggtcggcagcaggtttgcctggaccagaatcgtgtcgccatagacctggccgccgacataggcgtctgtcggtccgacatcgacgatggctgcgtcgttggtcagcatgttcgcgcccgtgctggcgacctgagcgccatcgtcgccgggatgaagttgttgcgcggcgtccgacggacgctcgagaagctgaagcagcacatcgacgtccgagaccacgttggtctgccagaccgcattgatgtcgtagtagtcgccggtaatgtagaggacctcgaaggtcccacccgtccccgggagcaacgttccggtttccggatccagtccgggtatgccgtttgcgagtgcggcaacgaggctctccaagcccggggtgagcggcaggaaattgtcgttaccgaacgtctcgatggtggccgcgttcaggagctcgttctggcccgcagcgagtgattgcgtctgctcgtcgcctttggcgagctgggtgacggcgtcattgtccaggagaatgttgttctggaagatcacgttcatgccgtgataggcgccggcaacgatgatcagatcgtaatggaagctgccattgaagatctgtgcgagattcccctgttcgttctctccagagatcaggtcatagtgattgctgccgcccgtctggacgattacgtcattgtcgagcagatagttcatctgcacgagggtctgaacgttgtagtagtcgccgttgacgacatcgacatgccagttcggtcccgcataggtcgccggcatcaggctgtagacgccggggtgctggatgaagtcggcaatgttgtcggtgatgtcgtctcccgcggtcatcgatccgtcttcggcttgcgaagctgcgatttggtcctcgtccatcaacgagttggtctggaagatcgcgttggtatggaaatagtcccccttcacgatcatggatcggccggactcgctgagatcaacgatcatggcgccgttgaagctgacgttgccgcctgcctcggcccaaaggccaaggccgtttcctgtgtctggatcggcgggcctgccgagctctggagaggggggctctggggcgggcgtctgaagttcgccattgagatagtatccgggcacaacggaattggcgttgacggtgccatcgtgcgcgacttggccgttgtcgaaatcctggacgaaggcggtcactcctgcaccgttctggggaatccaccattggctcgggatctgcccattggcgtcatccgccatatgttgcaggagtgaagccgcctgcgcgctgatttgcgcggcctgggcagagagcactcccgtgtcgccgctcccgaagctgccttggagggatatgtcattgtccagcattccgttgagctgacgtatctggatttggccctgttcgccgccgggctcgtggatcaccttgatctcatggtccgagccgccgccgccaccgccggcgccggggcggaatatcggcgttgcaggcagcctcgtcggcagatcgagatcatcgtcgattgggataccctgcgatctcacctgcggcagcttggaaaggatgtgatcgtcaaggagtcggatgacgggaggaccgatcggcgtcgtatcgaatgcatcgagatcgtggtcgcgatcgaaatccggccgcggcgtcttgtagtcgtccagcggcttcggaagggcaggcccttcgtaggccgtgcgatcgcgtgcaatatcgtcggtgatgcgcaggtgggcgatgaaatgccaaaccagttcggtgattccgccaggaaccatgagagcctcccgtcacaggcccacgagccaaaaaatctcgcgcaagggaagcgcggagcttaaatgaatcacggtcgttgcaaatatgccggccaaaaagtcccgcgcggcaggcgccgcgcgggtcgcgtcacgtgtcagccgagatcgtggctgtcctggaggtcgttgcctgccacactcatcgtgatgctgttgaactggatgttcgcaccctgcgtgatggtctggttgaaggcttcctggctgatggcagcgtcggcagacgcagtgacgccacttgccgaatcgccgatcacgtcctcgatgtcggaatgcatcttgacgtcgccgccctcggccttggcgtccatcctgaactcgccgcccttgccgtcgtagtcgaccgacgagcggttccagtcgttgtcgatcaggttgttgacctggtcgatattgaactggttgccattgccgtccagcttctggtcaaccacgtcgggcatgatgaccgagcccttgacgtcgctcaggcacgacaggtcgatcacggggctgctcaggccgtcggccttgagatcgagatcgatatcgacgtcaacctcgacgttgaccttggtgtcgacggtattctcgaccttgttctcgatctcgttgtcgacgtcattgtcgacactgttggccagcttgttgtcgaccttgttgtcgatcgagttctcgttctcgttcttgttctcgttgctgttgtcgttgtcgttctcgttctcgttctcactcttggagtcgagcgactgaacggcaagctgggcttgaccttgcgcctgcccctgaccttggccctgaagctgaccttgcagctggccttgcaggttggcttgcttctggtcctgctcttgatcctggtcctgatccggatcgtacttcttcttgggatagctcatgacgaactcctgctggattaaggagcatcgtcgttctggagatcgctgatcttctgcgtctgcgacgaccaagactacgatgcgattgaagccggatgttccggctgcgaccctcccgcgatcattcacgagacttcgcaggctcaacgttgctcgggtcggattgattggctagttgcacattcgtgctatcgcacggccgcgaagaaggcgtcgcaacaagctgttcgtatgcgtctgccctgtctattgatgtaggtcgtcacacgcgtgtcgctaacccttttgggggaggggcatgacccaaaggagtagagagcccgttactgcatcactcgatcggtcgagtggggccgcacgtaagcgttgcagcagcaacgtcggcgcggtctgcggcagaggtcggcatagtcgtgaaaggcgaccggttcagctggggcggccggaagatcaacgcgcggcatccgtcgaacggatatggctttcaagccggggcagcagatcccagatctcccggttaatgcgggtcatgtccttcgtggcgttgaccatgctcttgagccgagcgtcatccatcggctttctttctccgaactgcaggccattcttgctctgcgagatgcgcatcgactgagtagaggtgatctgtccggtagaatccacgatgtacatacaatggttgaattcgttgcggatttgagtagtttcattgaaccgctcgatcaccttcgtgagggcgacgttgagctgcttgtcctttatcgtgatcttcgcaagcctctgtatgaggtcgagccgggctcgcgtggtgttgagagttgcgaaggtcagtgcagcggaggcctgatcggtccgcagcaggatcatgagcacatagatgaacaggctctcattgttcgaccagctggagaccaggtttccgatcagcgccaggatcagcgtgcgccgatcggccgaggcgggagctgcggctgcgatcgcgtcgaaatcgggtttggatggaagtcgaccggacggcatggttcagggctcgctcctacgcaacacgtacagcgcgctcagaatgaatgcgatcgaaatatacgagagggtctgcgaacgggcaagacgctggcgagatcggtagaggtcttcgcgctgcaacaagcagcggggttgaagatgtggcattgggtgcgggacacggttcgggtccgaagagcccgcaaggctgcggccgatatgctcgtgccgatcgtcgagcaaagccgcgcgcgtcttggcgggatcagcgaggccgtctggtcggatccctacatcactggtcttgtcgttatgcttattagcgtcgtcgcaagggtcgagggtggagagttctctgaacgtgcgctcttccgtattcaacacggagcttggcacgatattacgtccgttcgagatagcgggattgcggagcgtttcatgctgttgaacaagggccgcgatcgtgacttcgagctaggctgtcacaatgcggcggcgttcgctctcgttttgttcagtacgaaagaaatgctggaaggagcgggtgtgccgctcgtcgatactttgcttgatagtccggtggcgcaacgggaggatgttcgagaggcatggtcgcaatgcttcgatgcctatatttgtgcgcgcgcgaatgacccggtcggctgtcgcgatcagctgtgacgtcgggccgctgctgactttgaataactgtgagttgtgcatggtgggcagatatgataaatgcaaacattatttcattcaaagctaccaagaaaattttagatcaggcggggtaatcattacaagagggtagcatcgtgcgtaatttgttgcatttgagttcgcagccttccctgcggtcactttcagaaagccatttgattgcgccaccgtcaggcgatggcggagccgatgatgatgatgccgtcggtcactttgcggaggaggtatgcttctctgcgccgattgagattccgctctctcctgcgtcgagctcgcggcagctcattcggggctcgaaaagggtgcgtggtggcgatccgttctcggacgagtcgccggaagcggttgagcgcggcgctcccaatggattcgacttcgagcagccggaagccacgattgcctcgaagctgaagcctacgatcgtggtgattcatccacgtgccgtatttcgagattgtttcgcccgctgcctcgaggtttcataccaggatcatcacgtctattcgtttgcgagcgtagaggactggcgtggttctacggagccgctggcttcggcgccggcagtcgtcatcatcgtggttgagtccggagacgcatcgagcttgaatgatctccagagtctggatagcgcgaccggcaaaacgtcctttgttgtcgtgtcggacgtagatgatgtcgatcacattgttcgaaccttgaagcgtggagcgcgtggatacatccccagcaatctcccgttcaatgtcgccgtggaagcggtgcggctggtcgaggccggagggatcttcgttcccgcgagcagcttcgttgatcgtgagccaccgcctgccccggtcaagccgcaagtaacgcttacagaacgacagaccgccgttctcgaggcaatccgtcatggcaaagccaataagcagattgcctatgagctcaacatgagcgagcatacggtcaaggtccacctccgccatatcatgcggaagctgaaggtccgtaaccggaccgaggcagccatcttgcccaagagcctcatttcgtcgaaggactagcgcctaccgcccctcccgcacgaacctgttccgcagcgtgccaacgcctgtgatctcgacctccacgacgtcgccgtgcttgatatccggcgaggcgccgtcggtacccatccagatcacatcgccgggccagagcgtaaagtacttggtcagctcgaccaggaagggcaccacgccgaagatcatgtcgttggtgtggaagcggttggtctcgcggccgttgacccggacgatggtctccatcttgtcgagatcggcgtccgtctcgatccacgggcccatcggcttgaacgtatcggcgttcttcgagcgccacaggccgcgatccgccttctgccagttgcgttcgctgacgtcgttgccgatggtgtagccgaacacgcaatccatcgcattcgcttcggtgagatgcttgaccttcttgccgatcaccacgacaagctcgccttcatagtggatcttgtccgtcgcgaaggaggggatcacgacgtcctcgccatgggcgatcagcgcgttctgtgcgcgatagccgatctcgggacggtcggggactgccggcacctcgccgcgcttgtccgcggcctccttcaggtgcctgaggtaattcagcccgacgcaatagaaggttcgcgggatcagtggcagctcgatcttcacctgggacagcggaaggatgcgcgacgtgcgccgccattcgccgaagggatcaccgtcaacagcgacgacctgctcgccttcgataattccccaggaggtcctgcccgaggcggtgaacttcaaccagcgcatgctctgtactcccggtcattccgccgcttcgggcggctgcaccttccaggcgccggcggccgggcgcctgagcccgagattctcgcgcagcgtcctgccgcgatagtcctcttggaacagcccgcgccgttgcagttccggcacgacgtgtcgcacgaagtccgcgtaggagccgggcacatgggttgcggcaatgacaaagccatcgcagccgcgctcgacgaacatctcctccagcctgtccgcgatctcccttgggccgccgaccatggcgtcctggacctggccgcggccggagaaggtgacgaagtcgcgtgcgctcggattgctcttgcccgaactcttcagcacgccgtcgcggatacccagaatgccctgcatgctcttcagttcttccgtcgtcagcggctcgtcgagacccttggaggcgaagtcatagttgagcgcttcggcgagcagcgacagcgcgtcgatctcgagcggcagcttgttgatcaacgccatcttgtcctcggcttcagcctttgtcgcggcgcagaccggcgtcgtcaagttgcagaggaacatctggtcgggatcgcgtccggcctttgcggcttcgttgcgcacggacgcatagccttccttggcggcggtgagattacgcgcggccgtgaagatcacctcgccccatcgcccggcgaagcgctgaccgcggccggaagcgccggcctggatgattacaggatggccctgctgcgaacgcgggacggtgaacggtccgcgcgacttgaaggcctgtcccctgtggtcgagccgcttcaccttggcgggatcggcgaagcggccgcttgtcttgtccatgatcagcgcgccgtcttcccaggtgtcccaatggccgagcacgacttccatgaactcatcggcgcggtcgtagcgggaatcatgttcgggatgggaatcccggcccatgttgagggcttcgccgtcgttcagcgaagtgacgacattccatccggcgcgtccacccgacatcaggtcgagcgttgcaaagcgccgggccacgtcgaagggctcgtaataggtggtcgagcaggtggcacccaagccgagcttctcggtgaccatgcccatcgtggtcagcacgatcagcgggtccatcttcacgcagcggatgccgtattcgacggtgtgggcgtggtcgttgccgtagcggtccggcatcgccaggcgatcgtcgaagaaggccatgtggaacttgccggcttcgagaattctggcgatctcctgataatagtccgccgacatcgagtcgttgcgggagtcgggatgtcgccaggaactcggcaggttcgtgcagttctgcgcctgaaggaagccgacgaggaccatctgccgattcatgctgctgctctcctgatgacgtcaggccagatcgaggacggtgtcgagcctgtattcgcacgccagcgcgcgcagcctttcccaggtggcatcctcgatctcaatgccgtcgcgcaggcgctgctgctggcgcagcccttcgatctcaccggggtagaacacgccgttgctgtcttcggacggcggcgtcgatttcagataacgtgcgaattccgcgacctcgcgcttgaactccttcagcggtctgaatgctgcgacattgaagaccgccatgaagcatccgtcgttgtgtcgccccgtcggctcgaccccgaagccgagaccggtgagcaggccgcagagcacctcgaccatggctgcaagcccgctgcccttgtagccctcggtaccgccgagcggcagcagcgcgccgcccttgcggtattgcgtgggatcggtggtgtgccgcccctcggcgtcgatgatccatccggtggggatttcctggccacgggcgaccgcgagctggatcttgccggcagccaccgccgaggtcgccatgtccagacagaacggcgtatcgagatcggacggcaccgcgatcgaaatcggattggtgccgagccgcgcctccttgccgccgaacggcgccacgtgcttcggcgaacggccggagtccgccgtcgcaatcccgatcatgccctcgcgcatcgccatcagcgggtaggccgccaggcgcccgacatggctctgtcggaacacggtgcaagcggcgacgttggccgtcttcgccttctcgatcgtcagcgccatcgccctggcgttgacatggaagccaaaaccccaatggccgtcgatcacggtcgtggtcggggattcctgaacgatggtccacttggcgccgggaacgatgtggccggccttgatgcggtcgatataggtgggaacggcgatcaccccgtgggaatcatggccggcgagattggcgttgacgcagccgatggcgacggcgtcggcttcctcctccgaagcgccggcggcgcggagcagcgcggcgctgatgcgcctcaggcgatcggctttgacgatcggcatggcgttccctcggatttggcccctaacaggctgctcgttggtcgcatcgtctcaaagcgccgccgcgatatcaatctcccgtaaaccaatacagggctgcaatttcgtggagaggacgcaccctttgtcgaagattcgtcccgcatggcggcattttcgacagtttggcgcccctcattcgtagctcattcactttgatggatggtttgcagcgcgcaataacgaccacttaggcgatcaccgttgataaaggcaccgggagaaataggcagaatgcccgggagctgagatcgtgccgacgacactcgcgcgcacctttgcggcgttgagcgccattaacgaagcgatcctctatgcgaaatcgcccgacgagctgtaccagaaggtctgcgacgccgggttttcgagtggggacttcttgggcgtcgccgtgttcctggtgggaccggacggccgccggctgcattttgcggcgggctgcggcgacgacgttgaacggctgcgctccatcgggatcacgacggaagccggtacccctgaaggctcgggcgtcggcggtgaggcctttcgcgagcagaagctatgcgtctccaacgactatctgagcgatccgcgctcgctggcgtggcgcgagagcgccgccaaggcccacatcggtgcggctgcggcgctgccgctgctttgcgacggcaagagcgtcggcgtattgtacgtgacgagcggagaggccaattcgctgaacgagcagatggtgtcgctgttcgagcgcatgtcggcgaacatttcctatgcgctggacaattttgcgcgcgagaccgcgcggcaggtcagcgagcaggcgacacggcggctcaaccgcatgttcggcgccatcagcgccaccaacgaggccatcctccgcgcgaagaccgagcaggagctgtatcagctcgtgtgcgacgcctccgtccacagcggcaagtcgctggcgaccatcgtgctgctacgtgagccggattcacactggatggttccggtcgcggccacggggcagaacctcgagctggtcacccaggcgcgctattcggtcgacccggacaatccctacggcaagggcatctccggcgaggtgtttcggacccagaaggccatcgtcgaggaggatctcgcaagccgcaccaggggcacgccgtgggagcaggccaaggtcaacaccggcgttgccgcctgcgtgattgcgcgctgatcaaacgcggcgcaagcgtcggcgtcctgcagttcttcgtcagccgctcctgggtcaaggacgaggagatcgtcgcgctattgctgcgcatggcggagaacgtctctttcgcgatcgagaatttcggccgcgaggccgagaaagccagcatcgctgcgggagaagaacgcctggcgcgaatgtatgcggcactcagcgccaccaacgaggcgatcctgcgcgctgggtcgcggaccgagctgttcgatctcgtgtgcgaggcgacggccaagggagccaagttcacctccgccaccatcgcgctcgccgaccatcacgctgagctgcttcgcgtcgttgcttcctacgggccgaatgcggatcaggtccgcaacttcacgttctccacctccgaccgggttcccgaagggcgcgggctgacgggcaccgcgttccgcagccggcagcccgccgtcagcaacgacgtgctcgccgatgaccgcatggcgccgtggcaggccagcgcccaccgcaacggcatcgcgtcctccgcggcactgccgctgctcaacggcgaccgcgtggagggcgtcttcctgttcaactctccggagcgcggcaccttcacgcccgagctcgtcgagctgctgcgcaagctccaggccaatgtcgccttcgcgctcgagagtttcgaccgcgccgacgagaaggcgcgagcggacaagcagcgcaatcgtctgagcggcatgttcgaggcgctgagcgcaaccaatgaagccatcatgcgcgccaagacgcgcgaggaattgttcgaggccgcctgccaggcggctgtgctcggcgacctcttcgcctcggcgacgatcggcatcatcgatgacgaacttcaggtcgttcgcgtcgtcgccgtcaaggggcgcctgcaggagcgcatgatcggacgtacctgcagcatttccgccggccatcccgagggcgaaggcatcatcggcacctcgctgcggacgcgccaacccagtgtcatgaacgactatctgaacgagccgagctccgcgcactggcgcacaaaggccgtcgaggatggaacgcgggctgcggcgagcttcccgctgctcaggggaggacaggaaccggtcggcattctgctcttcctcgcgctggaagagaacacgttcacgcccgatctggtcgcgctgctcgggcgattggcggaaaacgtctccttcgcactcgacaacttcgagcgcgccgaggagaaggcccgcaccgaagcgcagaaggaacgcctgacgcgcatgttcgcgtctttgagtgcgaccaacgaggcgatcatgcgggcgaagtcgcgcgccgagctgttcgacctcgtctgccttgcagcatccaacggcgccaagttcacctcgaccacgattgcgctggccagggccggcacggatcagctcgagatcgtcgccaccgccggtccgtccgccgacaccacgcgcaacgtccgtctctccatcgatcccgagcggccggaagggcgcgggatgagcggaacggcgttccgcacgcggcagccctgcatcagcaacgattatctcaacgacgaccgcgtccgtgtcttccatgccatcgtccgtggagacggagcgcggtcgggcgccgccttcccgctcatcgtgcacgatcaggccgtcggcgtgatgatctacatgtcgaccgaaccggccaccttcacgcctgagttcgtcgagctgttgcagcgccttgcggaaaacgtctccttcgccatggagaatttcgaccgcgccgacgcgaagaaggatgccgacgagcggatcgagtacctcgcatcgcatgacagcctgaccgacctgccgaaccgcgagaccttcaacgggctgttgcgtgacgcgatcgatgcggcgcagcgccgcgatcaccgcttcgcggtgctcttcatcgatctcgaccggttcaaggtcatcaacgattccctgggtcacgaggccggcgacctgctcctgctcgaagtggcgaaccgcttgcgtggtgcgctgcggaccagtgacgtggtggcgcggctcggcggcgatgagttcgtcgtgattctcgaccagtgcggggagatcgacgccgttcagcgcatcgcgaccgagctgctcgccgtgcttgccgagcccatggaactggcgggtcacgagtgccacaccacggcctcgatcggcatcgccatgtatccggcgaacggctccgacgcgcagacgctgaccaagaatgccgacatggcgatgtacctcgccaaggaggacggcaagaacggctatcgattcttctccaatgaagtgaagacgcagtcgatcgagcggctgtcgctcgagagcgcgctgcggcgcgcgctcgagcgcgagcagttctcgctgaattaccagcccaaggtggacatggagacgggtcagatcaccggcgtcgaagcgctgctgcgctggacccatccggatctcggcagcatctcgcccgcccagttcattccgcttgcggaggaaaccgggctgatcgtgccgatcggccgctgggtgctgaatgaggcctgcgcgcaggccatggcctggcagcgccgcggcctgctgccgctgtccatggccgtcaacctgtcgccgcggcagttcgcggacgagcatctgttgcaggacgtcgatgaggcgctggccgcctccgggatgtcgccggtcctgctccagctggaggtcaccgagagcatgatgatgcgcaatgtcgggcgcgcgctcaaggtgctcgactccatccagagccgcggcatccgtcttgccattgacgatttcggcaccggctattcgtcgatgtcgctgatgaagcactttccgatcgacaccatcaagatcgaccgctccttcgtgcgcgatctgccgcaggattcggaggaccaggcgatcgcgcaggcgatcatcagcatgggtaaggcacttggcatgaccgtcgtcgccgaaggcgtcgagaatgccgagcaggagacgttcctgcggacccatggctgcgacgagatgcagggcttcctcgtctccaagccgctgccggcgcggcagatggccgagctgctccggccgatggtgctgccggtcgcgcccccgctccagccggagtctgccgacgaaggcgcagcgtcacggctgaaacgcgctgtcgtctgacggctgcgggtgcagctcacgagactctgcagcctcgctctccaccttgcgcggaaagtcgtccggccacggtagcgaggtctgtttctcgaacagcgcaagaagtagggacgccccgcctgcaaaggtcgatccgtcgtcgaggccgagcgtgcgcgaccatgcccttggcatcggctggggcgcgtcgcgtactgcgatcgcgggtccccaccaccaggccggtgccggcgaccgttcgttgtcgggcacggcgagccagcgggcgaactcgttcaccacgcgctcgaattgcaggcttgcggcctggtgcattcgctccgtgctccttgtcgcgcctgaaagcaggccgatgcgcgcactcggtcgtgatctcgaagctctgaagaacggcgcgtcgcgcagccacgtatgccgctccatcggcggccatatcaccatcacccggtggccggacaagcggcgacgcgggtttctatcgtctcttcgttctctttagcggcttaacgtctccgccggcaaggtccaatgcggttgcctaacgcgatctgaacggatgcgccttctggtgccaggcccaggcggtccggatgatcgtcggcaggtcggagtggcgcggcacgaagttcagcacctttctggcggcggagggatctgcgaccagataggtgggatcgcccgcgcgtcggggcttgacggtgtgcggcacctcgcgcccggtctcctgcctgatggcgtcgaggatctcgcgtaccgaaaagccggaaccggtgccgagattgaagctggcgccggcatgtccttgctccagaagcttcagcgccgcgacatgtgccgccgcgaggtcggtgacgtggatgtagtcgcggatcgcggtgccgtcgggcgtgtcgtagtcgtcgccgaacacggcgaagtcgacatgcccctgaagcgccatcatcgcccgcggaatgaggtgggtttcattgtcgcgcaattcgccgatgccgccgcccggatcggcgccgctggcattgaaatagcgcaggcagaacgcgccgaagccataagccgtgcggtagtcggcgagcatgcgctcgatcatcagcttcgatgcgccatacggattgatcggcgtgcaggggaagtcctccggcagttccttggaatcggcattgccgtagacggcgccggtcgaggagaacacgatgcgatggcaaccggcgttgcgcatcgcctgcaacagcgagagtgtgccctggacgttgttgatgtagtacttctgcgggtcggtcatggactccccgacgagactcgccgccgcgaaatgcatgaccgccgtgatcctgtggtcggcgaaggcgcgcgccagcatcgcgccgtcgagcaggtcgcccgccacaagcgggccgtctacgaagctgcgatgacctgtcgaaagattgtcgtaaacgacgggctgatagccggcggcggtcaatgcgcggcacgcatgcgagccaatgtagcctgcgcccccggtgacgaggacggtcggtcggtcggtcatgtcgtcttctgctcttctcttagcggagggggcggttgcggctgaagagaagatagagcgcgcgggggttggtggtcaaatagcgccagaacaggcggcgcggctcgagcaaggtgcgccaggcccattcgagtccgatcttctgcatccattgcggcgcgcgggaacggcttccggacaagaagttgaacagaccgccggatgtcttgatgacgccaacattgctcaggtgcggcgtgaactccttcacgaatgcctgctcgttgggcacgccgagcgcgacccacagatagtccggcgccagggcgttgatctcctcgatcttcgcacgcaacgcttcgcctcgcagatagccgtggctgcgcccgacgatcttgaggcgcggatacattttctggacgttctcgaccgccgcggcgttctcggcctcgcttgcaccgaacatatagaatgtgcggccgaccgcttctgccttgcgcgcgacgacgtggaacaggtcggtggtcgcaacgcgctccggcagcgggaaccaggattgcagcttcgaggccgcgaccagtggctgaccgtcggcgttgatcaggtcggcggcgcggaacaggtactcggtctgcggctcggtcgaacagcgcgccagcacctccccgttggctgaggtcagaaacagcggacggccgatgcgattttcagggtcggttgcctcgatcatgaaatcggcggtggcttccaggtcgagcgctgccaagcgaagcccgccgagggtgatcctcggcacgtcggcagttgctgcccgtccgtcgaggttgacgcggcgctcaagcatattgtttgcctcgctggcgcgtttggatttcaggggcgagctcgtcgagcacgaccccaacgagcttgcgctcggcgggaccgagcgcggcgaggatctcctcgaggctgtcgttgatgtcgagatcggtcggcagcacggccaccagcgagtccgtgtcgtcgaggagcttgcggccgccggccgagagcggcatcgccgggccgtcgaggatcacgagatcatacccggccgcagagcgagcctgcgtgatcgccttgcggatcgccgcagccgcctttccggcgtcggcttccgcggccggcagcaccgagacaccgttgaccgttttgatctcgcgtgcggccttgctgccgatcgagagccagccgagcttgctcggttcggtcctgcccaaacggatcaccttgttcgagagggatcgggcctgatggtcggcatcgatcatcagcacgcgggcaccgtcgcgagcagctgccagggcgaaattcagtgcgatcacgctccgcccgctgctctcgccgggactgacgagcgcgatcaccggcatcgccttgccgccggcgcgccgggacgcagcttcgcgcatgtcccgccaggcgttgagcagcgcggtcagggcaaagccgggacggagcgtcggccaacccaagcgcgtgagatcgacggactggcccgttgcgagtattgcgccgagcgtgtggatgacgtcggcctcctggaagcgtgcgatcagcggtttttcgatcacgggcctctcgaacatcgaaggctgcagcggaggcgcggcaagttccggcggagcctgcgcaacttccggggcgcgcgaaatcggctgcggctgggtgagctcggcggtccgtggaggctctgcagccgtcgggggctgcggggcgggcgtgcgctcgcggcgggccggtgagggcgccggtgtggtggcgccgacgagcaggagctcggctgcagcgaaccagcctgacgctgcgatcgcgccgaagatgaagccgatcatggcgaacaagctcattgccggcgggaacgagcgccgctgcggcaccgtcgcctcgccgatgacgcgggctgccgaagtgttcaggctctcctgctcctccgtctcgcgggagcgcttgagaaaggattgatagacgtcgcggctggcatcgacctcgcgttcgagctcgcgcaggcgcacggcggcctggctgagctggacgctctgccgcttctgcgcttccagcgcccgattgagcgaggcttcgaaatcgcgggcgcgcgtcaaatcgttcttggcggcctgggtgaagcggtcgatctcttcgttgatggtgcgcttgaggtcttcgacctgcttctcggtctggcgcagcgccggatggcgcggcccgagctcgctggcctgctccgcatatttcttgcgcgcatcggcatattgcgcgcgcagattcgctatcgtcggcgattgcagcgcctcggggatcgcacctgcatcggcggccgtgcgccggctcgcctcgatctggtcgagccgtgcttgcgcatccatggttgccgcacgggccgcggagagccgctggttgctggcggagagctgctgatcgctgatcagcgcatcctgggtgccgacgaaattgttctgggccttgtaggtggcgagcgcagtctctgcgttgcgcagccggtcgcgcagctccttcaggcggctggagagatcgttggtggcgcgccgtgcggccgaagcctgcgagttgcgggattccgcgaggtaggcgctggtcagcgtgttggcgagcatcgccgctttggcggggtccgtcgaccagacctcgacatcgacgatgaagctcttctcggtcttgcggaccgtgatgtgcttgttcaacgcgtcgagtgcggcgagctgcacctccttcttctgcgcggcggaaggtgcgcgagggtgcaggccgatcaggccgagcagcgacgacgtcaggctcgtgccctcgccgccgccgaattccggatccttctcgaggccggcctgctggatcacctggagcaacacgctgttggaggtgatcaggcgggcctggctctccaccaccatggacatgccggagacgtcctgggcgcgaggcgtaagctcgcgatcgaccagctgaagctcgcgcggatcgacatagagctgggcggtggcagtgtagcggggcgttatgctcttgccgatggtgactgcaagtgtcgctccgagcagggcggccgctgtgatcgccacctttcgccgccacagcagattggcaagctccagcacgttgaagccggcctgaggcttccgctgcgtggcctccggtgcggcccgatcgatcggctggctatagtcaagcatgatccccagctttcattccaattgccgcgggctgaggggttattcttcgctttacgccacgcacccgggatatgggtgcccaatcaacgcaacagggaaaattaaccatactcatctggggactattcaccgaaatggcaaacaaagcgtttaagcgcatgccgctgttcgaagcgtcgccgagacgccgagttccccgggagattaacggttcgttgctgcccgcagcgtgcccgcgaagcgtcgcgggtcgggcgatcggccgcgcgtgcatcgctttcagctcttccgcaggatgacgtgatagtcaccgcgtcggacgtcggtgccgctcgggagcacggcgttcagcaccgcggcgccggcgtcgacgagggccgcgaacagcggcttgcgccggcgcatctcgggatagcgcgggctttcgacctcgcggcgatagatcatctccaggccgttggcggccgcgaatgcttcgagccggggcagcgtcaccagcggatgaaagaacgtcgggaacggcggttcgccgggcaggccggcatccttgatgccgcggatgtgccggtagaaccagacgtgaaaccagtgcggcgaatatttggtgacgacaccggaaagcgaacgcggattgggtgcgccgatcaggatcatcccgccgcgcttgagcgcgtcgcggaagttcaggagcgccgtgtcgacgttcggcagatgctcgatcacgttgtagcagatcacgagatcgaaggtctcgcgcccgaagcggtaggtctggatgtcgcccaggatcgcctcgtcggcgtaggtgttgttgcggacctgatcctcgtcgatgtccacgacggtgactttgctgcggttcagcaattcggggggcagaacgctgcacgagccgccgcccgcttcatagatggcgagctggtcacgcggcagctcgcggcgcagaacgtcatggacagcgagcaggctgtcgcgggcttcgccggggaccagatcgtgcaacgcctgggtgggtggagccgcggtggggacgttgatggccgtggccgtcgcaaaatcgatcgtcgctggcttgttcatgattttctgaccgcgcttgttctattcaaattacaggaaaaaactcgatcgcccgaagagcaaatccgatgccgcgccgcctcactgctcgcagtgcttacaaccgggttaatgcgcatggccgttaactacggcattgtccatgttgggtgtcgtcggcgcgctggaccgtgaattgcactagcacgcgtgcagcgttctgcggcagaaacgcgcgaaaacggttaagtgcatggtgttgcgcggagatggctcagttcgccggcgtgtgctgttcatttttggaacgaatccgttctgcggcgatgtgccgttgcgggacgtaccggcttgcgcgatcgaagcagggctttctcaacatatctcggacatctagaacgtcatgacattgatcccgacagacctgtccgccgcgcgcctctcggatgccgtgtgcgattccaaccgagaaatcgcggcgagctcccgcatcattgatctgtcggtcggcatcgtcgtctgcatcccgtgcttccgccgcccgcagcacctgcggctgacgctggaatcgcttgcgaaccagcgtacgccgcgttcctttgccgttgtcatggtcgagaacgacgccgcgcggcgcgagagcgcgccggtcgccgcagagtttctggctgacggcaggctccagggtgtctgcctcgtcgagaagcggcagggcaattgtcacgcgatcaacgcagcgttcgaaacggcgcagacgctgtttcccgccgcgacccgcttcctgatgatcgatgacgacgagattgcttcgcccgactggctcgagctgatggtccgcaccgcggaggcgaccggcgccgatgtggtcggcgggccggtgttgccggtcttcgacgacgacagcaagccctggcttgcgcgccatcccgccttctgtccgacctacgactacagcggcgcggtgccgctgatctatggttgcggcaattgcctgatcacgcgtgccgccttcgagcggttcgaccgtcccgcgttcgatcttcgcttcaatttcctcggcggcggcgattgcgatttcttcgtgcggtgccgtgatgccggcctgctgttccactggacggcggaggcggtcatcaccgagacggtgccgcggaaccgcaccagtctgggctggatcgcaaagcgcggcctgcgcatcggtgcgatcaattatcgcgtgcagtacaaggctgcccgaagcagggcggcgcgggccagggtgtttgtgcagatgctcggacgggtgccgctgtcgctggctcgcgccgcagccttgctgacgtcgtcgaaagccgtcgttgcgatgcatcccgtgatggttgcgcttggcgccgccttggcggccgtcggcttggagcagaagccttatgaggcctcgaagatcgtttcttgacgcgacggcggactagatgccgaagcgggcgagtgcgacgcggatcgccgcgcgtggcagggatcttggcgaccgacggccgatcatcgcgagataggcaaaggcgtcgcgatatctgccgaagcggactgcctgcatcgccgaataggtgacgaggtgaatctcggcggctcggcgcaatccgctcgccgcgtcctcgggaagtctcgccaggatcaacccgtcatcgaaaatccgcgcaaccgccggcaagaaatcctgcggggttcgcaccgctgcgttcatcgtgttggccgtgtgcaggcgataatcgagcagaagcttcggcacgaattcgaactcgccgatcgacgcgaggcggcaccagcaatgccagtcctcgcaatatctgagcgatacgtcgaaaccgccgatggcgcggaaagcgtccgcacgggtgagaacgatgccgccattgacgatgaaattgccggcggccagccgcgacagcacgtcgccggacggtttgcggcgtcccttcagcaactcgcgccggccgatctgccgtccttcggcatcgatcgtgttgtagtcgccgtagatcagaaccgcgcgcggtgcaccgcgcgctgccgacaggagcgctgccaccgcgccggggcgcaggcggtcgtcggcatcgaggaacagcagccacgcgccgctcgcatgccgggcgccgaaattgcgcgccgccgagacaccggccgagtcgttgtggatcaagcgcagccgcgagtcgcgcacggcccggacgatcgcaaccgtctcgtcggtggagccgtcgtccacgacgatcacctcggtcacctcgcgctgcgccagagcactcacgagggtttcgccgatataggcggccacgttcttggcgggaatgacgaccgacactgatgtggccgagtcgacctgaagcgggaggcgcgccggcgccgtcgcacggggggcggctggcagttcgagaacgtcttcggcggtgatcaagctgcggctcgtctttaatgatccgttaaccaggacttgtccgtcgcgccggcaacgctggcgaccacaagttcggatcgatcatactcgcactgcgctcaaagcggcgctgcgaaggccggtgcgtcgccggtttcgtaaaatagcgttaagccgctggcattaagcctgtggcaaattcggacgagtgcgacggtcggtgccatgcgagaatgcgcatcagactgtcgcggatggatccagtgcccgcaaagaccttcgaacacgaccccgacgcgatgatcctgaacctcttctatgaggacaaggacgatcgctggtttcccggcgaccggcatctgcggcgcatggcgcggcggttgctgctgggcgagccgcgcatgagcggccagcttcgcgtgttcctcaacctctgtgccgggctcgaccggctcggcattcgctaccgcgtcaacgattacggtcatgtcgcccggcatcccgaggaactcgcctgtatcatcggccgtaccttcctgctcgacaagttcgcgtggaagaacccgatcctgctcggcgttgccgcccacaatcatccgctggatgaccccgatctgttcaggcgtctgcccgtgaagaaggtggtggtgcccggccgctggtacgtcgacatgtaccggccgtattggcccgagacggaggcttggccggtcggcatcgacacggatttctgggcgccgtcggagtcatcgcagaagacgatcgatgtcctgatctacgacaaggtttattgggaccgtgagcgctacgtgccggcgttgatcgagccccttcgcgcccggctgctgaaggaggggcgctcgttcacggagctgcgctatggcagctacaaggaggcagattatcgggccgcgctggcgcgttcgcgcgcgatgatctttctgtgccagagcgagagccagggcatcgcctaccagcaggccttgtcctgcggcgtgccggtgtttgcctgggatccgggcgggccttggcgcgaccccgattactatccgcaccgtgtgaggtttgagccggtgtcgtcggtgccatactgggacgaacgctgcggtgcaaagttcaccgacatcacgggcttcgaggcgggttggggcaatttctgggccgggtgcgctgccggcaccttcgatccgcgcggctacatcctggacaacctgaccctggagcaacgcgcgctccaatactacgagatcgcgtgcggcatcatgcggcggcccgcggtggcgaaggcctcgggcggcgccgtcgacgggtgctcggcaggggcgagccagggcctggagcttctccggcatcaccagatgtcctgagccatggaccgcagcgccgccgacatgactgccgcccagactcgatcatccggccatatgctgcgtgaggcgcttgcagggctcgatgccgtgcaggccgcgcgctgccttgtcgccgccgcagctctgctgctggtgctggtgacgctcgatccgtttccggacctgcgcaatccagacgtcaccaccatcgtcggcggacgaatggctctgacctatgtctcctggggcctcctggccggggtcgcggtcctgcttgtcgccgccaccgacgcgcccgcgctgaagaccctggcgacaccgcttcatctctgcctcctgggctggctggtgatcaacatcgtcttctccgagagccgcggcgtctcgatgcagcggttcgtgctcgcggccagcgtgacgtcgatcgccgtcctgttgccattgctgccgccgacgcagcgcagtttcaatctttgtctgggtgctacagcgttggtgctgctcgcgctctgctatctcggcgtcctcctcgcgccgcaatattcgatgcataccgcgctcgacgtcaccgagccgcagcttgccggcgactggcggggcagttttggccacaagaacgtcgcctcgcccgtgatgaccatcctggtctatgtcggcatttatttgtccgccgtgggctcattcgtgatgggaccggcgatcgccgctctggccggcatcttcctgatcttcaccggcggaaagacgtcgtcggtgctgtgccttgcgatctacgttctcgcctccctggtctatgtcacgccaagcctttggatgaagcggatcatctgcttcgtgcctctggtcgcgatgaacctgttgaccgtcggcagcgccctcagcccggcactcgcggcgatgacgcggctgcttccgctcgatcccaccttcaccggccgctccgcgatctgggagttcgctctggcagccgtcgccgagaagccgatcatcggtcacggctatgcggcattctgggacgacgtgacttcgcggcagaccgctcagggtgcagaatgggcaacgtccgcagcgcacagccacaacagctacctcgacctcgcggtcacgattggtctgcccgggctgatgctcgtgatcctggtcttcgtgctcgccccgctcggtaacttccagacggcccaggcgcacagccgcagtggtgcgctggccaagttgttcctgaccgtgtggttgttcggcctgtactatggggctaccgagaccttcctgctcgaccggcagaatcccgtctggttcttgttcgctcttgccgtcgctggcctgcactttctggcgaggttccaatgtgtcgagcaggcggaaatggagcgctgagacacggttggtgtcacacgcttaacgatatgcagcgacgctgcttgtggtctgccacgaaacataatctatgcggacacactcagcagtcgcatgtcgcgtggatgacgttccctagtatcgagcagtcagaaggccggatctccagcgcgtccggggtcgcggtcgatttcatgcgtgactggcggcaggccgcatcgcgcctgaacgccgggcaccgcaccgcgttccagcatggcgactggctcggtgcgtggtacgaagcgttccaggatgtagccccgctgatcgcggtgatctccgatgtcgccaccggcaaggacatcgcgatcctgccgatgatcagccatgtcaggcgcggcattcgcattgtcgaattcgcggacctcggcgtctccgacaacaacgcaccgatcctggcgtgcgatgccgccttggatgcaggggcgacggatgcgatcaacgcggcgctgatcgatgcgttgcgcgcgctgcctgaccgtctcgatctgctccgcatgaggaagatgccggcctggatcgagggcgagccgaacccgttcgtggcgctcggccggctcggatcctcctcgctcaacggcaatctcgtgctgatgggcgatgactacggcgcctaccaggcttcgatcaagcgcatgcaaatgccgcgttgctggcgcgtcttcagccggcacgagggcgcgcggttcgagatcgccacggatgtcgcgcgcgcgcatgaattgctggacgtaatggatgggcagcagcaggcgcgcatgcagaagctcggctcgcgcttcgtcctcaacgacgagtcccatgcgcggttctatcgcgaggtggcgcgccggggccttgcggaaggctatgccgtcgtctcggcgctggtctgcgacgcaggtgtcatcggcacatcgttcggcgtcaggcaaggcgcgacctattatctgctgcgcatcagtcacgccggcgatccctggtcgagctgctcgcccggcctgctcgtcatcgagcgcaccatggcggcgctgcatgcaaggggcgttcgtcgcttcgatctcagcatcggcaaccaggactacaagcgacgcttcggtgccgaacgggtgccgctgaccgatgtcagcgtcgcgctgtcctggcgcggtctgccctacgcatggcgcgatcatggcgcgcaaggcctgcgccgtcatcccaggcttgccgccctcgcggcgcgggcgatgggcaagggaaagcgctgaagcggcattcccgaacgggaatgccgcgatcgtcagccgtgcagcctcacccatgcagcttcttggccgtctccgcgatctggcggccctgatagcgtgcgccggccagctcgttggcgctgggctggcggctgccgtcgccgccggtgatcgtggtggcgccgtagggcgcgccgcccgtgacctcgtcgagcttcatctggccggcgaagccgtagttcatgccgaccacgaccataccgaaatgcaggaggttggtgatgatcgagaacagcgtggtctcctggccgccgtgctgcgtggcggtcgaggtgaaggcgccgccgaccttgccgtgcagcgagcccttggcccagagcccgcccgcctggtcgaggaagttcgccatttgcgaggccatgcggccgaagcgggtgccggtgccgacgatgatcgcgtcatagctggcgaggtcctcgatcttggcgatcggcgcggcctggtcgagcttgtagtgggacgctttggcgacgtcggccggcaccagttcgggtacgcgcttgatgtcgacaatggcgccggcctcccgcgcgccctcggcgacggcgttggccatcgcttcgatgtggccgtaggcggagtaatagaggacgagtactttggtcatggtggtctccgttggggtgacgatgcgagttgctgtatgttggcgtcattgccgggcttgatccggcaatccatcaagtttggaaaagctccttgcgaaagggttggatgcccggctcgaggctgggcatgacgggttggggtgcaggtaaagcttacgccgcgtcgacgagcacgagctcggaatcttccagggccgtgatcttcagcctggcttcgtcgcggatcgcggcgccgtcgcgggcattgacgcgcacaccgttgatctcgaccgcgcccagcgccggaaccagatagagatgccgcgaggtctgcggctcgtactccgcgctttcgcctgccctcagcgtggtcgcgagcacgcgagcgtctgcgcggatcggcagcgcgtcggtatcgtccgcaaagccgctggcgatggtgacgagcttgccggagcgatccgccttcggaaacggcttcgagccccaggtcggctgtcccccgcgctcggtcggctcgatccagatctggaagatccgtgtcctggtcggctcgagattgtactcggagtgacggatgccgctgccggcgctcatcacctgcacgtcgccggcttcagtccggccctcgttgccgaggctgtcctgatgcgtgatcgcgccctcgcgcacataggtgatgatctccatgttggcgtggggatgagcgggaaagccggtgttcggcgcgatctcgtcgtcattccaaacccgcagtgccccgtggcccatattgttcgggtcgtagtggctcgcgaaggagaaatgatgcttggccttgagccagccgtggtcggcgccgccgagctttgcgaagggtctgagttcgatcatctgcgtgggtcctaggtgaacgaatgagcagttcgactgcgattgaccccttggataagctctcgctcatggtgtagaaatagaaactattgaaacgcattgtttccaaaaatatccagactggatctgcccatggccaaactcccggatttcgaggcgctcgcgattttcgccaaggtcgtggaattgcgttcctttgcgggtgctgcgagcgagctcgcgatgtccaaggcgacggtatccaaggcggtgacccggttggaggagcggctcggcgctcgtctgttcaaccgcacctcgcgccggctcgcgctgactgatgccggccataagctggccgaacgcgcgacgcgcctgttggccgacggcgaggctgccgagaacgaggcgctcgcgcaatcgatcgcaccacgcggcctggtgcggctcgcggtgccgatgacgttcggcatcaaggccgtggcgccgctgctgccggagttctttgcgacctatccggaagtctcggtcgatctgcatctgagcgatgcgaccgtcgatctgatcggggagggctttgacatggcggtgcggatcgcgcggctgccggactcctcgctgatcgcgcggcggctcttcaccatgccccgttacaccgtcgccgcgccgtcctatctcaagcgccacggacggccgacgcatccgatgcatctcgccgagcacaagtgcttcagctatgcctatctgtcgacgcccaatgtctggcactacaccaattcggccggtgagcaggccagcgtgcgtccgggtggccagcttcgcgtcaacaatggcgaagccgtgatgccggcgctcatcgcagggctcggcatcgccgagctgcctgaattcatcgtcggcgaggccatttcctccggcgaggtcgaagtcatcctgaaggactggaagcaggccgaaggcgccgtgcacctggtgacgcctcccggcggcccgcgtcccgctcgcgtcgaggcgctcggcgatttcctcgcggcgaatctgccgggcatgtgcaagcggcggacgcgcggaaaggcgaagacggcatagagtgggccgcttccgcgggcgcccgcaatgaggtgttgggctaagccactttctcgccgtcgatcgcgacaatgcgcaggctcggcttcagcgtctgctccagttgcgacttcagctcgtgaacgcgcggatcgctcgaacgcttcgcgcaaaccgcatattgatggacggactgcgccagcgcgcgccgcgcctccggcgtttgcgtcaattcgggcttcgcgagccgcagaatgatcgcggcaaggttgaccagcatctcgtccaaggcgacgtcaacggttgcgagttttcccatggcgcactccctgggaagggcaacggtcgcctcagccatgcgttcccggctcggccgaacgtggttaacgcctggtaaacatcgtgttcgtgccgatcgcgcgcgtggtggtcgatgcccggcaaaatgcaaagtgaacagggcagattcaagattcgctgcgaacgccgccagcgccggcctcggcatcagctgcagcggcatgagcgagcggcgccagcgcggttgtgacgagcagcctgttgtgcaggatgccgacaacgccggtccgtgcgtgggctggccttgtagtcggcatcgctgattccctcattgcactcccgcaagtgctggcgagaatgcggcgatcgtttcttggcgtcaggcgaaacgggctgtggtcgaaggcgcagggcgccggtttgcgccggagctgttgcgatgaggccacggatggccgcgcggggaagcggcctggtgtcgtgacaaatggatcgaagcgaaatccgcatggctttgcgcgccaccttcgccctcgggcttcaacgacgttcctgttttccgtcgaaccccttcgccggcgctttggagtgacgcctgcggacgcgagatggcgcagacggaaacgggccgccgctgataaacgtcctgcccctcaggcgatttgcgtccggtttgcgccccaaggaagccgacgccggcgagttccgattgcgtcttcacgtttatttgttgagccagaacctttgcccgcttcattgattaggcaggcttcacatgatcgggaaggattgcaggatgcgaacggagctggccttgctgggtgtggtgcttgctatcgggggcatcggagcgcagagcgctgcgtccgcgcaggaatatcgcggcacgatggaacagcagatggcctgcacaccggacgtgtggcggctgtgcagcgatcagatcccggacgtgaaccgcatcgtcgcgtgcctgcagcagaacacgccgcagctctccagcggctgccgtggcgtgttccagtccaacaatcaggtgcagccgcagcagccgacgccgcgcaatcgcgtcacgcccccgccacgctacaatgctgcgcctccgcccactcaatcgcagccttacgatgaggatgaataacttcctctagggtctatgctcgcagacatcgacccattcagccgcggtcagctccgccatccgctccggcgtgatgcgcaccgcgctgtgggtcgagcctgcggccggcaccacgacgtcgaacgccttcagggagacgtcgcaatagaccggcagcggcgacttcagtccgaacgggcagacgccgccgacctcgtggccggtgatgtcggcgacctcctccagccccagcatcttcggcttgccgccgaactgcgccttgaccttcttgttgtccatgcgcgaggtgccgctggcgacgatcaggatcacgcgctcgccgatgcgcaacgacagcgtcttggcgatgcggccgggctcgacgccataagcttcggccgccagtgccaccgtcgcggagctgatcggggattcgatgactgagatgtcgggggcattctcggcgaaaaaagcgcgaacggattccaggctcattccaatctcatgggcgcgacgacacttaggcgattctcggcagttcggagagcgagcggatccgatggtccggcgcaaagccgagctcgtccatctgggtgcggatcgccttgaacatcgtcagcggtgccacggcttcgttctcgacgcaagccagcgccatggcttcgggcgtcacccgatcgatccaggcgacgttcaatccgaacgatttcgctccggcggcgtcccagggattggaagagacgaacaggacctcgttcggcgcggtgccgagcacctcgccgatcagctcataggcttgcgggctcggcttgaagatcttcttcgcgtcgacgctgatggtcgcatcgagcagagcctccaggcccgaattgcgcacgagcgcatcgagcatgtccgggctgccgttggagaggatggcgagcttgcgcggtctcagggccgcaagcgttgcagtcgcatccggatagagatcaaggtgcagatatttctcgatcacgcgctcgaacacctcgctctcgtaggccaagccgagcacacgcagcgtataggcaagcgagtcgcgggtgatggcagcaaagtccagatagcgccgcatcagagagcgcagccaggtgtattcgagctgcttgatgcgccagacctgggtgatgatctcgccatagcccggaaacgcatcctcggtgatctcagcgaccgactggatgtcgtagagcgtcccgtaggcgtcgaagacgacggctttcaagctcatcggctgtccttccgtgtggttgtcgttacaagctcggcagcttaccaaagaaaagcggaagcttgtgactgcaagtacggtcggcggcttgtgaccgaaacggacgtaggctgtgacaatgcgaaccacgtttcaagcaggtaggaacgactccgcgagcgaaaggattgaaaggtcggtctgtgccgtgatctagacacggcatccacccgggacgacccgtcgtcagacgcgcgtttggcgacgggccggttctcgttcccccccgcagcccgcaccgagcgggttcctgaccttcaaaagaactttgtgacgatcgaggactatgagagggttgttgaggcgtcgggcttcgatgacagccatttgcacttggccaggaaccctccctccttttgagcgctttcgctagggatgcgcttctatttctctcaacccggggacctgccggtaggggtggagtgactcggccctgagagaagcagccaagagagccctccattttgcatctcgatatggaagcacatcatattgggagcgcatcgctcatgggatcggcgcttccggccgcacgttgagccttgcgagctcacggcgctcggcatcggacaattgccaatcctcgcattgagtgaagagctgttcgaaaacgtcgtgtagcttgctccgggcgacctttaccatctccgtgtcgtcaaattcgcgagagttgaggaatatcggcaaggtaaaactggtttgatcgcgctcaaatcgaaacgttagacccatatcctcacctcgctcattcggcgagatcatctcaatgcgtgcgagtgtgatcttgaagttgctcattcattcaacctgcggaagcatgggccgaaagcaaatcgggtttattgttcatcaggccccttttgagaattggttggcgacaagatcataagagcccctgctgccgcgcacataaacctttgcggctgtggcgcagatcacgccccgattgcggtcaaatgcattcaggaaatcagcttcgtgacaggcacccggctgaagtcgtttcaaggcgtcttcctcaatgaagaatgatgcctcaatcgcgctgtctgatccccagaaatgcaccgcacgtctcgtccggtcatacgagcggctttgatttggaaactcgatcatacggcggtccaattcaggttagcaggcgtctcgtcgtgcgatgttcgaagaaggtagctgcccgtctgccgtcaccacatgctctcaagagactggctaagccggcgcttgatgcggtgcaaggcaatcggaaattgattgatccgccgcgatgagcagctctcagctactccaatacaatcggcttgcgacgaagaagttgctcggtcgcgagctatgaggtgaccagaacctccactgacatgccggcgaaggcatgggtgctgccgatgtagctgccggatacaggggcaatctggcggatgtcgcgagctaccgcgatgggaaccaagttgaagccgcctaagctgcggtttgttgggtcaaaggtgatccagcccgctcccggtacgaagatctcggcccacgcatgcgttgaccctgctccgccggagcccgcactttgctggctcgggctgtacagatagccggaaacgatcctcgctccgaaacccagtacgcgggccgcttcggtgaacaacaccgccagatcccggcatgaaccccagccacggctcaaggtctccagcggcgtttgggtgccttcctcgtcacggctctgatatcggacagcttccgaagtcccaacgcttaggtccttgagcagcgccaatgtgtcggtctggcttccgcgaacaaacattcgtgcccagtttcgcaacgttccttcggggtccgcgaactgcggactggccaaggcgccaagatcggcccaatcatgatcggaatagaagaaggggtaggatgttgcagagacggcgatgtcgaaaatcggccactcgaccgaagcgagctgaagcttggcaacgctggagatcaccagagtgctcgccttcgtggcaaacgttgccgtcgtgactgtattcccgaacacatcgctggcccagctcaggaccgcatcgggcgacgccgagatccggctggacagcagccgaacatctcggctttcgcgcgggcgaagcataaggcgatgaggaagaaggcctaccggctcgtcgaagcgataggtcgtcgtatgctgaatgtccagggtgatcaacggcaactcccgccggcagccgcgctggctccaagtcggcctactccgaagatgcgaaccgccgggaacgacgctgatagctgctatatatggctgcgaggaagaagcgccagagagccgccttcaactagtcggcgctggttccgagcgatcgactgcttgcagtcacgtctgccttgaccgaggaacgaagcggcggcccgtccgttcatttcacctgcaacatttctcaatgcctgaggcatcgtgcagacccggagaggtggtgccaatgactgtcccgcatgttcgttttccaagaatcctgtccaagtgtctcgtcgcattccagcgtcaccctgcgcttgccaccgttgctggcgcggccactctcatggcgggcgccgcgctcatcaaccggaagtttgcgaagaaggcgcaacgcgacaatcctccacaagggcgattcatcgaggtcaacggcgtccggctgcactatgttgaacgcggcaacggtcggcctctcgttctcttccacgggaacgggagcatgattcaggatttccaatcgagtggcttgatcgatcgcgcggctgaaacctaccgggtgatcgtgttcgaccggcccggcttcggacatagcctccggccccgcaacgtcgtctggaccccggaagcgcaagcggatctgttcaaggttgcacttgatcagttgaatgtcgaccgcgcgatcgtgctcgggcattcgtggggagcgtctgtcgcggtagcgctcgcgatccggcacccgtcctcggtcgaagccttggtgcttgcgtcgggctactatttccccaccgctcggagcgattcagcgacctccctgttgcctgcgacgccgggactaggggacatcatcagctacaccgcctcgccgctcctcggtcgcctgatgtggcctgcgatgttgaagaagctgttcggcccgcagccggctcctgggaagtttgccggttttcccagagacatggcactgcgaccggggcagatgcgtgccggcgccgcagaagcagccttgatggtccccggtgcgttctcggctgaaaagacctacagcgaacttgggatgcctacgatcatcattgcgggtgaaggggatcgcttgattgacatcaatgagcaatcggccaagcttcatggagaggtcaagcaaagtaaactgcaccgcatcgccggagtgggtcatatgattcaccagtctgcaatgccagacgtcatggcggccatcgacgaagctgctgcacagacggtgcattaggcagattggactcgcgctcgcgcaggtccctggcattgttctcgatctcggccagcgcacggcgaagatctgttgcctactgcgccgccttgcagcggtgcttgtcgaactcgacggggatgtcggtcatcagcggttcacgtcggtgcgctgagcgtccgcgaggtcgaccgaactgatcgcgcgtatctccgtcgcgccctgcacgtctttggacggcaccgtgatcatggtggcgacacggcgccaagccgcgaacgaaagtccatcgatcatctcctcgtcggtgacgacctcatagcggcctgccggcaactcgcgcgcaatgccgcggatgtggaacggatgcttgaatgtgacggtttcccgccgcgaacggatggtcatgcgcgcctgccttcttgtgagagcgtccccgaccggcaccggcgatcaggaccttgggctttgtgcgtggcaatagccagcactatcgagccatcggggcgcgcggcgtttagtcctcgctattggcgtgatgcaagcgtagggtcgtatccaccaccgtatcttccgctacggcttcgaccggtgactgagagtcacgtgcgctctcgccgagaaccggtcattgaagcacgaccacgtcgtgctcgcgcaggagcgtgcgatttggcattgttggacctcggaatggatcgttccgccaatcgtggttcccgtgttcctgctgcttctcgttgtgcagcggcactcttccatagctagcgcgacacgttcttatcgcgtgacctcgtagccgaacactcaaagggatgaatgcatgtccgaccaaggcgttacaagtctcggagacggaggagaggatggcaccgctcttgaaggacggatccgtgagcgggcccaccatctttgggaattggagggccgacaggaaggaagggacgaagaatattggcatcgggctgaggagcaattgcaatccgatgcgcaggcggcatatccgccatctgcgtcccgggggcacaggacctgatagggaagtccgttgcgggaatgtccacaattgcccatcagcgaagttgagcaatgcttgactgaggtgcgctcatcgcgggagcgcgcgcgtcgcccgcgctaccggcctaagttgacttagaagtggcccgatttcgttcccgtatctggagccgtctgtccgccgcagcggcatacttgagaatgcccagacacttcctccacgtccacaaggtgcccaagccatgacgggggattgccggatgacaaggcggcatggcgggcggcgacgacctttcgcaggcgctccgttcaggacgtcgttggcaagtcccggccggacgaagaatggagcctcggggtgaggacgaagcccgcaaactgcttcatcagcattgagtcgtgaaagtaagccgccctttggcttattctcaaagcggtcacccggctacatcggaaccgcccgtcagtgcaggggacgagttgcggttgcagcgtcactacggctgctttgctgtggaattctgtatctatcttgagggaaccagcgcctagtgaatccatcaccggcacatcatggcgccttcacttcggatgaggacgcgccttacctgaatcagcgggaaaactaaaccaatgtctcctcgagacgtgagcatgcccgtatggcacgaaaagcacctccgggccgcgacgcgcgccgccggcgtcgcattgtggtcttggaacgtcgacactgacgcgatcacgatggacgaggccgcatatgatctttgggatgtttcgaaggaagaacggacaattaccttcgaaatactgtccaggaatattcatcctgccgatctcgaaagggtcaggtcggccttttcggcaacgcgagcggtagtgggcgcttatgagatcgattttcgtatcttatctggaggcgatgttcgctggatctccgcccggggccaaggggacgatgctgacatcgcagaacgagttatgttcggtatcttccttgatgtcacccaacgcaagcaggccgaggaagcaaatgaactgctggcgggggagatgagccatcgggtgaagaatcttttgacgattgcgacggcccttacccaaatcacatcccgctcggccgaaacaaaagaagagatggcacaggaactgaccagtcgcctgatcgccctaggccgtgctcaagacctcattcgtcgaatacccggtcagaagaccggggccacgcttctcggcgatctcatctctgtcctgctcgcaccgtacgatgagaagggagctagtgttcgtattcgcgtttcggtccccaagatgaccgtgggagagagctcgagcacggcactagccctcgtgatccacgaactggcgacaaactctgcgaaatacggcgcattgtctgtttcgagtggcaccttggacgtttcttgcaacgcccatgaagacgaagttgtggtcatgtggaccgaacgcggcggccctccggtggtcgcgccaacaaagctgcacggcttcggaagcaagatggtgcaccggagcatggcttcacagctcggcggcaccatagctttcgagtggtcagacgagggtgtggttgtcgccttgcgaatgagcaaacacagtctcgccgattgaaccgctgcaatcctgcgcccgcttattacagccggtgcctggccgcgggcgaattggaatagtgagccacgcttcaggccgacgtcgagcccaagcgcaaagcaaacaggttcaacccaaactcatgccgccactagatccccaacagcttgcgcgcgttggccttcagcaccttcggccggatctcgtcgcggatgtcgatcttggcgaagtccgacagccagcggtccggcgtgatcaccggccagtccgagccgaacagcatcttgtcctgcagaatcgagttgatgtagcgcaccaggatcggcggaaaatactttggcgaccagccggagaggtcgatgtagacgttcggcttgtgggtcgcgaccgacagcgcctcttcctgccaggggaaggaggggtgtgcgaggatgatcttgagatcggggaagtcggccgcgacgtcgtccatgtacatggggttggaatatttcagccgcatgcccatgccgcccggcatgccggagccgacgccggtctggccggtgtggaacagcgcgatcgcgccgccattgttgatctcttcatagagtggataggccatgcggtcgttggcatagaagccctgcatggtcgggtggaatttgaagccgcgcacgccgtattcctcgatcagcttgcgcgcctcgcgcgcgcccagctttcccttgtgcgggtcgatcgagacgaaggggatgaggacgtccagatgctcggaggcgatctccagcatctcctcgttcttgtagcggcggaaaccggtctcgcgctcggcatcgacagggaagatcacggcggcgatgttcttcgagcggtagtaggccgcggtctccggcaccgtcggcggatgcttgtgcggcgacttgaaatactccgccatctgcgcctggaaatcgtcgtagccgtcgtcgggatgcgtgccgcagggctcctcggcatgggtgtggatgtcgatggcgacgacatcgtcgatgtttggcagcttcagcttcggcatgggtgtcctcccgacgtgttgccgaattgattatagtatataacgaatttggcaaggcgtcgcgggaggcctttgaagtcattgccagaaagtccggccgatccggccgcttctacagtgcatggggttgttttcacggattgccggtccggcgcggccagttaacattgacatcacctcccgccatgccttaagaaccgccccgtcccgggcggtcggtccgccggcgggaaagatcccattttgccacattcgcgcgtgccgaaacggtagtgccgaaaacggcctttcgaacgttcaggattctgccatgaaggtccgtaactcgctgaaatcactgcgcggtcgccatcgcgccaaccgcctggtccgccgcaagggccgggtctatgtgatcaacaaggtgcagcgccgcttcaaggctcgccagggctgatccgccctaaggctgatcttgccctgccgggcgccgtcaggcgctccgcaagactacgctctcacacgagtttgacgccgcccttgcttggcaagggcggctttgcgcgtttagactttcacgatgacaatcagattccccttcgtccgcgcgctgtgtctggcccttgtgctgggaaccgccggcgtggctccagccctggcgcagcaggttgagccgcccggcaaacagaagaagctcccggaagcgcctgccaagctgcccaaggtcgatcgcagcaagaatctcgacttcctgttcggcgcgttgaaggcggcccccgacgagaccagcgccaagcacgtcgaggcgcggatctgggcggtctggctgcagacaccgagcgacactgcggcgcttctgatggcgcgggccaagaccgcggtcgacgcgaagaagatcgaggttgcgatcaagctcttggattcggtcatcaagctcaggccggattacatcgaggcatggaaccggcgtgcgacgctctattacatgcagaacgactatggccgctctctttcggacatccagcaagtgctgatccgggagccgcgccatttcggcgcgctcgctggtctcggcatgatcatgcaggaggtcggcaacgagaagcgcgcacttgatgcctatcgcaaggcgctcgccgtcaatccccacctcgaaaagatacccgatcaggtcaaggcgctgaccgagaaggtcgagggccgcgacatctagcctacaactcgatcatttcttgagcgattgcagccgtcgccgattaaccacgatcgcagccgtcgcgcagcggggctgttgcgcggcgctttgcaggcctacgtccacggcaggagcgaaagccatgaaacgtttgatggtcgcagctgtcttgctgctcgggtcgggaacggtgagcttcgccgacggactgttctgggtggtcggcaaccgcgccaccggaaaatgcaatatcgtgaccagcaatccggtcatcgccggcgacatcttcttcggcgacggtccctacaagtcaagggcggatgccaagcttgcccgctcgacgatccgcgtctgtcccgcagtcacgcccgaggacgaaaaggaggaagacgggacgaactagcccgcgcgccgagcatgatccggaaacgtgtgcggcggtctctttcgacgagatcacgctcaagagagagcctgaagtgcgatcgatcgcacttcaatgcaggacgttgccgccgcgctcgacaaggccgcgatcggccgctgcggcgtaagcccttgcaagctcggtctcgagatgctcgttgatcaggagcagcgcccgcaccgcaccgcgcaggtcgccattgcaactcgcgacgatttcgtcgatcgcagtgtcgcttgatctgaagctcattgaggttctccggttcaaccaggacaaatcctgccggtctttcccgcatctctgaggttgcgaggcggatcggcgcccatccgcgcgtagatggcggaaccgaccgtggcgattatatggacgccgcgatgacgactgcatgaagctatcccgggccggcgcgcgcgttgggagagccgctgatttcgttgagttttttcgttttgaattatgcacatatccacagccccggcatttacagtggaagcgaaaaaggccggcggcgaaactgccgtccgatcgctctcgtaactgccctgtgcccaggatcacccggattcgctcgatgatcgtgatgtcagccgtgacggcgctggttctgctggccctggtcacgcaggtgggaatcgtcgccgtgcaacgcgcctttccgccgcagggccggatgatcgaagtcgacggcgcgacgctgcacgtcgtcgatctcggcccgcgtgaggccggcctgccggtcgtgatgctgcacggcgcgagttccaatctcgaagcgatgcggcggccgctcggcgatatcctcgcggaggaccggcgcgttgttctgatcgaccgccccggccatggctggagctcgcgggcgcgccggcaggattcgacaccgcagatccaggcgcggatgatcgacgaggcgcttcataagctcgggatcgatcgcgcggtcttcgtggtgcattcctggagcggtgctctcggcgcgcggatcgcgctcgatcatccgcaccgcgttgccggtcttgtgatgctcgcgcccgtcactcatccctggcgcggcggcgtcggccgctacaacgagatcatcgcaacgcccgtgatcggtccgctgctcgcctacaccatcacgctgccgctcggctatgttctcgctgaatccggcgcgcgcaatgtcttcctgccgcaaaccatgccggatggcttcgtcaaggactccgcgacgccgctgctgctgcgcccccgcgaattcatcgccaacgcccatgatctggtgacgctgaaggaggccgtcgccgcgcaagtcgcgcgctatggcgagatttccgcgccggtgacgatcatcgccggcgagcccgacaagacggtatcgaccaacatccatgcgcgcccgttcgcggccatggtgccgaatgcgaagctgatcgtacgtcccggtctcggccacatggtgcagaacgccgtgccggatcttgtgaaggcggagatcgagaccatgatcggcaagatcgttccggcgcaggcggccgccgactgaacccgttatcaagcgatgtcagcggccgcgttttgcgcgcttactgcttgatcttcccgtccttgtcgtactgggcgatgaaggcccagagattggcgatctcggtctcgttcttgatgccggcgaacgccatctttgtgccggggatcttggccttggggtccttgatgtattccttgaacgtcgcctcgtcccaggtgatgccggaattcttgttcgcgtccgtgtagttgtagccctcaacggtgcccgacttgcggcccttgaggccattgagctcggggccgaccttgttcttggcgccttcgccgatcgcgtggcaggccaggcacttgttgaacgatgtcttgccggccgcgacatcctgcgccatcgcggcgggagcggtggcaatcgcggtgaggatcgtcagtgcgccaaaagtcagttttgtcatcgggtgctcttcgtctcttccctggtggctctggtcagtctcttgcctgatcgacaatcgccgacctgccgcttttggcaggcctgctcggcttggacaagccaccaaaccatgacaggtttcacgatttcctacttgtcccagagcgaactcgcggaacatcgtcgctgcgactttcggatggcctacccaaacgggcgcggacgtgattgatttgtcgcgacaaatcgatcgtacggcgtcagccggaacgatatgccatgaaggacttgatatggccatcatgatgcctgccagcgaccaggccgtgctcgcgcggcgcgcggaaatcattgctgcgttgcgtgcgatcgtgcccggggaaggcgtgatcgacagtgctgccgagatgcgggcctacgagtccgacgggctgaccgcctaccggcagccgccgatggtcgtggtgctgccggatacgacggagcaggtctcgctcgtcctgaaatattgtgcagagcagagcatcaaggtggtgccgcgcggctccggcacctcgctctcgggcggcgcgctgccgctcgaggacggcgtgctgttggggcttggcaagttcaagcgcatccgcgagatcgatttcgacaaccgcgtcgtcgtcaccgagcccggcgtcaccaatctggcgatcagccaagccgtcgctcatgccggcttctattatgcgcccgatccgtcctcccagatcgcctgctcgatcggcggcaatgtcgcggagaattccggcggcgtgcattgcctgaaatacggcatgaccaccaacaacgtgctgggctgcgagattgtgctgatgagcggcgagatcctgcgcatcggcggcaagtcggccgagaaccccggctacgacctgatgggtgtcatcacgggctccgaaggtctgctcggcgtcatcacagagatcacggtgcgcatcctgcagaagcccgagacggcacgcgcattgatggtcggcttcgccgaggtcgaggccgccggcgaatgcgtggcgcgcatcatcggcgccggcatcattccgggcggcatggaaatgatggacaagccggcgatccacgccgcggaggccttcgtgcatgccggctatccgctcgacgtcgaagcgctcctcatcattgaactcgacggccccaagatcgaggtcgacgagctgatcgcgcgcgtcgaggccatcgccaatgcgtgcggctccaccacctgccggatttcgacgtcggaggccgaacgcaacctgttctgggcgggccgcaaggccgcattcccggccgtgggccgcatctcgcccgattatctctgcatggacggcacgattccccgcggcgcgctgcccaaggcgctggcgcgcatccgcgagctctcggaaaaataccagctcggctgcgccaacgtgttccacgccggcgacggcaatctgcaccctctcatcctctacgacgccaacaagcccggcgagatcgagcgcgctgaagccttcggcgccgacatcctgcgcgcctgcgtcgagttcggcggcgtgctcacgggcgaacacggcgtcggcatcgagaaacgcgacctcatgcccgacatgttcagcgagatcgacctaaaccagcagcagcggctgaaatgcgccttcgactcacagggcctgctcaatcccggaaaggtgttcccgaccctgcaccgctgcgccgagctcggtcgcatgcatgtgcacgcgggcaagctggcgttcccggacattccgcggttctagtctgcgctgaacgaattgctttccctcgcaaacttcgctaccggcttttcccgtggatacgctcagagtcagagacgccaaagacgttgaagaggtggtacgcgcggcgattgcgaacgagcagccgctcgagatcataggccatggcagtaagcgcagcatcggccacgcgatggcgaccaatgccgtgctcgacgtctcggccttgaatgccgtcacgtcctacgagccaaatgagctgatcgtcacgctccaagccggtgcgccgctgggcgacgtgcagtcgctgatcgatgccaagaaccagcaattcgcctttgagccgatgaacaccgctccgctgctcggcacgcccatgtcaggcactatcggcggcatgatcgcggccgggcttgccggtccacggcggatcagggccgggggcgcgcgcgatcacctgctcggggcgcacgccgtctccggctttggcgacagcttcaagactggcggcaaggtggtgaagaacgtcaccggctacgacctctgcaagcttctcgccggttcctggggcacgctgtcggtgatgacggaggttacgctcaaggtgatgccgaagccggaagccgagcggacgctgctgctgcgtgggatggatgatgccgccgccaacaaggccatgaccgtggcgctgggctcgcccttcgacgtctccggtgccgcgcatctgccgaaatcggaactccgggccaaggtcgaggggctaggcgacgtcgcgggtgagggcgagccgctgaccgtgctgcggctcgaagggatcatggcgtctgtcgcgcaccgcgccggatcgctgcgcgaactgctggtgtcgttcgggaccgcgaccctggtcgaggatggcgcatctgcggcgctgtggaccacgatccgcgatgtgctgccgttcgcggcgaccggcgcgctcggcgcctggccggtgtggcggatcgtctgcccgccggcctcgggcgcggcactcggcacccaactggcccgcgagacggggggcgatttgatctacgattggggcggcgggctgatctgggcggcattgccgccgaagtcggatgcccatgccccggtcgtgcgcgcacgcgtgagtgcggccggaggacatgccacgctgatccgggcggaagaggaggtcaggcgcgacgtcgatgtatttcatccgcaagagccgggcatcgccgcgctgagcgagagggtgcgcgccagcttcgatccgaaggccattctcaaccggggacgcttgagccggggcgctacggcatgaagaccgaattctcactggcgcagctcgccgaccccgagatcgcggaagccgacaagatcctgcgtgcttgcgtccattgcggcttctgcaccgcgacctgtccgacctatgtgttgctcggggacgagctcgatagcccccgcggccgcatctacctgatcaaggagatgctggaaaaggaccaggcgccgacggccgaggtggtcaagcacatcgaccgctgcctgtcgtgccttgcctgcatgacgacctgcccctcgggcgtgaactacatgcatctcgtcgaccaggccagggtccgcatcgagcagcgctatcagcggcccttgaccgagcggctgctgcgccgcgtgctggccttcgtgctcccggatccgcagcgcttccgcctcagcatgtggctggcgcggctcgcccgtccgctgggcgtcttgttgccgacgccccggccttcggccacacccggattgatccaccgcatcaaggcgatgctggcgctggcgccgaatcggctgccaccggcagggcctgctgcaggcagcgtgttcgcagcgctcggcaagaagcgcggacgtgtggcgctgctccagggttgcgcccagcaggtgctggcgccgcgcatcaatcaggccgccatcaatctgctgacgcgccacggcatcgaggttgtccttgtcagggacgagcagtgctgcggcgcgctgacccatcacctcggcgacgaccaggatgccttggcgcgagctcgcgccaatgtcgcggcatggcggaaggaagcggccggcgaggggctcgatgccatcctcgtgacgacctcaggctgcggcacggtcatcaaggattatggctatctcctgcgcgaggaggccgccttcgcggccgatgcggccaaggtgtcgtcgctcgccaaggacatcaccgaatacgtcgccggcctcgaactctcgaccgccgcgcggcaggagaacatcgtcgtcgcttatcactcggcgtgttcgttgcagcacgggcagaaaatcacgagccttccgaaagaattgctttccaagaatggattcgtggtgaaagatgtgccggagagccatttgtgttgcggttcggcggggacctacaacattctccagcctgagcttgcgggtcggttgcgcgatcgcaaggtcgccaacatcgtgagcgtcaagccggatatgattgccgcgggcaatatcggctgcatggtgcagattgccagtggcacgtcagttccggtcgtacacacgattgagcttctcgattgggctacgggcgggtcgcggccggcactgaacgcgcaggtttgagctttcagagcctgagccttcctcccgaggtgacgactgaagacgcccgatcgaccattgttcggcggcaacaggaggaccacgatggcgaaagcgaagaagaagaaaagcaagaaggccagaaaggccaagaaggctgtagcggccaagaaagcaaccaagaaagcagccaagaagtccgcgaaaaggtcggctaagaaagccacgaagaagactgcaaagaaatctgccaagaaggccgccccgaagaaagccgccaagaagggcgcggcaaagtcggccaggaaggccgcacccaagaaagccgcaaggaaagcggcaccgaagaaggcgaaggcagctcctgctccgaagccgtcagcaccggcggaagctccggctgccgagcctgccgccgagactagctgggcgatgccttcgccttctgcggagccggcggcggctgccgagggtcaggggtagggtcggactttccatccccttggaagaacagaaggccgcagcgccgggcgctgcggcctttttgcatcgttgcaagcagggtggaccgccgcgttcctccgcgcgatctgattcgtggccctgggatcacgccggccaacgacgtccggactaacacggggctcctctgcactttggaatgcaaataatgtgatcaagaagccacacaggcggacaacctttcgtgaaaccgtcaaaacgcccaaaaagtcggcagatgcccgccctttttgcttctcggttcacgcccctcaattcaaattgtcgcagtcacgcaattttgcagatgggtcgtatgcccccggggggcttccgggatccgaccgagtaagaactggcgatggggatcgaaatgaaaaaagtggctttgttggcaacggcgctggcaatggtgacgacgggttcggctttcgcggcggatttgcgtgtgaaggcgctgaaggccccgccgcccccggccttcgacccttgggatatcgccttcggcggcgcgatcatgagcaactacgtcttccgcggcatcacccagtcgaaccacaaaccgtcggtcgccgcctatttcgagccgcgctacaacgtcaccaaggatctccagctctatatcggcctcgccggtgagagcatctccttcccgaaccgcgcggcggccgagatcgatgtctacggcggtattcgcccgaccttcggtgcgttcgccttcgacatcggcgtctggggttacctgtatccgggtgggacctgctattacggcgcagcaaccgacaccgccggcaatccgctcgccgagtgtgccgccaacgccctgctcaacggcaacgtcatgaagagggacgtcagcttcttcgaagtctacggcaagatgacctacacggtgaatgacaattgggcattcggcatcagcgagttctattcgccgaacttcctcaacaccggggcttggggcaactacacttcggtcacggccaaatggatagcgccgagcaccaccttcggcgcgagcggcgtcgggatgtacgtgtccggcgagttcggccgtcagtggttcggcacctccgattcgttctatggcacgggcattgccagcccgctgggtggcggcccgttcccgaacggcatcaaatatgccgactacaacacctggaatatcggtgtcggcttcacctacaaggtcatgacgttggatctccgttactccgacaccgacctgagcaggggtgattgcaatgccttcaccagcgactataccgccggcggaacgaccaatgcgaccccgatcaaccccggcggagccggctccaagtggtgcggcgcgaccggcatcgccaagctctcgttcgatctgacggcgatgaccaacctgaagtaagtttcttccaagcgacttggcgagggcggcagggcaacctgccgcccttttgctttggctgcggtctcttcacgaaagtcatgcccgggcttggcccgggcatccacgtccttggcagcgccgcacaacgagcgcgcagatggccgggacgaggccggccatggcgaagcagcagcggcagcgaacagccaccgagcgccttctcgccgggagggacttggcttcaattcggaggagaacagatgcggcttgcgctccgcctcagcgcgccgcgctcggctccgctgcagcccgttcaccgccgaggacatggattgtgccatctttcaccagcgctaccttgcgcgtgtggaaggcgtcgagcgtcgagcggtggccgatcgagacgatggtggcctgcggcagcttctccgccagcagccggtaaagccgcgcctcggagggctcgtccagcgaggcggtcgcctcatccaggaacagatagtccggcatgtgcagcagcgcgcgcgcaagcccaaggcgctgctgctcgccgagcgacagcatccgattccagtgaccctcctcttcaagccgctctgcgaggcccggcagcccgaccgcgaccaacgcgtcgcgcacttgcgctggggcgaacgcgccgggtgctgccggatagaccacggcgtcgcgcaacatgccgactggaaaatagggccgctgcggcagcatcatcagctttgccttttccgggatgacgaccgtgcctgtgccgaacggccaaactccggcgatggcccggaacaacgtcgacttgccggagcccgacggtccggtcaccaacacgcgctccgacgtctgaatggcgaagcccttggcggcgaccagcggcgtgccgttgggcaggttcacgcagagctgctcaagctcgatatggccgctgctgccggcgacttccagcgcgatcgcaggctcatggagcggcaggttcgcggccgaatcgaccgacatttcaaagccatcgaggcgcgcaacgatcgaccgccactccgccagcgaccggtaagccgtgacgaagaacgacaaggcgccctgtacgctggaaaaggcggatgcggtctgcatcatgtcgccaagctggatcttcttggcgaagaaggccggggccaccagcacgtagggaaagatcacggcggcctgctgatagctggccgtgaacgcggtgaggcgtttggtccggctcatgatggcgtaccagttggcgatcacgaagccgaaacgatcgagcaggcgggcacgttcggcgccttcgccgttgagcagcgcgatctgctcggaattctcgcggacgcggacgagattgaagcggaagtcagcctcatagcgttgctgttcgaagttgaggttgaccagcggtgcgccgatccaatgcgtcagcgcggtgccgaagatcgcgtagatcaacgcgccccagcacagatagccgggaatcatgacatcggtgccgaacaggcgcagcggtgccgcgtttgaaaggccccagaggatgatcacgaaggagaacagcgtcacgatcgacgagagcaggccgagcccgatgctcagcgtctgctcgacgaagttcttgacgtcctcggtgatgcgctggtccgggttgtcggccgcatcgcccttgagctgcatgcggtaatgcgtggcattctgcagccattcgccgagatagtgccgcgtgagccattgccgccagcgaatctggagccactggttgaggtaaagcttgtagaccgcgagcgcgatataggtgaacgcgagcgcgataaagatccagatctcccgcacgaaggtgtcccagtcgctggtctggagcgcgctgtagaaccggttctgccactggttcaccagcacatcgatcgcgaccagtgccagttccatcgcgaccaccgcggcgagcaggccgcgcccggcccatttgtcctcggatcggaaatagggggcggcgattcgccagacgatcgcgagcgtggcgctgatgttcttcacagagcagggtctcctcggggaatgcgtgtatagcggcccagggccaaagacttgaggcaatgttggaaacgggcgcggttagaccaaagtcgcaagctctacaatttgcggtggattgtcgcacccggcgaccctagcatggggctcgacggcgcgggtggatgctcagggattttcgcgagcttgtgagcgggcgggaaccgccgcgttcgcgaggaatttgcgtccagctcaggctttatcgcttcagcttcaagcaggaccggctctccacgcgggccgcctgccacaaacatgcgtggggagaaagaccatgtggaatcaagtctatgatccgctgaacagcccggtgctgtcgacgatcgcggcggcggtgcccgtcgtcacgttgctggtgctgatcgcgagcgggcgcgtccaggcgcatatcgcggccattattgccgtgatcgtggccaacctgatcacgatcttcgtcttcaccatgcctgcgaacatgtcgatccgcgcctcggtgctgggcgtcgtgaccggtttctttcccatcggctggatcgttctcaacgtcatctttctctaccaggtgacggtggccaccgggcgcttcgagcttttgaagcgcgcggtcggtggtgtcaccgaggaccggcggctgcaattattgctgatcgccttctcgttcggcgcatttttcgagggcgcctcgggcttcggcacgccggtcgcgatcaccggcgcggtcctgatcggtctcggcttctcgccactcgcagcttccggcctgtcgctgatcgccaacaccgccccggtcgcctatggcgctctgggtacgccgatccagggcctctcctccgtcaccgggatcgatccttacatcctcggtgcgatggtcggccggcaattgccggtcttctcgctgatcgtgccgttctgggtggtgtgggcattcgcgggctggaagggcatgaaggacgtctggccggcgatcttcgttaccggcatatcgtttgccgtcccgcaattcgtgatctcgaactacatcaatccctggatcgtcgacatcggcgcgtcgctgatctcgatgggcgcactgatcctgttcctgaaggtgtggcagccgaagcagctctggctgtcgccggcgttgcgcggcaatgatgaatcggccgccaccatggcggcggcaaggccgctcgacaagacgccgctgacgcagagcgagctgttcagcgcgctgctgccttggatcatcgtctgcatcgtgatgctgatctggggcaacggtggcttcaaggcgtgggcgaactcgatcttcgtctggaactaccccgtgcccgagctgcaccagatgatcaacaagatgccgccggttgcgccgggcccgacgaaagagagtgcggtgttcgccttcacctacttgtccttcaccggcacgggcatgctgatcgctgcgatcatcgcaggcatcctgatgggggtcggtcccggcaagctggcggccgagtacggccgcaccatccggctgtgcgcgatctcgctgatcacgatctcggcgatgctggcgataggcacgctgacgcgcctgtccggcgtcgacgccacgctcggcctcgccttcgcggcgaccggcgtgctctatcccttcttcggcacgctgctcggctggctcggcgtggcgctgacgggatcggacaccgcctccaacgtgctgttcggaaacctgcagaagatcacctccgagcagcttggcctgtcgccggtgctgatggcggcggcgaactcctccggcggcgtcatgggcaagatgatttatgcgcaatcgatcgtggtcgcctccaccgccaccaactggtacggccatgagggcactatcctgcgcttcgtgttctggcactcgatcgtgctggcgtgcctcgtcggcgtgctcgtgacgctgcaggcctatgtctggccgttcacggagctggtgctgaagtagcgatcgatgtcgctgacgacgcaaatccccgcgaggatcccctcgcggggatctttgcatctgcgcgaaccttctcaaggacgcggccgtcttatagaaggtgccgcgaatcaggtcggtccaggggtttcatggtttcgctcaaacgattgatgtgtgccgcggttgcaatgctcgcgatgtccacattcgcgcgtgcccaggaggggtttccgttcggtaccgaaatgacgctggaagcgctgccgcaagccggctcgaagcggataccgaacatcgagatcggcgaccacggcgaggttgtgctggagctttggtgcaagggcggcaaggggcagttctcggtcgccggcaacaccgtgatcttcgttcccgggcagatccaggaccgttcctgcccgcccgcccgggcccgggccgacgacgaactcctggcagcgctcggcagcgtcgagacctggac

SEQ ID NO: 252 - DNA, 121950 bp, Bradyrhizobium colbertium
  misc_feature (50577)..(50586): n is a, c, g, or t
tggattgcttcgctgcgctcgcaatgacggagtatggagctacagacgatgcccaccatcaccgccttcgaaagctctcccgatcgtggccgaggacaggcgcgcgacatgcgcgtgcgctgggcgctggaggaggtcggccagccctacgacgttcgcctcgtctcgttcgaggacttgaagcagccgccgcatcgtgcgctgcatccgttcgggcagattccgacctatgaggacggcgatctcgcgctattcgagtccggcgcgatcgtgctgcacatcgccgagcgccatgccgggctgctgccgcttgacgcgaacggcaggtgccgtgcgatcgcccggatgttcgcggcgctgaacacggtggagccgccgatcgtcgagctcggcatggccatgctgctcgagcgcgacaggagctggtacgccgagcgcctgcccatgctgcaggaccgcgtccgtgtcaggctcggcgaactgtcctgccacctcggcaatgccgaatggctcgatggcgcgttcagcgccggcgatctcatgatggtgacggtgctgcggcggttgaacacgtcggggctgctggaagagtatcctgacctcgccgcctatgtcgcccgcggcgaagcgcggccggcctttcagcaggccttcgctgcgcagcttgcggtgttcaacgccgcgcgttcgtagcaaccacgggccggctgcatcgtctctcggctaaacgtcgaacgcgcgatgccgcgcgtgcttcgatgcaacgatggccgcaggcccgcgtattgcaaccgcgacattccggcgataccactccgggtgaatgagccggttatcaaccgcctccacacctgaggaaacctgcgcaatgagcgacgatctctccggcgtctgggacggcagctacatccagcccggcgtcggcatgatcacgttcacggcgaccctcgtcgagaccgggggcgcgctgagcgggagcgtgaccgagccctgcatgatgccgggttgcccggtgagcacgcacaattcctcgatctcgggtcatcgctccggcagtgcggtctcgttcatcaagcgctacgagccccccggcttcggctacgaccgtgtcacctatgagggcacggtgaacgccgaggcgaccgagatcgacgggcgctggcgcctgccgggccattccggatcgttcctgatgatccgcgccggcaagcctgcgcaggcggtaacgaccgaaaggcgtgccaaggagccggcacgctgatccattctgcgatcccctaccgcatcgtgatcgcaaacccgctgagatcggcgttcgccatcagcccgacctggtggccggtcagctccagcaccgcgcccttctggttggtcagcacgatggcgcgggcgccgcggccgaccgcaaggccggcaccggccgcgccggagactccggcgacgtcggagggacggttgatgttggagacgcgcccgcgcagcacggtcttggagccgccgaacacgaggccgtagtcgagcccgccggtcgagagcgcataggtgcggccgcggaagttcagcacgcccgagccgcccgagccgccgatgatccagcccgccttgtagatcgtcagcgtcacgaagccgctgtcggcccgcgcggcgctcgagaggccggccaaagcggcgatgacgagcagcgcggcgcgaaaggtggatgcgatcttcatgggtgtctccgggggctgtttccagggcaggattggcgaatcagacgcgaggaatttacccgatcgatcgcggcggcaacatgatggggcggaggacgcgggttgcgggttgtagcaacgccccaattgtcatcgcccggttcagccgggcgatccggcattccagaggtccgcgtttggaagtcactctcgccatatcagacgcagcgcactggatgccacgtccaggccggggcatgacggcggagtcttgggccgcgcaccgaccgtcgccagcatgccattctgcccctgttttgcccgacggcgcaagcgactacttcgactttcacgaattctggaaaacatcaatgatttccgtgcagcgcctactgtgcatggggttgttttcgcattttcgttttgagaggccgccgtctgccgctacgctcacgcgtcagcgaccgcaatcgaggtgatcccatgccgatccagcatttcgcgcccccgccgcacgtccaggcgccgccgctgtcctttgcgacgcgcgtcggcgatctcctgttcgtctccggcattcccggcttcgatgcatcgggcgcgctgcccgacggcttcgaggcgcagttcgccaatgtcgtcgtcaacatccgccgcgtgctgggcgaggcgggcgcaacgttccgcgacctcgtcaaggtcaacgtgctgctgacccgcgccggcgatgtggccgccatgaacgcgctctatgccggcgccttcggcccgccgccctatccggcgcgcaccacctgcgtggtgcaggcgttgcccaggccggagatgctgatcgagatcgaagcggtggcgtcgctggcggggtgagcgtgtggcctgccgggcacgcggccgaaccaaatgcctcgtgcgcacctgacatgtccgtgagcggcggctccccggcttgccaaggcttggcttttaccgcacgagtttttggatcacattccccaccaggagatatttcatgcgtcgcgttctcgccctctgtgccgttgccggcattgccagttccgtgttcgccgtgccggcctcggcgaaggtcggctattacgtgatccgctgggacaacaccggcatctgccaggtctggaacgaggacctgcagtacaagccgctccagatcggcgtctccacctacaaggtcgtcagcaagtcgttccccaccttccagcaggcctccgacctccagatcaagatgcgcgccgagcgcaagtgcacgctctgagccggacgcggcagatcgcattcgaagggcgggtcgcgggcgcgatccgccctttctcgttgcggacgcggccccgcattttccagccatgatcctgcgtttcgcgcgcccgctttgaacctgtcccagccgcggaactactcacatcttgtccggggcgcctgcccagaagcgtcccgcgccagccctccccgcattgccgggaggcgcatcacatcattcatttcgaggagctgatcatgcgtcgtatttccgtgctgtgcgctgccgccggccttgccgtcactgcgttcgtcgccgcgagcccggccgaagccggctatcacctgatccgctggcaggacagcggcttctgccagatctgggacgagagcatcccgaccacgccgtggccggccggctatcaccgcgccagcgccagcgtgccgaccttcatcgacgctctcgtgctgaaggatgccgcgctgaagagcggcagctgcacttggtaattcgatcggcggacgaagagccgggcaaggacgggcatccgtccttgcccggttttgtttgtgttgcgtgatcgcgggctgatgcgcgctcacgcgtccttgtgcgcgccgggatggatcaggatatcgcgcgcggcggcgaggtcgatgaaggcttgcgcgctgccgccgtgatcgggatgcatgcccttggcggcgcggcgataggcttggttgatgtcctcgcaggtgagctgcacggcgagcggcaggccgagcatcttgcgggcgcgatcctcgctcgacagcttcttcggcatcgcattgcggcgaccaaagcgcggcgcggtcagatcgtggacgacctcgagcaccacgccgagacggcgctgcgccgccagcgtcacgctatgatcgtcgttgtccaccgcctgacgcagcaccgggagggcctgctcggcggcctggcgcagcgtgacgtcgctgctcatccgcgcgatctcggccaccagccggccggcctcggcccagtcgggcgagtgcgccgaccgcaatcgttcgagggcgagtttccaggggtcgagccgttccatcatgcgcgcaacgtttagcaatcagaatcagtatgccaaggccgccgtttccgaccccttaatttcgagttagcttttcgtggcacttcgaaaagaaaccgggaggaatatgtcatggcgcagctcgcaaaccacatcgccgtcgtcacgggtgccggctccggcatcggccgggcgatcgctgccggctacgcgcgggaaggcgcgcaggtcgtgctgctcgacgtcaacgccgacaccgtcgcggaggccgcgcaggagatccgcaaagccggcggcaaggccgagagcttcgcgctcgacgtgacccggcgcgaggattgcttcgcgctggccaagcaggtcgagggcaaggtcgggcaggtctcgatcctcgtcaacaacgccggcatcacccgccgcaatgccttcaccgcagagaccgagacggtggcaaaggactggaacgacatcatctcgctcaacctcaacggcgtcttcaacatgacgcaggcgttcctcgcgcccttgcgcgccagcaaggggcgcatcgtcaacatcggctcgatccagtccttcgtgcatctgcgcacgccgagctcggcggcctacaccacatcgaaacacggcgtgctcggcttcaccaaggcgctcgcggccgaactcggcaaggaaggcgtgcgcgtcaacgcaatcggccccggcttcatcgagaccaacatcaacgccaatgtgcgcgcgaccaatccggcgctggtgcaggccttcctcgatcacaccccgctggcgcgcaccggcaagcccgaggacatcgtgggacccgcgatcttcctggcctcggacatgtccgcctatgtcacgggcacgatcgtgatggtggacggcggatatcggacggtgtgagggaagacatctcccgcccgcgggaatcgcggccgcatcttggcattctcaaggtcaatttgctgcggcgccctgcgattaacctttcattaaccaaacgcgaccaccgtagatctacggcttgggggtcgtttgttctcgatccgcttccgacgatgggagcgggcgttgatcggggagtgtgttgatgaccactgttcatgtcgctgcgtccgaatcggccgcacagtttcttgcccccaaccaggtcgttccgctgctgatcggcgcgaccgtcgacgaggtcgagcgcgagctcgtgctgcagacattggcgcgctgcgacggcaaccgcacccgcgcttcgcgcgtgctcggcctgtcggtacgcacgctgcgcaacaagatccggctctatgccgcttccggcatcgacgtgcccgcctgccaggactagagcgagggtcgcgtgcttcgacgtggacggcgtcccgcgatgcacgggaagaattgctgctgtcgtcaaacgccgctaagtagcttgcttcggtgaagggagcagcggcgtggcagacgatcagggacgacggccgggacctcagggccctcgcgggcgacaaggagaaccgggacggccggggccgcaaggtcatcccggccggcgcgggcccgacggcgcgcgcggcaagccgggaccgcagggcaagccgggtccggtcgggaaggcgggcccgcccggcaagcccggcccccaaggcaagcagggcgaagccggcccgcgcgggccggccgggccgcagggacccgccggacctcagggcccggcaggcccgcaaggaccgcgcggcgaaccaggtccccccggtcagctgccgtcgatcgagcaggtgctgccgtggctcgagcagctcttcgatgcctgggacgaacgtcgccgccagcgcgagcgcgaagccgccgagcgcgacgcgctcgaggccgccgtgcgggaagttgatgagccggtcgccgatcacgagagcgatgacggcgaaagcggtgagcacaagaaaaggaagagaaagaagaaacacggcaaggattagccgggcgccagaacgcgcgcagcagtcaagacgccccggacggatcatccttgcgcggcagcatgcccatgcgctcgaactgccagcgcatggcgcgataccagagatagccgaccatcgtgccgagcagcgtcaggatgacgaggttgacgctgctgtatgagccgctccaccacatcatccaggcggtccacagcaccgtgaaggcgacggcgcctgctttcagaggaagaagagggcggctcatgttcgtgctccgggttgccaaaagcccggcgagcatcctcgcgcgatcaggcgacctcttccgtgagccagatcacgcaatagcctccaggggagagctaaccgaaccgcagccgcgagcgctccttcgccttctccgcctcgacctcccggtcgcgcgccggcgcgtgcgtatgcagcgacgtcaggagtcttcgcgcggcgtccgagacttccgccacggcgcgttcgaacacctcctcattggcctgtgacggtttgttgaagcccgacagctttcgcacgaactgcagcgcgctggcgtggatctcgtcctcggtagccggtggctcgaagttaaacagcgtcttgatgttgcggcacatgcaatctctccggatctttcctcaacgacgaacggcggcgacgaaatcctacatcctcgcccgcacgcctgttaagttcggtggcgcccctgagcttcacgcgggcacggcttgatttcgcatcgcatcatgcgcgccttgccgccgcatattatttgagcatgcattgtgatggcagctcgggcttaatcgcatcaacgacacgaatcgagacgcgatgaggaggatcgcatgcacaggctggctctgtgcgtctggttggctgcgacgatgctgacgaacaccgcgttcgcgcgcgacaacggccagtacgaccacgtcccgcccgacatccgcgcctggttcaagagtgtgatcgcgccgaacggggttccctgctgcgacatctccgatggccatcgcaccgaatacgacgtgcgcaacggcgcttattgggtgccgatcgagggacaatggacggaggtcccggaacgcgccatcatccgcaatcgcggcaatccggtcggccaagccgtggtgtggtacgtccatcaccgcggcgccgtcatcatcagctgcttcgtgccggctgatgcagtttagcacgatggatttcgttggctggcgcggcttgatcgggtagcctgatgccaagctatagcggagccatgccgttgaccgatcttagcgccaaagacctcgccgccatctatgccaagccgactccgcgcgtgatcgcgaaggcgcgtcccgccatcgatgcgcatgcgaggaagttcatcgagatgtcgccattctgcgtgctcgcgacatcaggcgcggacggcagcgtggatgcctcgccgcgcggcggcagcatcggcttcgtccgcgtcgccggccccaaccggctgttgatgcccgaccgctccggcaacaaccggatcgacagttttcggaacgtcgtcgaaggctcgggcttcgtgcatctgctgttcttcgttcccggcatcgacgagacgctgcgcgtcggcggacgcggcacgctgtcggccgatccggatctgctcgccacgatggtggagttcgggaagccgccgcgcgccgtgctgaacgtcgccgtcagcgaagtctatttccattgcggcaaggcgctgatgcgctcgaagctttggtcgcccgagaaggtgcaacgctcggtgatgccgagcattgtcgaggtcattcacgaccagacgggcctgggcgagccgcagagtcagcaggccgtggaagagctttacaagacgcagttgtagccgggcagctttccagacacgccgtcttgaggcagcaatggccaggtcaggcctggccatgacgatgaagcgagaggagcttagtgcccctccccctcgaggccgccgacatgcttctgggtgtagagctccagaccgatgcggccgatcagatcgagctgggtctcgaggaaatcgatgtggtgctcctcgtcgctcatcagcttctcgaacaggtcacgcgtgacgtagtccttggcgccgtgacagtaggtcgccgcctcctggtagagcgcacgcgcgctcatctcggcagcgaggtcgcactcgatgatctccttgacgttctggccgatgcgcaggggatcaagcacctgcatgttcggaaagccgtcgaggaacaggatgcgcgcggtgagcttgtcggcatgttccatctcctcgatggactccttgcgccagaccttcgccatgtccagcaggccccaattgtcgagaaagcggtagtgcagccagtactgattgatcgcagtcagttcgtgacgcagcgccttgttgagatagtcgatgacttttgcgtcgccctgcatggttcactccagtcttgcagtccaaatcggccataaccgtatttagaacgcttctaaatgagttcgtagaccggggcaaccggctacggagacgcagccggggaaaacgctggggaggatgctgaagctttcagcaggccgcgagggcaaactcggcgggctcggccgtctcgtcattggcggccacggcgtggctatgggggcagccggcgcagcatgaatcggcgcagggtccaagcgcttcatcgatgatggtcttgatagtccgggcacaccggccgcattcagcgctacagccgagacatccgtagacctgcttggcatggcgcacggcatcgtcggactcggcgacggcagcgcggatgtcgtcatcgctcagcacgttacaggaacaaacgatcatggaagcggcacgcccttcggtgatgcgtcatcatcgatatttaacgggccggccggatgcaaaaggaaaaaccagtatttgaagctattccaaactagcccggacgcagcctagatcggctccaaagcagagcgttgcgctgcatcaagattagagcggatctagtcaccgccgccaccgccgccgccgtctccgccacctccacaatcgcctccgctgctgccgccctcgccactggagcagctgcgagtgtcagccgagttccccgacccggtgccggaaaacaagtctctcagggaggagccgtcgcttattccggcataggtgctgccgccactcccgccatcgctccccgctgtcacacgggaccgccgggcgcgattttggaggtgtgtgatccaaccgtagccgatcgcgaaaacgaccccggcgccaatcagtgcattgatcatcgccttgctcattctcgcctcgttgtcggagcttcggcccgtgccggttggtcgtccccggcaggggtgccgttcattgatcattcaatcgaagtgtggaactctgttcccaaagagttcccgcgtaatttgtgcgaaaggtcaagctcatgaagaagccactcctggcggtggttgccgtcgccaccctggccctcacggccggcacaccggcccaggcgcagcgacgccgcgctgcgggcgtggcggccgggatcatcggcggcgccatcgtcggcggcgcgctggcatctccgtattattacggacctggaccgggctattacgagccgggctactacccgccccgctattacgcgcccgcccccgcctacgtcgtcgacgactattacggcggtcgccgcatttggcagaagcagcgcttctgggacggctatgcttggcgcgcccgccgcgtcagagtctgccgttgaggcgctggagcccacctcggcatggatgcaccgttcatctggaagcctgaaaaagaccgctttttctcgtcacagctccgtgcgcgtttaccgtggattgaccaattgcgcgcttcctagctgcacggccaattccatccgcgtctgcgtgaacctttgaaacccgagcgcccctaacaaggggagcccatctcccaggagagccttgagcatgaagaagacactagttgccgtcctgacggttgcgacggtcgccggttcgctggtgaccgccactccgtccgcgaaggcccatgacggcatcggcgccggcatcgcggccggcctgatcggcggcgccatcgtcggcggcgcgatcgcgtcgagccgtcccgcctatggcggtcccgtttacgtggccgagcccggcccgccgcccccgccctgctattggcagcgccagcgctattgggacggttatggctgggtcgttcgcccggtccgcgtctgctactgatctgatcggcgcgcgcattcgcgccgcgatcgaagcccggccgagcacctcggccgggtttttcgtttgaccctctgctatcgcgccgcctggaccgcgcgcagcacgtcttcgctcggccagcaatcgaccttgagacccgccgacttctggtaggcgccgagtgcggcgcgggtctgcatgccggccttgccgtcgatcttgtccttgtagagcccgacccgcgtgagctcgcgctgcatgatctcgacgtccttggtgcgcaactgcctggaagccgaccaacgtgtcgcgaaaggcaacgggctcgtcatgcgatcgctgaggtggccgacgaacagcacgtagagatcggagaaattgtattccttgatgacgaagtaattcttcgtggtcaggaacgacgggccgtagatgccttcgggctggagcaacgaggccggctgcgcttgctcggccgcgctgagtttttggccacgcaccggaacaaagccttcgcgcagccactggccgatcggcttcgtcacctcgggcacgcccatcgtgcaatcaaccttcgcaggagcctgcacctcataggcccagcgaacgccgctctgccagcccttgttgacgagctgctgcgcggcggaggccagcgcatccggcacggagcgccagatatcgatgcggccatcgccatcggaatcgacgccgtgcttgtaatactccgagggcaggaactgcgtgagcccggtggctccggcccacgatgagcgcatgtccttgcgcgtcaccacgccttcgccgagaagcttgagcgagaggatgaattcgttgcgatactgatcctttcgccggccgacgtaggcctgcgtcgccagcacccggacgagatcgtaaggcagcctgtagcggccgtaatcggtctcgcggccccagatcgccagcatcacggtcgccggcacgcctgagttcttctcgatctcggtcagcacagggcgatatttctgcagcagccgctgcccctcgcctgcgagccgcgcgatcgaggcttccttgacgtagtccgccggcacctggacgaactcggcctgcgacggggcgccggtcgcgggccgcccgggtagaagcaggtccggcagcttgtagtcgggctcgagcccgcgcgtctctcgctcgaacgtcatgcgagagacgcctgcggcctgcgcttccggccaaagcgaggcgatgaactgcgtgaagccagcgtctgcggcgcggccggacgtcgagccgcaggtgagcaagatcaaagcagcgatgaacgtccgccgcatcatgccgagatcaccgcgtcagtttcttgtacttcactcggtgcggaatgatgctgtcctggccgagccggcgcatcttgtccttctcgtagtcctggaagttgccctcgaaccattcgacatggctgtcgccctcgaaggccaggatgtgggtcgcgatgcggtcgaggaaccagcgatcgtggctgatgatgacggcgcagccggcgaaatcctccagcgcctcttcgagcgcgcgcagcgtgtcgacgtcgagatcgttggtcggctcgtcgagcagcagcacgttcgcgccggacttcagcatcttggcgagatgcacgcggttgcgttcgccgccggagagcgcgccgaccttcttctgttggtccgcgcccttgaagttgaaggccgagcaatagccgcgcgagttcacttccttcttgccgagcaggatcagctcgttgccgccggaaatctcctcccacacggtcttcttgccgtcgagcgcatcgcgcgactggtcgacgtagccgagatgcacggtctcgccgaccgtgatggtcccggcgtccggcttctcctggccggtgatcatcctgaacaacgtggtcttgccggcgccgttggggccgatcacgccaacgatgccgccgggcggcagcttgaaggtgagattgtcgatcagcaggcgatcgccgaagcctttgctgaggccgtcgaaatcgaccacgttggcgccgagccgttcggcgaccggaatgatgatctgtgcggtctgggtctgcttctcgctcgccttcttgagcagctcctcataacgctggtagcgcgcttttgacttggcctggcgcgccttcggcgatgacgcgacccattcctgctcgcgggcgagcgtcttctggtgcgccgcgtcctcgcggccttcctgctcgaggcgcttctgcttctgcaccagccaggacgaatagttgccctcgtagggaatgccgcggccgcggtcgagctcgaggatccagccggtgacgttgtcgaggaagtagcggtcgtgggtgacgatcaggatcgcgccgggatagttgcgcagatggccttccagccacgacacggattcagcgtcgagatggttggtgggctcgtccagcagcagcagttcaggctggtcgagcagcagcttgcaaagcgcgacgcggcggcgctcgccgccggaaagcttggtcacgtcggcatcgtcgggcggacagcgcagcgcgtccatggcctggtcgaccttgctgtcgagatcccagaggccctgcgcctcgatctcgtcctgcagcttggtcatctcgtcggcagtttcctcggaatagttgactgccagttcgttgtagcggtcgaggatcgccttctgcttggcgacgccctgcatgacgttctcgcgtaccgacagcttgggatcgagctgcggctcctgttcgaggtaaccgacgcgggcgccttcggcgacccaggcttcgccggtgtattccttgtcgaggccggccatgatcctgagcagcgtcgacttgcccgagccgttgacgccgagcacgccgatcttggcatccgggtagaagctcaggtgaatgttatcgagcaccttccgggtcgggtagctcttggtcaggccctgcatgaaatagatgaactggcgcgccatcggtcccgtgaaaccttcgatttgaggaaatttgcttgccgccgatgtaacgatcccgcccccaaagggcaacgttttccgtccgttcaccacggatgaatacggtccggataccatctcgccgctgatccggacaattgaaaccatcttttagtaaatcaggctgaaagctcggtttcgcgcggaaacagcgccacccgatcagaacgaacgggagcacagcgaggccgcatcatgtctctgaccgagaccagctctcttcatgctccggcagaagccggccacgtctccgggttcgtctcggagatccagggcttctggaagcgcttcttcgccgccgccttcaacccgtaccggcccgagctgcactacatgcgcggaccgggcccggcctggcgcgccaagcacggcatggatgcgccgctccgcctgaaaccacgcaacttctgagccgctctccgctatcggatttttgaaggcgcgagcagcttgcgtgcgggttggattgcgcgcaaccatggccaggttccgaagacggcgcccgccagcgcccccacctctcgccatggatgaacgctgatgagccggctgcgctgtgcaattctcgacgactatttcaatctcgccctcgacgttgccgactggtcgaagctgtccgaccgggtcgacgtcacggtgttcaggcacccgttcgcctccgagcaggcggcggccagcgcgttggctgatttcgacatcatctgcgcgatgcgcgagcgcaccggatttcccaagagcctcatcgagggcctgccgaagctgaagctgctgctgacctcggggatgcgtaacgctgcgatcgacatgcaggcggccaaggcgcgcggcattgccgttggcggcacgcaatattcccgcgatccgacggcgccgctcgccatgggcctgattctggaactgacgcgcggcatcggccgcgagaacgcgcgcatgcacgccggagagccctggcagagctttgccggcgtcgaaatcgaggggatgacgctcggtatcgtcgggctcggcaagctcggcagcaagatggccgggatcgcgaaggctttcggcatgaacgtgatcgcctggagcccgaacctcacgcctgagaagtgcggggaggttggcgttggctatgccagcaaggacgagcttttcgccaaggccgacatcgtcaccatccatgtcgtgctgagcgagcgctcgcgcggtctcgtcagccgcgccgatctcgcgcggatgaagccgaccgccttcctcgtcaacacctcgcgcgggccgatcgtggacgagcaggcgctgctggaagccttgcagcagcggcagatcgcgggcgcggggttggatgtgttcgcggtcgagccgctgccgatcgaccatcctttccgcaagctcgacaacctcgtgctgacgccgcatctcggctacgccacctcggacggattgcgcgctcattacggtcagatggtggaggcgatcgatgccttcacaaggagcggcgaactgccgcgcaagctggcctgaaacgacaatgggcgtgccaaggcacgcccattgcagtcgagctcttcttgcagggatcagcgcacagtgaccggcgcaggcagcggcggcacgacggtcggctgggtgcccgggacgggaccagcctgggccgacattggcgccggaccagcagtaccgggtgcggcagcgccgggtgtcggcgccgcagaggcggtcgccgttcccggcggcgggccgcccggcagcaccacgacgcgggtgccgaccttgacgcgctcgaacaggtcggagacgtcctcgttgagcatgccgatgcagccggaagagacgaacttgccgatggtcgagggctggttggtgccgtgaatgcggtacacggtcgagccgagatacatcgcacgggcgccaagcggattgccggggccgccggccatgaagcgcggcaagtaaggctgtcgttcgatcatctcggtcggcggatgccaatccggccactcggccttgcgggtgatcttctgcacgccggtccaggtgaagccgtcgcgacccacgcggacgccgtagcggatcgcacgcccattgccgagcacgtaatagaggtaggtgttggaggtatcgaccacgagcgtgccgaccggctccttggtctggaacgcgacctcctggcggcgcaggttcggcggcagctgcaccggcgcggcgtcgggctgctcctcgggcggcagcgcggccagcgtgatcggccggccatcggcaccgacgggcggctgcgcggcctggaccgtcccggtcgcggcgggaccgccaacagcttccggcggacgcagtccgtcattgccaggcgcctgctgacccgggcgattggcatagatcaccggcggcggatcggccggccggccataacggggatcgtcgggtgacatcacggggccctgcggcggcgccgccgagtagaccggcgtggcgccagccggacgaccataacgcggatcatccggcgacatcaccggcccttgcgggggagcggccgaatagactggcggacctcccatcgggcggccatagcgcggatcatcagccggaccgggcggcggcagcgatgcctgcggcatggcttcgtcgtcttcgtccagcgcgtcgaaattcggcacgcgatcgccggggcggtattccgccggagctccatagcccggcacctgctgaaccggatagctctgagcctgagcgagcgaggttcccgccgcagcgactgttgcggcagcgcatatcgtcagaaaatgtttgatcatcatcgctcttgtatagtccccaagcccgatcggaccgttaacggccagatgacggaagatagcggcacattcaagacatatcaggcttatttgcgccggatttgccgatttgtgatccgctagactaccgttgccccgttgcatcacggggctgaaatcgtgtcgtgccgtccattgaagcgatggtcggcggcgtttttcacggaacgatgcgcaaacgttgcgatatggtcgaatccgcctgattcgccacctttttgagctccgattccatgcggcgaacgcggcaagcagtaccgtcaccgcgttcagatggctcttgggtcccggccacgtcgccgccggggcggaaattcgcaatcgctcgatgcttcccggctttcgcttcctgtttgccgcgatcctgctgtcaacctccatcctggtgttcggcctaggggccgccgcgctgctgcgggcgacccatcagcagtatgtcagcaacccttcctggcgaaacggtccgcaggaacaggtgtttgcgcaggcgcccgagccggcccagcccgtgctcgcggtgttgcgagcggagccggacgagcccgtagccgccgcgccggagccgtcgctgcgcgaccagataccgacgatcggactgccggcccaggaggccgagcaggtcgccgcgctgacgcccgaaccggacccgcagcccgaaatgactgcaacgccgaccgaagtcgctgcgatccggcccgtcgagcccgaagcggccgcggaggtcgcagaggcgacaccgcgcgatacgctcacaccagacgacaccacggcctcgatcccccaggccgcgccagcctcagccacatccgagtcggcgcctgcccaggtgggcgccgccctcccctcctcggcgctcgaggacacttcaacgaagctatcggcgctgaacgatccgacggcgacgtccgtgaaggacacagcagcgaaagccaaggttgatgccaagcctgacagcaaagcgatcaaatccaaggccaaggtgaagaagcggcctcgcgtggtacgacgtccgccgcctcagcaattgcagcaacagctcgatccgttcggtcagccgcagccggccttcgcgacgacaacaacggcgcgctcgcgttaacgcgcttcttcgccttagggcgagaggcgtaccgccaccgacctcacgccgggccggtcgcgatcggcgggccgtcggcctggccccattccgaccaggagccgtcatagagcgcggtgtcggtgatgccgaggcgatagagcgcgagcgtcagcacgccggccgaaacgccggagccgcagctcgtcacgatcggtgcatcgagcttgacgccggcgcccgcgaacgccgcgcggagatcatcgaggggcttcatggtgccggtcgcggtatcgaacagcagattgtagggcacgttgcgggcgcccgggatgtggccggagcggatgcccggccgcggctcaggcgcgcggccctcgaagcggtcggcggcgcgcgcgtcgatcacctgctcggcgcggctttccacgttggcgatcagctgctgcatgctgcgcacgcgctttgaatcatagctcgcctcgaacgttgccggcttcggcttcacgtcgccgctttcgaccgggcggccctcggcgcgccacttcttcaatccgccattgagaatgcgcacattgctgtggccgtaggacaggaacatccaccacgcgcggggcgccgcgacccagccgccggcgtcgtagagcacgaccgtgtccgcgttggagatgccgagattgccgacgtcgcggccgaactgctcggcgctcggaaacatgtgcggcagcgggttggaatgatccgacaccgcgtcgacgtcgaagaataccgcgcccggcagatgcgcggcgagatagtcgtccttcggcagcggcaagacccccggcaacttgaagctggcgtcgaggatcttgacgttgccatcgttgatgtgggcggcgagccattcggtggagacgagggggtcggtgggggcgatcattggagtcctccggcaatggtctcagtcgtcatggccggcttgtcccggccatcctcgctctttcttgcggcgaagacgtggatgcccggtcaagcccgggcatgacggagcacgtggtgagggtgttcacctcaccccttcttcttcggctcccacttctccgtcggccctccggcatcgcgccaggccgcatagccgccggcgatgtgggcaacaggcttgaggcccatgtcctgcgcggtcttggctgcgagcgcggagcgcaggccgccggcgcagtggaagacgaacttcttgtcctcctggaagatcggcttggcgtagggactctgtggatcgatccagaattcgagcatgccgcgggtgcacgcgaacgcgcccgggatgcggccgtcgcgctcgatctcgcggggatcgcggatgtcgacgatgacgacgtcgccgttcttggatatctcgatggcgtccttggccgagagcgtctcgatctcggcattggcctcgtcgatcaacgccttgatgccgcgggtgatggtctggggcatataggtctccctcttgttggcattacggggcgcgcgcagcgcgacccggaatccatttctctgaatgcgctgcggcccggtggattccgggttcgcgacttcgccgcgccccggaatgacggcgggagctagtgcgtcaattccttcatcgcggcttccagcccttcgatcgtgatcggatacatccggttggcaaagatgcgcttgatgatggtggtcgattccgaatagtcccagtgcttctgctgcaccgggttcagccacaccgtatgcggataggtgcggatgatgcgatcgagccagaccgagcccggctcctcgttgacgtgctcgaccgagccgccgggcaccatgatctcgtaaggcgacatcgaggcgtcgccgacgaacacgaccttgtagtcgtgcgggtatttgtgcagcacgtcccaagtcggcgtgcggtcggtgaagcggcgcttgttctgcttccacacgccttcatagaggcagttgtggaagtagaaatactccatgtgcttgaactcgctcttcgccgccgagaacagctcctcgacctgctcgatatgcgcgtccatcgagccgccgatgtcgaagaacaccagcagcttcaccgcattgcgccgctcggggcgcatgtgcacgtcgagatagccatggttggcggtctcgcgaatggtggtgtcgagatcgagctcgtcgggcgcgccggtgcgggcgaacttgcgcaggcggcgcagcgccaccttgatgttgcggatgccgagctcgacattgccgtcgagatccttgaactcgcgcttgtcccaaaccttcacggcgcggttgttgcggttcttctcctggccgatgcggacgccctcgggattgtagccgtgggcgccgaacggcgaggtgccggcggtgccgatccatttcgagccgccctggtggcgccccttctgctcctcgaggcgcttcttcaaggtctccatgagcttgtcccagcccatggcctcgatctgcttcttctcttcttcggtgagatacttctcggcgagcttcttcagccactcctcgggtatctccgccttctccatggcatcgagcagattttccaagcccttgaacaccgtgccgaagacacggtcgaacttgtcgaggttacgctcgtccttcacgagcgaggcgcgcgacagataatagaagttctcgaccgtgtagtcggcgagatcagcgtcgagcgcctccatcagcgtgaggtattcgcgcagcgtcacggggacctgcgcgtcgcgcagagaggtgaagaattgcaggaacatgggtgacagattgcccgtcgggtggctgacgtcaagggcggaggcccctgctccgtactggaccgagaggcattttgctctagaattggcggccatacggggttgtttggggacatttgcaatgggaattgtcgcagcgctcatcattggcgcgatcgccggctggcttgccggcaagattgtccacggggcgggatttgggctggtcggcaacatcgtcgtcggcatcattggcgccctggttgcaagctgggtgctgccccagctccacatccagctggcaacgggcacgatcggcgccatcgtggacgccacgatcggtgcggtgattgtgctcgtcatcctttcgctgataaaacgggtctgaaagcctgaccgaaccaggaacggccgccatgcgcggccgttcgcttgtcgtgaccaaggcattgccctgggacgacgaccaacaaggacgtgcgatgaaatttaccggcaccaaggactatgttgcgaccgacgacctcaaggtcgccgtcaatgcctcgatcgtgctcgagcgcccgctcctggtgaagggcgagcccggcaccggcaagacggtgctggcggaggaagtggccaaagcgctgaacgcgccgctgctcacctggcacatcaagtccaccaccaaggcgcagcagggcctctacgaatacgacgcggtgtcgcgcctgcgcgacagccagctcggcgatgcccgcgtgtccgacatcaagaactacatcaagcgcggcaagctctgggaagccttcaccgccgagcagcgcccggtgctgctgatcgacgagatcgacaaggccgacatcgaattcccgaacgacctcctgctcgagctcgaccgcatggaattccatgtctacgagaccggcgagacgatcaaggcgaagcagcgcccgatcatgatgatcacctccaataacgagaaggagctgccggacgcatttctccgccgctgcttcttccattacatcaagttccccgacgccgacacgatgggccgcatcgtcgacgtccatttccccggcatcaagaagcgcctcgtcgaggaagcgctgcgcatcttcttcgaggtgcgcgaggtgcccggcctgaagaagaagccgtcgacctcggagctgctcgactggctcaagctgctgctcaacgaagacatgagcgccgaacagctgcgcgagcgcgacccgcgcaagctgatcccgccgctgcacggcgcgctgctcaagaacgagcaggacgtgcatctgttcgagcgactggcgtttctgagtcgccgggaagtgtaggaagcaagcggacctgcgagagcgctccgccgctgccccaaccaccgacgtctttccccgcgaaagcgggggatccagtacgccgcgcggcgtgtcgattgaatcactcctgtctcggagtactggaccgcccggtcagccgggcggtgacagtgagagtgtcgcacgtgcccgcctcactgcgacgatcggacggcttatgccgcgttctcccgcgagccaagttcgttccggtctcctccacccgcgcgaaagtcgccgggatcgcgccactgacgcgattgccgcactcgccaacgcttggatgcgctgagatcaggaaagacttcagagaacggccaggccttggcgaaatccgcctttgtcagctcaggatgtcgctgaccgcaagcagatctctcttggtgtggccagatttttcctagcgctcgatatcgtaacctaccttatcaagctctcatgccatcgccgcgtccggaatgcgcgcggcttccatcggctgcttgccgcggatcaagtccgaggcgcggtccgcgatcatcatcgtcgaggcattgaggtttgccgagatcatgcgcggcatcacggacgcatcgatcacgcgcaggccctccaacccgtggacgcggagctggtcgtcgacgaccgcccaggtggaatccgcagggcccatgcggcaggtgcagccgggatggaaggtggtggtgccgcgctgggtggccgcctgcaaaaattcgtcgtcggtgttgacgttggggccggggaaatcctcgtaggcgtaatagggcgacagcggcgcgctcttcagaagccggcgggcgagcttcatgccgccgacgacgacgcggcggtcgagctcggcgtcgagataattggtctggatgatcggcggcgcgaacggatcgctggagcggatgcggacatagccgcggctctcggggcgctgctgccaggacgcgacggtcatgcccggctcgtcctcgagctggccctgcacgccctccttgtagctcgctggcgtgaaggtaagctggaggtcggagctctccgcgctctccccggaatgccagaagcaatagaccatggtcggtgacagcgagagcaggccgcgccgcgcggtcgcccatttcatggcttcgatccacagcgagacgccacggcggagctcgttgatggtcttgatgttcttgacgcgcgcgaccgtgcgcggcgcataatgatcctgaaggccttcgccgaccggcaacgagtgacgcaccgcgatgccgtgctgctgcagcagatcgggtgagccgatcccggagagctgcaagagctgcggcgaattatagctgccgccggagaggatcacctccttgttggcccgcacctcgacggggtgccccccgcgtccgcccttcatgtagcgcacgccgacggcgcgcttgccctcgaagatgatctcggtcgcgtgggcatgcgtgtgcacgtgcacgttcggccgcttcatcgccggcttgaggaacgcggtggccgcggagacgcgcaggccgttgttgatggtgcgctggcagtaggaaacgccttcctgcgtcttgccgttgtaatcgggattgcggggaatgccgagcgagaccgcgccctccatgaaggcctcgcagagcggatcgcgccagtccatcgtggtgacggtgaggccgccctcgcggccgcgataagtgtcctcgccctcgccgatgcgcttctccagccgccggaagtagggcagcacgtcggcatagccccagccgcgattgcccatctgcgcccaggtgtcgaagtccatgcgctggccgcgattgtagatgtggccgttgatcgaggacgagccgcccagcgtcttgccgcgcggcgcatagatgctgcggccaccggtccagggcccaggctcttgctgataggcccagttgatgctcttcatgtggaaggtcttgatgaagcccgccggcagatggatgtagggatgccaatccctcgggccagcctcgagcacgcagacgctggtgttgggatcctcgctcagccggctggtgagcacgcaaccggcggagcccgcgccgacgatcacataatcaaatctgtccatggtgcctcgggcgcccctatcgtgtcgtgagatcaggtaaattgcagccgcacgtgccaacacctctggcgcgacctctccctatgggagaggtgatcgagctcgcggcaagattggtgcacatcatgactagcgcggcttgtcgttgagctggaattccagatgcgcctgcaccgtcggccattcggcggcggtgatgctgtagaccacggtgtcgcgcaaggtgccgttcggcgcgacctgatggctgcgaaggatgccgtcctgcttggcgcccaggcgctcgatggcgcggcggctctggtggttgaagaaatgggtgcggaactcgactgcgatgcagttcagcgtctcgaaggcgtgtcgcagcaggagcagcttgcactgcgtgttgagcggaccgcgctgcgcgctcttgccataccaggtggagccgatctcgacgcggcgattggctgcatcgatgttcatgtaggtcgtcatgccgacgatcctgccggtcgaatcgaacacggtgaagggcagcatcgagcccgcggcctgcaaggccaggcggcggtcgatctccttcgccatgccttccggcgttgggactgcggtgtaccagagcttcgacagctcgccgtccttgacggcctcgatcagtccctggcggtgatcatgcgtcagcggctcgagccgggcgtgctgtccgcgcagggttacgggatcgggccagggcattgaaagtctctccttcgtcattgcgagcgaagcgaagcaatccagggtcttaccgcagaagcagtctggattgcttcgtcgcttcgctcctcgcaatgacggcttggctcacttattcaagaaattcaacggcaaaccgccgcgcggccagtccatggcgatcaactcacccttgcccgacagcgtgatgtaggcggtcttcagctcggggccgccgaaggcgatgttggtggtcacgcggtcgccggtcgggacctgctcgaccagcgtgccgtcgggcgcgatcaccgagatgcagccggagacgagcgtggcgacgcagacgttgccgccggcttctaccgcgagcgaatcgaacatctggtagccgccgaggccgcagatcggcttgccccgctcgccgcgatagatcacatcgcgcggcttcagcgtgcccggggccgagagctcataggcccagagccgcccggtcggcgtctccgcgatgtagacagtgttctcgtccggcgacaggccaatgccgttcgccggcaatatgccatgcacgatctcgacaagctcgctcatgccgggcttcagataatacatgccgccgacgtccatctcgcgtgcgcggcgcttgccgagatcggagaaccagaggccgccctgcttgtcgaagaccagatcgttcggcccgcgcagatcgtgcgcgccgcatttcgtcacgacggtctcgaccttgcccgtttgcaggtcgacgcgctggatcgagccgccgagataatcgtcgggctgcggacccggcatgatcatgttgcgggtcggtatccaggagaagccgccattgttgcagatgtacatcttgccgtcgggcccgagggcagcgccgttcgggccgcccggaatcttggcgacgatctccttgcggccatctggataaacacgggtcaggcgctggccccggatctccaccaataccaccgaaccgtccggcatcacgaccggcccttccggaaattcgaggtcggtggcgagaacgcggatgttggacatgtgggaccctcccggctgcttgttatggcttgcacgggatgtccggcacgggccccgcaggcaagatttgcctgcggttatgacaaagtcgccggggcttgccaagcaagcgaggcggtatgccagcgttgcgcgctactctcgcaccggcagccagatctcgaagccgccatggccggttgagggatcgaatgtctcgtcgtagcgctcgaagttcggcgcatccgcggctttcaagcccgaggcgggcagccattgattccagatcgtgttcgccgtgcgccggatcgaggcgacgtggtcctcgtgggtgaacacggcatagcgctgctcggggatgcggatacgcccgtagcggcgcggcagatcggagaaatcggcgacctcgacacccgcgatgtagtcgaaattgccggcatcgtcgccattgcagcagacgccataggcggcttgattttttccttggccgacgctcgccggaatgtcggcgacctcctgctgaaagcgatgccacaggccggggatcatggcgccgttgtcgcaggagatgcgcgcgacgggtccggcgaccaggaaggtctttgcggtttcgaaacgcggcggggcaagatggtcgagcatggtggagtccatgaggatcggctcctgtagcctgagatggctgacgcaagtcgtggcccggaccgcttcgggcgtggtgccgaactggtcgcggaacgcgcgggtgaaggcttcgtgcgagccgtaatccgcctccagcgccaatgacaggatgtcgggtgcgccccttgccaggctgcgcgccgcttccgtcagccgtcgcgcgcgcacgtatcgcatcacgggaaatcccgtggctgcggcaaacgcacgcacgatgtggaaccgtgacacgcccgatatcgcagcgatctggtcgagcgtcatcggctcggccagatggctctcgatataccagagcgctcgctgggctggggtcacggtgatcgtcctcgttcgaagcgcggcaatgatgcgaccgtcggtaccgatctgcttgatcggcattgctatcctttgcatgaggatagtcccggaatagccactggcaacgccccggcgttcgtggctacactcctagaaaccgctcacgagaaagaggaaccggatcatggaaatcaccgatgtgcgggcgcaccatatccgcattccctatgacgccggtgtcgcgagcttccgccagggcgcttcggccatttccgcgctcgatatggtgctcgtggaggtcacgaccgattccggattgaccggctggggcgatgccttcgcctatgtctgcccgcgcaccacgcgcagcgccgtcgaggagatgatcgcgccgcaggcccacggactgaaggtgcccgacgcggccggcattcccgccgcgatggagcagatccagcgcaatctgcatttgttcggccgctacggcatcaccatgttcgcgatctccgggctcgatatcgcattgtgggacctggctgcgaagatcgagggcgttcccctgcatcgcctgctcggcgagatcaggcgcacggcgatcccggcctacgcgagcctgttacggatcggctcgcccgacaacatcgccagtgaatgcaggaaggcgctcgcgctcggctatggcgcgatcaagctgcacgagacgacggcgccggcggtgtttgccgcgcgcgaagcgatcgggccagagattccgctgatggtcgacatgaactgtccactcaccggcgagcaggcgatcgcgttcgcgaagacatgccgggatgcgcaaccgatgtttctggaggagccggtctggccgccggaagactttgccacgcttgccgaggtgcgcgaccagggtggcctcggcattgctgccggcgagaacgcctgcaccgaatatcaattccgccagatgatggaagcgggcgcggtgagccacgcccagccctcggtgatcaaggtcggcggcatcagcgaattcctgaaggtcgccgcgctggccgatcggcgcggcatcaagatcgtcccgcattcgccgtatttcggtccgggcctgctggccacgctgcacctgctcgcgacacgtgacgatggtctggtcgagatattttatctcaagcgcgaagcttgcctttggggcggccgagcggacagcgatgccaccggacatgtcgccgtgccgacaggcccggggctcggctatgagccggatcgtggcgtgatggagtgctatcgcgtgacgtgatcgccgcttacttcccgtccttcgcgggcgccgcgtcctgcttcttcttcagatcgtcggcgaacttcgcctgcgcggcctgaagatcggcgagcgtcttctgcatgccggcgaggctcgtcttcagcgcatcgatctggcgacccgcagcatccagcttctgctggtgatcgagattgagcttggtgatggtcttctgcaggaaatctacgttgctctgaagacagctggtacgccgctccatggtcttctcgaccgtgcagatctcgatgccaggcacgtcctgcgcgtgcacaggcagggctacctgcgtgacgagcagcaacattgcgaaacaaatgccgggtcctcgaagcagcatgaaggttcctcatccaatcgttcacggcaatgtgcactgtttgtgcacggccacgcgacgctaccacactcgtaccgcattctcgcggtgagcttgcgcttgttccctcggacggggaacgatgatccgcgcgcggaaagaagtgggcgctctatccgcggctttgtttaggggagaatattggaatggcaacgcgcgatagacgtttggcggaattcgatggcgccggagaaccaccgccaggcctgccactcgaagtgctatgcgaggatcacagcggaacgtatcagctgccgttcgcctgccgttatgtcgagggacgctggcagaaccatgaggccggcattgcggtcgaagcaaccgtgatcggctggcgcctgccgcgcgtgaagcagcgcggggccgcctgaaggcagtttctgtttcaaaatgcgacggcgccgcgctccggcttaacctccggaacgcgggccgaacgaatcgcgtccgaatcagcggaagcgccgtgtacgcgcctgttcacggctagatgtcgcgacggctccgcaggcacgcacaacatctctgcggcgcgggggatcgcccaagcctggccccggctccaaaggttaatcgtcgcaagggtggagctatccgggctgcctcgggaggacttcggctgccgaaacaggcagggctgcgcagcacctgcctaatattcgacctcgagttcctcgatctcggccggctcctccctcgccgccgcgacccattcctgcatctccggcatcgccatgatggtgtcggcataggcctgcagcggcggcgcgagcttgacgtcataggtcacgaagcgcgtcaccaccggggcgtacatggcatccgccatggtgcgctgcgcaccgaacaggaaggggccgccggatttctccaggcagtcgcgccagatgaaccagacccggtcgatgtcggcctgtgcccgggaccagatcttgaagccgggaaagtgtcccttcaggttgaccggcagcgaggctcggagcgtggtgaagccggaatggatttcgcccgagatcgagcggcaatgcgagcgctgaatgcggtcggccggcaacagcccggcgtccggcatcacctcgttgagatattcggcaatcgccagcgtatcccagaccacggcgccctcgtgccgcaggcacggcaccaggatggacgacgacagcagcaggatctcggcgcgcgctgacgcatcatccggtgcggtgacgatctcctcgaaatccagcccggagaatttcgtcagcagccagccacgcagcgaccaggacgagtaattcttgctgctgatggtcagtgtcgccttcgccatatggccccttccctcgtcccgacatcggcccggttgcccgcggcccgcgcttgccgcggcataagcagcaagcgacgtgccagtttgggaggccgcgactgtcgtctggcgtccttattgcatggcagcaggggacggatgggcatttcagtatgatgtcgatgtattatcaggcctttcagaaccacatggacctgacggcgccgtggcgggcgggggcttcgtctgcgctcaaattcctcaacctggtgccgcagggcgcgtccgatcaggtcatcggccggctgtcggcggcgttggagctgatctcgcgctccaccctcacttatgaccgtcccgcctacggcatcgacagcgtcatggtgggcaaccgcgaggccgccgtcaccgaggagatcgcctacgcaactccgttcggttcactgctgcacttcagaaaggagggcgtgggcgagcagccgcgcatgctgctggtggcgccgatgtccggccacttcgcgacgctgctacgcggcaccgtgaagacgctgctccaggaccacgacgtctacatcaccgactggcacaatccgcgcgacattccgcgcagcgaaggccgcttcgggctcgacgactacaccgagcacctgatcgatttcctcgggcagctcggcccccgcccgcatatggttgcgatctgccagccgtcggtgtcggctctcgcggccgccgcgatcatgtgcgaggacaatcatcccgcgcggccggcgacgctgacgctgatggccgggccgatcgacacgcggatccagccgaccagggtcaacgaattcgccaagagccggccgatcgagtggttcgagcgcaatctgatcaactacgtgccggtgcagtgccgcggcgcgctccgcaaggtctaccccggcttcgttcagctcaccgccttcgtctcgatgaatctggagcgccacatcaagcagcatctcgatctcgccaaccacatcgccaagggcgagacggagaaggccgcgacgatcaagactttctacgacgaatatttcgcggtgatggatcttccggcggagttctacatcgagaccgtgcgcgacgtgttccaggagcacctcctgccgcagggcaaactgatgcatcgcggccgccccgtgaacacaaaggcggtcaaccgcatgggcctgatgacggtcgaaggcgaaaaggacgacatctgctcgatcgggcagacgctggccgcgcaggacctctgcacgggcgtgcgcgcctatcggcgcgtccaccacatgcaggccggcgtcggccattacggcgtgttctccggcaagcgctggaacaacgagatttatccgctgctgcgcgatttcgtacacgttaattcgtgagcagcgtggtgcagtcgcggaactggcctgggtcggtaagctagctcatcctccgccgcagtgtcgccgacggcgtctcgccgaatttttcgcggtaggcgccggccatgcggccgagatgggtgaagccgagatcgaaggcgatgtcggtgatggaggcatcgggtgcggcctgcgcgaggcgcgcgtgcaggctcgcgaggcgcatgtcgagcagcatctccgaaatcgagacgccgaagtgacggcggaagccgagctggagcgcgcggatgccaatgccggacacgcaagcgagctcaccgagatcgagcggctcgccggcatgatccgccagatggtcgcgcgcggcacggagcgcacgcggcaggcgctctgcctgccctgagaacgtcctgatcgcatcagacaagccatgccgctgcccgttgaggagatgatccagcagcagctcccgccagtcggccatggcaaccggcgaaagccggccggaaggaccaaaacgctcggcgagattcatcagcccggcaaggctggcctgcaagccccgcccggacggcgcgtccaggtcgatcaccggatcgaattcgaccgtgccggccgttctgcccgacagcgccgcggcgcgttgctcgaccatgcggcggtcgagcagcaggatcgcctgcgcgcaatcgctccacatcatccgggtcgggatggtcggcgacaacagcgacgcggcgcggtccggcacgacatcgaactcgccgacgcctgaacgaatacgggcgctgcccgccagcggaatctgcaccaggaagaagcgctcgaggcagcccggatcgatgctcaccgatccgccataggccacgtagttgatggagaagccgtcgaaggccgcacaattgtgccgggcggagaagccggccgctcgcgcccgctccggcttgagatcgtgcgggcagaagatgcgcccgatctgctccgcggcctcgtcaacgtcatccgtggtgacgcgggcgaaggccgcgagccgctcggctgcgggcgcccttgcgctcatttccagcacggctgcggacatgatcggccacgcttcgcgtctcgaattgctttaagcctataatagtttcgcggatgcggaaagggtcgcgcccctgaaattccgtgctgcatggcaacagccgtgccgggattcgtttatcggatagacagacggctcaccgctggcgaagctccgtccttgccggtatccatgaggaggtgagcatgactgcactcgaaaagggcattactgcaaacggcacgggctacggcggcaaaagctggaacatcctgggccaagtctatttcccgaaggccgtcaccgactccacctttgcgttcgagaccaacagcgatcccggccagttcgtgccggtgcacatccatccgacccaggacgagtttatcctggtgcaggaaggcaccctcgatctcaagctcgatggtcaatgggtcaaggcccatgcgggcgatctcgtgcgcatgccccgcggaatcccgcacggctatttcaacaagtccgacaagccgtgccgggcactgttctgggtctcgccgatgcaaaagctggaggcgctgttcaatcagctgcacaacctgaccgatcccgcagaggtcgtgcgcatctccgcgctgcacgaggtcgacttcctgccgcccgaggccaacgactaggcggccggcttccccgtccactttcatccgcttgcagctcggccggccgcgccctgcggccgaacgtggccgcatgcgcgcgaaacacatcgattgcgagccaacccatggtcagcctcaagcatgtctgcgtgatcggcgccggcgtctccggccttgccgccgcaaaagcgttctccacccacggccaccgcgtcatcatcgtcgagcgcagcagcgatctcggcggcgtctgggagccggcgcgctcatatcctgacgtgcagacgcagagcccgaaggagctctaccgctacaccgatcgcgccatgccggacgcctatccggaatggccgaccgggccgcaggtccatgcctacctcgccgactacgcgaagagcttcggtctcgaccgcatgctgcggctcgacacacaggttgccggcatggctcgccgcgccgacggcaggccgggctggacgctcgcgctgagaaacagggacggcgcgaccacgaacgaagacttcgatttcgtcgcggtctgcaccgggcagttcaacgagccgcgcgagctacattgccctggcgaggacgccttcctggcgcagggaggccagattctgcactcgtcgaaatacagcgatccggcgctggcgaaagggcgacgcgtcgtcgtgctcggcggatccaagtccgcaaccgacatcgcggtgaacgcggtgaaatcgggcgcgcgcgaggtcacgatcgtgatgcgcgaaccggtctggcgcatcccttatttcatcggcggcctcgtgaacttcaaacgcatcctctacatccgcgcgcaggaggagatgtttccgggatggggcatcagcgcgacgtcacgacttgcccatcgcatcgctgcgccgctggtctgggcgaactggcgcggcctggagagtctgttgaaggcccagctcaagctgaagcaatgcaagatggtgccgaacgagcggatcgaggacggcgtcaactgctcggtgccgatcgcaacgccgggcttctatccgatggtcgccgacggccgcatcaaggcggtgttcggcaccttcgatcgttatgacggcgacagcatcgtgatgagcggcggcgagcgcgtcggtgcagacatcgcggtgctcgcgatcggttacaagctcggcgtgcccttcctgcccgaagcttacagacagaaactcgtcgatggtgacgggcagtaccggctctatcgcctgatcgccagtcctgacctgcctgacatgggcttcgtcggcttcaactcgtcattctgcaccgtgctctgcgccgacctcgccgccaactggctggtgcgctacgccgacggccagctcgccaaccagccgacggcacaagcgatgcgcgacaacatcgagatgatgctgcatttcaggcgcgtcgagcggccggccgccggcgtctatggcggcctgtgcgtcgcgccctatcactatcgccatttcgacgagctgatggccgacatcggcacgaagacccagaagcgtaaaggactcgctgggcgcttcctgccgccggacgcggatgtctatgccaagttcctggcttccgcgccggactatcgcgccgcgtaagaattgcggctgagcgggatttgcatctcgccagccctcttatccagtgcttacgatctcgctggcctcgaatcgacagggaaccggccatgggatccagacgtcttgcagcccttgcggctattgccttcttcatctcagcgcccgcgaacggacaacagcccgcgctcacagccaggcaatccgaggcactcaccgcctatgaccgcgcgctaggcgatttcaaagccatcctctcggagcggcggcgtcagatcgaggcgaaggagccgctgccgaatctgccgggacaggcgctatatctcgcccgtgtcgccgtcatcagcacctacaaggatctcaccgacgtcatgccgtcgcgcatcggccggcccaacaagttcgagattccgccggcctatttcgatgccgatatcgagccgctggtcgacgagtacggcaagctgttcgacatcatggaagcgccgcctccgggcgcgcaaaactcgccgacgccggtcaaggacgtcgtcgatctcgccgttgcgatcgcgcgcgcaaaggggctcgcgcctgaacatgccgagacggccggtcgcatcagtctcggattgttctttgccgagaccaacggcaagcagaacgtccgcaatgcgcgctcgaacacctatatgggcagcttccagaccggcccctccgaagaccgcaacggccgcaggaaatgggagaagatcaagtcggacgtcgccgcgttggatccggcgctgagtgcgcgagacgacaaggaagaggcccgggcccgcggcaccgatcaccgcttcaaccactggaccaacgtgcgcaatggcctgatgaacgcgcacgctgacctgttccgtgagatacccggaatcgtgaagacgctgcccgacccgatcgaccagatgaagctgttccagttgatccagatcgtgccgaccccgacgcggtccgcgctgagatcgggcgatctcctgaactacagggtgtcaagtccaacggtcatgaagtatctgcgcaacaacagcatcttcgccttcggacaggccgaccgggcgcgcagctcggcaagctaccgcgagatcttcgctgcgatgtggctgttcaacaggaagttcgagcgcgcgatgacgagttacgcggagatcagggcgcgttgatggatcggttgcaaccgataccggacgttgtaatctcctcatctcatcggcggcacgggcccctccatgcgcttcctcattctcggcggcagccagtttctcggccgggcaatcgccgcgcatgcctgcgctgccggtcatgacgtgacctgtgcagctcgcggccttgcggggccgattgccgcgggcgcgcgcttcgtgcggatcgaccgcgacgccgccgacggtctcgccccgctcgcggctgagaccttcgacgccgtggtggatgtctcgcgccggcccggccaggtccgtcgcgcggtcgccacgctgaagcgaccggacgtgcattggacctttgtgtcgacgatcagtgtctatgcggacaaccggatcccggggcaacgcgccgacacggcgccgctgcgcgagccggttggggcggagatcgagcacagcaccgacgccatctatggcgccgccaaggttgcctgtgagcaagcggtcggtggcgacgccttcatctgccgcgccggcctgatcgccggaccggaggacccgacaggacgtttcgcgtactggccggcgcgtcttgcgcagggcggcgaggtgctggcgccgggatcgcccgaggatgccgtccagttcatcgacgtgcgtgatctcgcgcaatggatcgtcgatgcggccgagattcacctcaccggcatctatgacggaattgggccaactcgcacgcgcggcgaattcctgagcgaatgcgcatccgcgctgaacacgtcctgcacgttcacctggatcgaccgtgcctttctggaagcgcatgatgtgcggcgctgggcaggtccgcgatcgctgccgatgtggctgccattgccggactatgccggattcctgacacgcgacacctccccggctcgcgcggccggattgacctcgcgaccggtggccgccaccgcgcgcgacacgcttcactggctcctcgccggcggcggcccggtcgtcgggctcaccgcggacgaagagaaggatgtgctcgccgcgtggcatgcgcaccagccgggctggggccggaatgtaacctcataatgcgcaaagcgatccgataattatcggtgcggtcaggccgatcgtgagcccggtgaaaagcgttggtcacgacaaatctgtcaaaggccacacgaccgtttgcagtgcaaggcctgtgactgccatggctatggtgttccaaggccgcccatttgttgctagcctgccgcaccgacagacagcaatcgggggctaccgaatgacgcgcgcgaatcccgcatctctcgcacgatgcaatagagtgcggagacatgccgggcgagccttggcacgaggcttggcagcggcaattgccgtgattgcgctcgccggttgcgaggacaagaacaccttcgtggcaccgccaccgccgaaggtcgacgtggcgacgccggtgcagcgcccggtcacgcgctatatcgagtccaccggaaacaccgctccggtcaaaagcgtcgatctcgtcgcgcgcgtgcagggcttcctgcaatcgatcgactaccaggacggcacgttcgtgaagcagggcacgcagctgttcacgatcgagccggagacctacaagctcaagctcgagcaggcgcaggcggccgaggccggcgcgcaggcctcgctccgtcaggcggaagccgactacaagcggcaggcggagctggtgcagcggcaggccgtctcgcaggccacgctcgacacctcgacatccaaccgcgacaacgcccaggccaatctgcaacaggcccaggccaatacgaaactcgccgaggtgaactacggctacaccaaggtgacggcgccgttcgacggcatcgtcagcgcgcacatggtctcgatcggagagctcgtcggcgtttcgtcgccgacccagctcgccaccatcgtggcgatggatccgatctacgtaaacttcaccgttaacgagcaggacgtcctgcgcattcgcgccgaagcggcacgccgcgggatgacacccgccaacctcaaggagtttcctatccagatcggcctccagaccgacaccggctacccgtaccaggggcatctcgactacgtctcgccgacgctcaatcaatcgaccggcacgctggcggtccgcggcctcgttccgaaccagaagcgggtgctgctgcccggctatttcgtccgggtccgcgtgccgttcgagcaggagaagagcgccctcctggttcccgacaccgcgctcggcagcgaccagggcggccgctatctgctggtggtcaacggcgacaatatcgtcgagcagcgcaaggtgcagatcggccccgtcgacaacggcctgcgcgtgatcgaaaacggtctgaagccggacgaccgcgtggtggtcgcagggctcttgcgcgtcatcccgggccagaagatcgacccgcaggtgaccaagatcgagcagccgcaggcgtctgccaagtaggagcgccagccatgatctcgaagttcttcatcgagcggcccgtcctctcgaacgtcatcgcgctgctgatgatcctgatcggcggtgtcgctctgttcaaccttgccatcgcgcaatatcccgacgtggtgccgccgaccgtgcaggtcaccacgcgctatcccggcgccagcgccaagaccgtgatcgacaccgtggcgttgccgattgagcagcaggtcaacggcgtcgaagacatgctgtacatgcagtcctacagcgctgcggacggcacctacacgcttaccgtgacattcaagatcggcaccgacctcaacttcgcgcaggtgctggtgcagaaccgcgtctcaagcgcattgtcccagctgccgcaggcggtgcagaaccagggcgtcaccgtgcagaagcgatcgacctcgatcctcctgttcgtgacgctgacctcgccggattccaggtacgacagcctttacctgagcaattacgccaccatcaacatccgcgacgagctctctcgccttcccggcgtcggcaacgtcaccgtgttcggcgccggccaatattcgatgcgagtctggctcgatccgaacaagctgcaagtgcgcggcctcgtgccgcaggatgtcatccaggcaatccagcagcagagccagcaggtctcggccggccaggtcggcgcgccgccgaccccgccaggacaggcgttccagtacacgctcaatgtcaacggacggctcgacgacaccagtcagttcgagaacatcatcgtcaaatcgggcagcagcggcgacgtcacgcgggtgcgcgacgtcggctgggtcgaactgggcgcgcagacgtacaaccagatcttctcgctcaacaagcagccggccgtcggcatcggcgtgttccagtcacccggtgccaacgcgctccaggtcgagaatgccgtcgagaagaagatggccgaacttgccaaacgcttccccgagggcatcaagtacgacacgccgttcgacaccaccaaattcgtcgaggcctcggtgcacgaggtctacacgacgctgatcgaggcgggcctgctcgtgctggtcgtgatcctgatattcttgcaggactggcgcgcgatgctcgtgccggcgaccaccgtgccggtgaccatcattggcgcctttgccgcgatggcggcgctcggcttcaccatcaacatgtcgacgctgttcgcgatcgtgctcgcgatcggcatcgtggtcgacgacgccatcgtcgtggtcgaaggcgcagcgcacaacatcgagcagggcatgaacggccacgacgccgcgatcagggcgatggaccagctgttcgcgccgatcgtcggcatcacgctggtgctgatctcggtgttcctgccggcctcgttccttgcaggactcacgggacgcatctattcgcaattcgcgctggtgatcgccgcgacagcgcttctctccgccatcaacgcggcgaccttgaagccgacgcaatgcgcgctctggctccggccggccgtcccgcccgagcagcgcaacttcttctatcgcggcttcaacgcgatctataatcgcgtcgagcgcgcctacacgaggctgatcacctttctcgtcaaacacgccaccatctcggtcgcgttcgcgctgctgatcatcggagcgagcggctacggcctgtcgcgggtgccgacaggcttcctgccgatcgaggaccagggctatctgatcgccgccgtgcaattgcccgacggcgccgcgctggagcggacgcaagccgtgctcgacagagcgagcgagctgatcaaggacacacccggcgtccagcaggtcatcacgattgccggcatctccgcgctcgacaacagcgccagccttgccaatgccggcgtcgcctacatcatcctgaaggactgggacgcgcgcaaaggccccggcgaggatctgcgctcgttggtgttcgggctgaacgacaagctcgcggccatcatggaggcgcggaccatcgttctgcccccgccgccgatccagggcatcggcaatgccgccgggttctcgatgcaggtcgagctgcgcgacggcaacagcgacttcgccaagctgcaggcgatcaccggggcgatggtcagcaatgcccaaagccagagcgcgcttcaacgggtgcagtcctcgttccgctcctcggtgccgcaattcaatgtcgagatcgaccgcgtcaagacccagaccctgcacgtgacgacggatcaggtgttctcggcattgtcgacctatctcggctcctcctacgtcaaccagttcaacaagttcggccgcgtatttcaggtctatacccaggccgacccggcgttccgcgtcaccgagcgcgacatcgccaacatgatggtgcgcaactcgaacggcgacatgattccgatcggcacggtcgccaagatcacgcccgccaccggaccatcgctgatcagcctctacaatctctatccgtcgtcgaccgtgatcggcctgcccgcacagggctattcctccggtcagtcgctgaagctgatggaggagatcgcggacaagacgctgccgcccggcaccggctacgaatggaccgcgatgtcgtatcaggagaaggcggtctcgaaccagatctactgggtgttcgggctcgccatgctgctggtctatctcgtgctcgccgggcaatatgagagctggtatgcgccgatctccgtgatcctcgccgtgccgctgtcgctgctcgggccgatgctggttctcagcgccctcaagatcgacaacaacctctattgccagatcggcctcatcctgctgatcgcgctgtcggccaagaacgcgatcctgatcgtcgaggtcgggctcgagctgcacggccgcgacggcagaccgatcctggagtccgccatcgaagccgcgcgcgcccgcttccggccgattctgatgacctcgttcgccttcatcctcggcgtggtgccgctggtgctggcgaccggcgcaggcgcaagcgcgcgcaagtcgatcggcattaccgtgttctccggcatgcttgcctcgacctgcctcgcagtgctgttcgttccggccttcttcgtggtggtgcagcgcttcgagaactggcgggcgtcgaagaagcgcaaggtgcaggcggtgccggcgaaatagacaacggcggtcaaccacaatcatcactgcggagagcgacggcaccaccgtctaacccttctccgccggagtccggcgcgcctcaccgctcgacaccagcagcaccgagaccttcgactgccttagcacggcgtcggcaacgccgccgagggagaggtgatcggcctggatgcggtcgacgcccatcacgacgagatcgacgtcggttgtgtcgatctcgcgcaggatcgccgcctccggcgcccggttcacccgcagcgtggtggtgatgtcgacgtcgtagcgggcggcgagatcgctcgcgtccttgaggattcccgtctcctggctcaggccgccggaaaccccgcgctgtgcgcccttgtcccgcgtcgttgcgacatagatcacccggagcgaacctgatcccgcctgtgccagcgccaccgcgatctcggcaccgcgcttggagacactgctgcccgaaaccggaacgaggatgttgagcgcgtcgggcatcggctgcttcaggtgcttgcccttcgcggccacgatcgcgagcggcccttcgaacttcgccgcgatatcgtcgatcctccggtcgaaacgatccttcgtcgtcacgaccgtgtcgatgccgacgaccaggagatcgaagcccttgcgcgcttcgtcggcgatcgtctcgccgagccccgcctgcctcgcccggctgacgacatcgacgttgccggcctcgccgtcgccgcgagcggacacgacttctgcggccttcttcaccacggcttcgtggctttcttcctcgtccctacccttctcctgctccttggcgtgctggccgatatgcagcacggtgagcggcaggttgcgcttgccggcgatcaggcccgcgatgtgggcggcaaagctggcgttgacgctttcgtccaccgccagcagggggcgctcgagatttgcgacgaagccgcgcttctcgaattcctcgcgctccagccgctccttctcctccttgctcatcggcagcctggccagcgccgcgcgcagcatcggcggcatcgccatcgtggtgacgatcgccatggtcacgatcatcgtgaacaggttctggctgagcacgccgatggagaggccgatggtggcgatgatcacctcggtcgagccgcgcgcgttcatcccgctcgccagcgccagcgactcccgcgcattcaacccgccgagggtgccgccgacgaacgccccgccgaacttgccgacgctcgcgatcacgaccagcaggccggtgagcatcagcagattgggatcgcgcaacaccgagaggtcggcgctgagccctgccaggccaaagaacaccggcatgaagaagctcgagatcagcccgcgcagccgctcgtcgatctgccgcgtcaggatcggggactctccgaccaggatgccggcgacgaaggctcccagcacggtgtggacgccgatcaggtgcgtgatcatggccatgacgctcatcagcagcaggatcacggtgatgaccggcgccgcgctgacgagattgtcgttggcccagcggatcagctgaaacaccaggcggcggccgatggtgaagctgaccgcgaggaaggcaagcgtccccagcacggccttggcgaccgaggcgatatcgagcgtgccgtgggatgccaggctgaagatgatggcgatgatgatccagccgatcgtgtcatcgatcacggcggtcgagacgatgatctggccgacattgcggcgcatgaagttcatctcgcgtacgaccaccgcgacgatcttcaccgaggagatcgacagcgccgtgcccatgaacagcgacgcgacaaggcgctgctgcggatcgggcagcaacgcatccggcaggaactcgccgagcgcaaagccgcaggcgaagggcacgatgatgccggcgaccgagatcgcgatcgcggccctgccgaccttccggaccagcttgaggtcggtctccatgccggtcagcagcagaagcaggagaatgccgaactgggcgatgccgtcgatcatcgccttctgctcgggcgacttggggaagatcgcgtgctgggcctccggccagatccagccgaacagcgacggcccgaggatgatgccggcgagcagctcgccgatgacggagggctggccgatacgcatcatgatctcgccgaggccgcggccgaccgcgatcagcaggacgatctgcgccaccagcaggaattcggacgggccgtccgctttcccggtctcggcaaaagccgccatggtggtgaagacgagcgctgcagggacaatgacgatcggtctgagcaggctctgcatgcaggtgtggtttccccttcaaccgccccgaaccgtcgggacggcagggacagaacccgcgggacgcgcagggagttcctgccgcacgcgtcaggatcgagacggcaaagacgaaactgcgaaaacaaccccatgcacagtagagacgcgttgaaagcgctcgagatttcggctccgccgaagaaacttgctccgtcgggcaaaacactggcaggatggcatcatcggtggcgtggatgggctgccatcttccaggcccccaccccacgtcctcccgtcattgagcgcagcgaagcaatccagagtctctccgccgaacgattctggattgctccgtcgctacgctcctcgcgacgacggtggagaacgggtgccgcgtctcggaggcatgccggcgccccgacaggcgcgaacgcggaagtcctggggcagcagagcgtgcggacaaatggacccgggctcgtcgctgcgcgacgccccgggatgacgcgcggagggagcatcgccctcacgccgtctgcggcgtcctgatctcgcgcggcaggatcaaggcggcggcgattgcgagcaggcacaacgcggcaaaggcgtgcagcatggtgacgaagccgccctgctcgtagagccaggcaaccaggccgaccgaggcaccggccgcggtgaagccgacgaagtagcgcacggcgtaggcgcgcgagcgccactcctcggtggtgtacttgccgaccatggcgtcgttcaccgtgacctgcccgaaggcacccatcacgatgccgatcgagaccaggatcagcggcagattgttcaggctcgcggccagatacaggaacggcgccagcatgaatgacagcggcagcgccaccgtcttcaacgaatagcggtcgagcagccggccgatcgtgtactgcgtcatcgcgccgaacacgtagacgcaagccgcgatgaccccgagcagcgccgggctcttggtcaggtccgcaagccgctccgcaaacagtttcggcagcgccacggtgacggcgttgaaggtcgtcgagatcgcgatcacgacgatcagcagcgccaggatcacgcgccacatgtcccgcttggcgacgcgcgcctgcgcggcggcctgcttcgaacccttgcggtcctcatgcacgacgctcatcgcgaaagcgatgccggtgaggatcgtgacggccccgggaacgatgaaggcgaagcgccagccgaggtattggccgatcacgccggtgaccaaggccgacgaggcgacgccgagattgccccagacgccattgatgcccatctcgcggccgagcctatcggcataggacacgatcatggcggtgccgacggggtgatagatcgaggcgaagatgccgatcgcgagcagcgccgcgccgagctgcaccggcgtttgcacgaagccgaccgcaaccatggaggcgccgatgccgacgaagaagatcagcatcatgtggcgccggctccagcggtcgccgagccagccggtcagcagcgagccggcaccaaaggcgacgaagcccggcgtggcgtagggcaggagttccgaataggccatgccgagcgccggccccatgatgatgacggcggcggcaaagatcagcatcgcataatggtcgatgaaatggcctgcgttgacgaaactgatgacccgaccggggctgttcattgcgaatcctctcctgctccgaaatgagttatatgtcctccccatgacggaatgctgccaatgactgtcttggaaacgccaatcctcagggaagtccggggcaaccatcgctcgaccgcgggcgtgcacctggtcgctcgcgactatcccaagggcatgcggatcaagccgcacctgcaccgcgaagcgcagctgatctatgctgcgaaaggcaccatgcaggtcacgacgcccggggggcgctggctggtgccgccggaccgcgccgtctgggtacccgccgggctcgagcacgccatcgacctgctcgccgacatcgagatgcgcacgctttacttcgacttgtcctggctgaagcgcgagcgtcgctatgacggcctgaccagggaattcgtggtgcgggtctcgccgctgctcaatcaggcgatcctggcgctgttcgacacgcgcaacaccgaggagcgcaccgagctgctagtccggctcgtgatgctggaattgcaccaggccgaggattccgcgaccttcgttccgctgccgcatgagccgcgctgccgccgcgccgcgatgatcgtgctcgacgatcccaccggcctgcacgacatcgacacgctggcgcgggaggtcggaacctcagcgcggacgttgtcccggctgttctcgagcgagacgcagctgagcttcaagagctggtgccagcgcgcccgcatcgcggctgcgatccagcggctgtcgacggatgcgaccgtctcggtgaagcagctcgccacgtcgctcggctatgccagcgtgccggcgttctccgccgcgttccgccaggtgacgggacggacgccgacggagtttgcgggaaagggttagctcgtcacatgcgtgcttgacccgcgtgtccatccctttgcaaaaactttccaactaggatggatggcccggccatgacgaagaggctgacgagacgtaccacatcatcaaaatgacgcttgattgtgatcggcttccacccaaatcttgtgtaaactcccgcattgcacaaacctgacacgaaagcccagatggccaacgccttcttctccgatctgcttgccaccatctccgagcgcggccgcacgctgcttcgccgcggtgattccgccgacaccagacgagatgccgacggactgctcgagctctgcgatgcgctgctgtccggccggggcgaagcttccggcaccgcgatggcgcgcgaggtgctggacatctaccgggagctggatgcggcggggcgccgcgccttcttcgagggattggttcgcgatttcggtcccgatcgggagcgcctgtccaaggcaatcgagacatggcgcgccaagccgagcgacgaggacgcgagcgcactgcacttcgcctccgagccgcggcggcaggaactgatccgccgcctgaatcgcgccccgggtggcaccggcgatctcgtcaacatgcgcgccgatctgctcggcatgatgaacgggcacaccgatctcgccgcgctcgatcgcgacgtctcgcatcttctctcttcgtggttcaacagggggtttctcgtgctgcgcaggatcgactggtcgaccccggccaacatcctcgaaaagatcatccgttacgaagccgtgcacgagatcagcgactgggacgacctgcgccgccgcatcgatccggtcgaccgccgctgctacgccttcttccaccccgcgatggtcgacgagcccctgatcttcgtcgaggtggcgctgaccgaaaccatccccggcgcgatccagcccctgctcgcggtggaccgccagcatctgccgatcgaacgcgcgcgcaccgccgtgttctattcgatctccaacacccagcgcggcctcggcggcatctccttcggcagcttcctgatcaagcaggtggtggaagagctgcgccgcgaattgccgaagctcgacactttcgtgacgctgtcgcctgtgcccggcttcatggcatggatcaagcaggacaaggatttgccgctgtcggacgaggaccgcgaggtgctgaagcgtctggaggatcccagatggttcgaaagccccgagacaacggccctgctccgcagcgtgatagagccgctggctgcgcactatttcctcaaggcgcgcacgtcgaagggcaagctgatcgattccgtcgcccgcttccacctcggaaacggcgcgcggctggagcgcatcaactggctgggggacctctcgccgaagggcgtgcgcgaatccgccggcgtcatggtcaactatctctaccgtctcgacgatatcgagaagaaccacgaggcctatgccaatgacggcgaggtcgtggcatcgagcgcggtaaagaagctgctgaagagcgaaggacgaaggctgctggatattcgtttgtcgtagcagcgctctgctctctcccatcattgcaaggagcgcgacgaagcaatccaggccgtcgccgacgaaagattctggattgcttagctacgctcgccaatgacggagggtgtggcagcaggcgggctactccgccagcgccttcatctccttgtagagatcggacttgccttcgaagccgatgcctggaaggtcgggcatggtgatgtggccgttctcgacgcggacgccgtcggggaagccgccatagggctgaaacaggtcgggatagctttcgttgcccccgagcccgaggccggcagcgatgttgagcgacatctggtggccgccgtggggaatgcagcggctgggggaccagccgtgagtcttcagcacttccagcgtgcgcaggtattcgcacaggccataggacagcgcgcagtcgaattgcagccagtcgcgatcggggcgcatgccgccgtagcggatcagattgcgggcgtcctggtggctgaacaggttctcgcctgtcgccatcgggcgcggatagaattcggcgagcgcggcctgcagcgcgtagtcgaggggatcgccggcctcctcgtaccagaacagcggatagtcccgcagcatcttggcgtaggcgatcgccgtctccaggtcgaagcggccgttggcatcgacggcgagctgcgcgtccttgccgatctcttccagcacggcctcgatccgcttgcggtcttcctcgatcggcgcgccgccgatcttcatcttcacgacgttatagccacggtcgagatagccgcgcatctcgccgcgcagcatcgacaggcccttgccgggatagtagtagccgccggccgcgtagacgaagacgcgcggatcggcggtcacgccgtgacgttcggcgagcaggcggaacagcggcttgcccgcgatcttcgccactgcatcccacacggccatgtcgatcgtgccgacggcgaccgagcgctcgccgtgaccgcccggcttctcgttggtcatcatcgcggcccagaccttgtcggggtcgaggttgccgccggcttcatcgagcaacgacttcggatcggcttcgagaatgcgcgaagcaaagcgctcgcggatcaggccgccctgtccgtagcggccgttggaattgaagccgtagccgacgacgcgcctgccgtcgcgcacgacgtcggtgacgacggcaacgaggcttgtcgtcatcttgctgaaatcgatataggcgttgcggatcggcgaggagatcggcttggtgatctcgcggacgtcgacgatgcggacggacatgggatgagctttcggcggttgtgttcgtcattgcgaacggagcaaagcaatccaggaatgcatcctcggagacagtctggatcgcttcgtcgcaagcgctcctcgcaatgacgcggagagagcccgtgcgcgctcaggaactacttcttgtcccggaagtacggctcgaccgggccgtgcaccttgatggtcagcggattgccgtgccggtccttggcgttcccagcggtgacgcggacccacccttcgctgatgcagtattcctcgacattggtcttctcgatgcccttgaagcggatgccaacgtcgcgcgccagaatgtcggcgttgtagtaggggctgttcggatcgaccgacaggcggtcgggaaattcgtcgctcatgattgtctcgctcacaacagtgtttcgatttgctgccgcaatccttcgggccgtgcggtcggcgcgtagcgcgcgaccaccttcccggcacggtccaccaggaatttggtgaaattccatttgatggaggcgccgagaagccctgattgctggcgtttgaggtattcgtacagaggatgcgccttcggcccgttgacgtcgatcttctcgaagaggggaaaggtgacctcgtagtgggtcgaacagaactcctggatctcgctcgccggtcccggttcctgcgcgccgaactggttgcagggaaagccgagcaccgagaagccgcgcggggagagatcgcgatgaagatcctcaaggccgcgatattgcggcgtgaagccgcatttgctcgccgtgttgacgatcaagagcacctgtccctcgaaccggcgcagggcgatctcctcgccggcaagcgagttggccttgaagtcgtagatggccgtcatcgctagtccacgggatcgatcggcgacggcggcacgccgccggcctcgatcgcttcgccggcaagcaggcaaaggtcttcgcgataacgtccggagacgatgtgcacgccgaccggtgccttgccgacgaggcccgtggagaccacgaggccgggcagacccatgaagggaattgcgatctgcggcagctgcgcttcccagacccgcttgaaggattcgtcgtccttgcggtcaagatgatcggggaacggcaattcgcccgagaccggcgtcagcagcacggcgtacttctcgaagaacaacatccattcgcgggtcagcgtggctcgccgcgtcagcgccttggcgtaatttgcctgatccatcggcgtgaccctgctgcggttgccgcgcagacaggccagcgcgccgggatcgccctcgcgctcggccgcctcgagttgcgcctcgtagccgtcgccgagccagagcttgatctgccattcgaccgcctcgcgcatcggcggcgtgtcctcgatgacgtcgacggtccagcccgcccgctcgagccgcttgccggcatcgctcaccgcggccttcacctccggcgtggtggcaaggccgcccggattgagacagagcgcggcgcgcttgtcccgagcggggccctgcagcggcaccggcacgaaccagggatcgcggatgtcgcgggccgacatcgcatcaagcgagatgcgcaaatcgttgaccgtgcgcgccagcgggcccgacaccgccatgatctgcgggccgatcgggcgctccggcagcgcgggattgaaagcagggatgcggccgagcgtgggacgcaggccgtgcacgccgcaggcataggcgggatagcggatcgaacccgcgatgtcggtgccgtgggcaatgtggccgatgccggccgcgaccgcggagccggcgccgccggaggaaccgcccggcgtcagcgaggcatccctggggttcttggtgtcgccgtggatcagattggtggtgaaccagcggtaggagaaggccgggcaattggtgcggccgaggagaatggcgccggctttgcggaagttggcgaccaccggattgtcctcgcgcgcgatcacgtcgcgctgcagtttgaggccgttggtggtggcgaagccttcctgatcgacattggcctttatggtgacgggcacgccggcaagcacaccggggtcctcgccccgcgcgatggcggcatcgacgccatcggcctgcttgagcacgtcctccggccggtgatcgatcaccgcattgagtttgggattgacggcatcgagccgggcaaggccagcctgcgcggcctccctggcggacacctttttggatttgacgagggcggcgaggtcggcggctgacaggcgccagagatcttgcatggcttgctccgtgtgatcggcgtccttttagcgccgggaacacggcaaagtcatgcggatttcgcgggggtacctccgtcgttgcttcgaagcgcggcccgatgacaggctccgcgannnnnnnnnngaaactgccgccgcggaggcggtctggattgcttcgtcgcaagggctcctcgcaatgacgatggagggagctgcgcgccccctaacccggccctcggccgcagctaatgcctcgtcgctgactggtccggcaggtccagcagggcctcggtgaagggaaactcgagcacgatctcgccttcagcgtccgtcacctcgatcaccgcctcgagcagggcccgctgggtgccctccgacttcaccacctccaggatcatctggcgggcgacctcccaggcgcgatcggggttgcgcaggtcctcgccttcaggatccacgatcagttcgtcgccgatacgggtgttgaagaaatatctgggcatgcctggtccaatggggtcgcctgtcgccgattgaaagccgttctatactcacaactcgtttatcccgacagggatcacgacccatctgggttttaggaatgtcgtcgcttacctttacggccgcaatacgctctcttgcagtgcagcaattcagcagatggactagcgacgtccgggaaaatttcactggcgaacttctcagcccgcattactttaacccgtgggcggacacgtccgaattcgcaaagatggagagccgaaatggcatggaaagccccgaagatcgtcgaagtgccctgtggcatggaaatcaacatgtatgtgagcgcaacccgcaagtaagcggtttgcgatttcgcgttctgcgccggtggatctttcagtcacgacgcgtttccgaaagacacaatctgtgtcggcatttgcgtcggcctgagatccaccgcgcatgttccctccaggagacggatcatgcttcgcgtcgtcgtcctgggcgctgcagccggcggcggagttccccagtggaattgcggttgcgacggctgccgtgcggcccgcagcggcgggcatgagctgcaccgtacgcaagcctcggtcgccttcagcggcgacggcgagcactggttcctgatcaacgcctcgcccgatctccgtcagcaattgaatgcaacgccgcagctgcaccccagggcgggcgcgctgcgtcacacgccgattgcaggcgtgatcctgaccaacagcgaagtggatgcggtggcgggcctgctctcgatgcgcgagagctcgcccttcaccatctatgcgcatgagaaagcgctggcgatccttgccagcaacagcatcttcaacgtgctgaacgagaagcacgtgcggcgacagccgatctctatccgcgagcccttcgagccgcgcctcaccgatggcgcacgctcggggctggaggtgatggccttcgcggtgccgggcaagtcggcctggtatctggaaggcaagacgcatccgggcggcgagaacggcgatggcgatacgctggggctcaagatcaccgacaaggcgaccggcaagtgcttctacttcattgcggcctgcgccgaggtgaccgacgcgctcaaggccgagatcgacggcgccgcgctggtgttcttcgacggcacggtctggcgcgacgacgagatgatccgggccggcctcggccacaagaccggaaagagcatgggccacgtcgccatgtccggcgagggcggcgccatcgcgcggcttgccgaccttgctatcgaccggaagatatttctgcatatcaacaactcgaacccggcgctgctgcccgcgtcacccgagcggaaagccactgaagaggcgggctggcagatacccgccgacggaacggagatcgtgctgtgattgccgcatcactgactggaatgaccgcgctctcgatcggcaaggacatcaggctcggctcggccgaggagctggaggcggcgctgcggcatatcggcgcgacgcgctatcacagcctgcatccgttccataagctcctgcacggcggcaagctgaacaagggccaggtgcaggcctgggcgctgaaccgctactattaccagagcaccatcccgatcaaggacgcggtggtgatctcgcgcttccgcgaccgcgccaagcgcctggaatggcgccaccgcatcgaggaccatgacggcgacgtcggcagcgaaggcggcatcgagcgctggatcaagctgaccgaagggctcgggctcgatacggcttacgtggaatcgaccgaaggcatcttgcccgcgactcggttcgcagtagaggcctatgtccattactgccgcgagaagagcccgctggaggcgatcgcctcctcgctcaccgagctgttcgcgcccaacctgcatgaagagcgcatcgcgggcatgctggagcattacgacttcgtcaatcccgacatcatgagctatttcaagcggcgcctgacgcaggccccgcgcgatgccaatttcgcgctcgactacgtcaagacgcatgccacgacgccggagcaacgcgcgcttgtgtgcaacgcgctgatcttcaagaccaacgtcttgtgggtgcagctcgatgcgctccagcatgcctatgtcgagggccacattccgccgggcgcgttcgtgcccaaagcgagttgaggacaagagcaatggccgggccgcgtcacatcagcgtcagcgaggcgagccgccccgtgctgccgcggcatgccaagctgaaatatgacgagacgcggaaagtctgggtgatcctggcgccggaacgggtgctggcccccgacgagatcgcagtcgaggttctgcagctctgcaacggcgagcgcaatgtcggcgacgtcgccgatcaactcgcggcgaaatacgccgcgccacgcgaggcgatcctcgctgatgtcattgccatgctgcaggatctcgccgacaagggctttctcaccgagatcagggagaagacgtcatgagcgacgtgaccatcccgcccagcgacagcctcgcggtgctggagaagcagcgctcgacagcggagagcttcggcattccgctcgcggtgctgctcgagatcacccatcgctgcccgctgcaatgtccctattgctccaacccggtcgagctcgaccgctcggcgaaggagctgaccaccgaggaatggaagaaggtgctgagcgagctcgccgagatcggcgtgctgcaggtgcatttctccggcggcgagccgaccgcgcgcaaggacctcgtcgagctggtcaagcatgcgagtgacgtcggcctctacaccaacctcatcacctcggcggtgctgttgacgcgcgagaagctcagcgatctcgccgacgccgggctctgccatgtgcagatctctttccagggcatcgaggaaggcctcgctgatcgcgtcggcggctacaagggcgggcaccgcaagaagctcgaggtcgcaaggtggactcgcgagctcgatctgccgctcaccgtgaacgcggtgatgcaccggcagaacctgcaccagctccccgacatgatccagatgtcgctggatctcgacgccgaccggctcgaggtcgccaacgtgcaatattacggctgggcgctgaagaaccgcgccgccctgatgccgaccgtggcgcagctggacgaatgcactgaaatcgtcgaggaggcgcgcgagcggctgaagggccggctgacgatcgactacgtcgtgcccgactattacgcgctgcggccgaagaagtgcatgggcggctggggccggcagttcttcaacatctcgcccgccggcaaggtgctgccctgtcacgccgccgagagcatcaccgggctcgaattcgaatccgtgcgctccaaccattcgatcgcctggatctggcagaactcggaggccttcaaccgctatcgcggcaccggctggatgaaggagccgtgcaagagttgcgagttccgcgagatcgatttcggcggctgccgctgccaggccttcgcgctgaccggcgatgccgccaacaccgatcccgcctgcgctctgtcgccgctgcacgagaccatcttcaagcaggcggaggccgaggccgagggcgagacgagccgcttcatctaccgcaacttcgccggcggcaccctggaatccgagaatgggacctgacgccgacgcggccacttccgtcaaacgtgccgatccctttgcgccgctgacctccgacatgctcgacgtcggcgacggccatgagctgcatgtcgagagcgtcggccgtgccgacggaatccctgcggtctatctgcatggcgggcccggctccggctgccagccggaccatcgccggctgttcgatccggaccggttctgcgccgtcttgttcgaccagcgcggctgcggccgcagcaggccaaaggggtcgcgcgagcacaacaccacggcgcatctgatcgccgatatggagaagatccgcgagaagttcgatttcgaccgctggatggtggtcggcggctcctggggcgcgacgctggcgctggcctacgcagaagcacatcccgagcgcgtctccggcatcgcgctgcgcgcgacctttctcggcacgcgggccgaggtggagacggccttcacctcgcgcctggcgcagttctatcccgcgctgcacgaggactttctcggtgtgctgcctggggaagaacgcgatcgaccggtcggcgcctattggcgccgcatcctcgatgccgatccggccgtgcacggacctgccgcgcgcgcctggcacgacaccgagcgcacgctgtcagagcacaagcccgccaggacccggctggaccttgcatcgctcagtgtctggcgcacgctgccggcgacgccgttcatggaggcgcattatttcgtcaacgacagcttcatgaccgaggaccagctgttgcgcaatgcgggacggctcgccggcattcccggcatcattgtccagggtcgctatgacttgttgtgcccgcccgagacatcgcaggcattgacgaaagtatggcccggttccgagcttcgcctcgtggaagcagccggacattcgctctatgatgccggcgtgagggacgccgtcatgaagtcgatcgcggacctcgcgtcgaagatcgggcgatgagaggacaagaagaatgccgctcgccggaaagggcatgctgctgacgtcgatgaacatcgacgtttcagacgaagccgatttcaaccgctggtacgatcgcgagcatctggaagagcgtgtcgcgatcgacggattcctggaggcgcggcgctatgtcgcgcatgccgccaatcccaaatatctgtcgttgtactcgaccgcgacgctcgacgtgctcgacagccccgcctaccgggcgcggctggcgaacccgaccgactggtcgcggcagaccatggcgcgtttcagggacatgctgcgcgttgtcgcccgcatcaccatcagcaagggcaccgggcgcggggctgtgctcggcctggtgcggctgcggccgacgcctgacaatgccggagcgtggcgggacgcgctgcaagacaagctgaggcccgaagcgcatgacggcatcatctcgatgcatctgctggaaagcgagcccgaactgtcgggtgcgacagcgggaatcccggcgacgcgtaacgaaggcgcacgcgactggttcgtgctgatcgacggcacgcatgtcggcgcggtctccgccgtcatcgccgagcgcttcaccggtcctgcggcggcccccttcccgcctcccgtctccgtcggcacgtactgcctgatgtgggatctcgcgaagagcgatatcgcgcacggctgacatattgccgcgcggcctgatgacaggctcggcgagcagtccagactgcggccgcggtgacattctggattgcttcgtcgcaagggctcctcgcaatgagcggatggagcgcagtgtgatgctgcagcgcacgcgcatcgcatgcgggcgttaatgctgtgcgcgcgtagctcccatgaaagagggaagctacgcaaatttgccgttgtacttcggaacggttctaataagctaacccgatgacgtcattcagaaaccagatcgagacgcgttaagcgcccgccaagctcaaacaaaaaaggccgcggggtctttgagcctgcgcggacagggtaggaatgaaaccgaccgatattgcggcccccgactactttcacaaagtggtcgactgccaatgggcctgtcctgcgcacacccccgtccccgaatacatccgactgatcgcccaaggccgctacagcgacgcctacatgatcaattggaaatcgaacgtgtttcccggaatcctgggacgcacctgcgaccgcccctgcgagcccgcgtgtcgtcgcggacgcgtcgaggagaccccggtggcgatctgccgcctcaagcgcgtcgccgcggacttcaaggacgacatcaggcaacgcctgccgcgcccggcacccaagaacggcaagcgcgtcgcgctggtgggaggcggcccggcctcgctgacggtggcgcgcgatctcgcccccctcggctatcactgcaccgtgttcgatgccgatccggaagccggcggcatgatgcggacgcagatcccgaaattccgcctgccgaattccgttatcgacgaggagaccggctatatcctgggtctcggcgtcgacttcaagggcggccatcgcatcgagagcatgaaggcgctgctcgcggaaaagtacgacgcgatcttcgtcggttccggcgcgccgcgcggccgcgagctcgacattcccgggcggaaagaggcagcgagcaacatccatatcggcatcgagtggctggcctcggtctcgttcggccacaccgacaagatcggcaagcgcgtgatcgtgctcggcggcggcaacaccgcaatggattgctgccgcaccgcgcgccggcttggcggcgaagaggtcaaggtgatcgtgcgctccgggttcgaggagatgaaggcctcgccttgggagaaggaggacgcgatccacgaggacatcccgatcctcaacttcatggttccggtcgccttcgtgcacgaaggcggcaagctcaccggcgtcaccttccagaaggtgaaggccgaatacgacgccaaggggcggcgcaatctcgttccttcaggcgagcccgatcagaccatcgcctgcgacgacgtgctggtcgcggtcggccaggagaacgccttcccctggatcgagcaggattgcggcatcgagttcgacaaatggcacatgcccaaggtcgacccgaagaccttcgcttccaccaatcccagagtcttctttggcggcgacgctgcgttcggcccgaagaacatcatctgggcggttgcgcacggccatgacgccgcgctgtcgatccacaagatgctctccggcgaggccatcgacgagcgcccgctccccgacgtgcaaatctcgtcgcagaagatgggcatccacgaatggagctatgacaacgacatctccgtcgacaagcgctacaaggtgccgcaccgcgacaaggttgtcgcgctgaaggacatccgcgccgaggtcgagctcggctatgacgtcaagctggctctcggcgaggcgcatcgctgcctgaactgcgacgtgcagaccgttttctcgacctcgctctgcatcgaatgcgacgcctgcgccgacatctgtccgatggattgcatcacctttacggccaacggcgaggagagcgatctgcgccagcgcctgaaggcgccttcgctgcatcccgatcaggatctctacgtgtccagcgacctcaagaccgggcgcgtgatggtcaaggacgaggacgtctgcctgcattgcgggctatgcgccgagcgttgtcccaccggcgcctgggacatgcagaaatatttcatcgagatgacccacgcaggttcgacatgtccgacaaaaagccgatcagcagcgtaaacgacttcgtcgtccgcttcgccaacgtcaacggctcgggttcggccagcgccaacgagatgttcgcgcgcgcgatcctgcgccatggcgtgccggtgtccccgcgcaacatcttcccctccaacatccagggcctgccgacctggtacgaggtgcgggtgacggaagacggccatctcggcgcccgcggcggcgtcgacatgatggtggcgatgaatccgcagacctgggacaaggacgtcgccggcatcgagccgggcggctacctgttctacgattcccccaagccgatgccgtcgaccaagttccgcgacgacattaatgtgatcggcgtgccgctgaccgccatcaccaactcgacctataccgatccgcgccagcgccagctgttcaagaacatcatctatctcggcgcgctcagtgcgctgctcgacatggatcccaagctgatcgagcagctgatcggcgagcagtacaagggtaaggagaaactgctctcctccaacgtccacgcgctgcatctcggccgcgactgggcgctctcgaacctgaaatgcccgatcgggctgcgggtgaagaaatccgacaaggtcggcgaccgtatcttcatcgaaggcaacagcgccgccgcgctcggcgccgtctatggcggcgccaccgtgtgcgcgtggtacccgatcacgccgtcctcatcggtggccgaggccttcaccgcccactgcaagaaataccggcacgatccggagacggggaaggcgaaatacgcgatcgtgcagggcgaggacgagcttgcctcgatcggcatcgtgatcggcgcgtcctggaacggcgcccgcgcctttacggcgacctccggccccggcatctcgctgatgaccgagttcatcggcctttcatacttcgccgagatcccggccgtgatcatgaacatccagcgtgccggcccctcgacgggcatgccgacccgcacccagcaatgcgacatcatcgcctgcgcctatgcttcgcacggcgacaccaagcatgtgctgctgttcccggaagatcccgccgaagctttcgagttcgcggcggccgcgttcgacctcgccgagcggctccagaccacgatcttcctgatgctcgacctcgacatcggcatgaaccaccggctctgccgtccgctgaaatgggacgattccaagcagtatgaccgcggcaaggtgatgaccgcggaaatgctggatgagggccgggacttcggccgctatctcgacgtcgatggcgacggcatcccctaccgcacctatcccggcacgcatccgaccaagggctcctacttcacccgcggcacgtcacgcgatcgctatgcacgctattccgaggaaggttcggtctacgccgacaacatgcagcgcctcgtgcgcaagttcgagactgcgcaggacctggtgccaagaccgctgcaggccaatgcggagcggccgaccaagtacggcgtgatctatttcggctcgacctcgccggcgatggacgaggcgatcggattgctcgaagcgcgcgggcatcaactcgaccgcctgcgcatccgcgcattcccgttccattcgagcgtggcgagcttcctcgccgagcacgacttcgtctatgtggtcgagcagaaccgcgacagccagctgcgccagctcatcgtcaacgagaacggcatagaccccgtccgcctcgtgccgatcgtgcactacgatggcacgccgatcaccgcccgcttcatcgccaaggccattggcgaccatcaggatcacctcaaggtgaccccgctccgcaaggccgtgtcatgaccaacatcctgctctctctttcgtcatgcccgggcatagccgttcgaagaacggcgtcgcttccgctcgcctatgccccggcatccacgcgcttcgtcgtcgccgcaaagacgtggacggccgggtcaaggccggccatgaagcagcggacatttcaggtgctcgcatgacctacattgcaaagccgaaattccatcatccgggcctcaagaagaacgcgctcggctacacccaccgcgactacgagggcaagatctcgacgttgtgcgcgggctgcggccacgattcgatcacggcctcgatcatcgaggcctgctacgaactctcgatagagccgcatcgggtggcgaagatctccggcatcggttgctcgtcgaagacgccggattacttcctcggcaattcgcacggcttcaactccgtgcatggccgcatgcccagcgtgctgaccggcgccaacctcgccaaccgcgacctgatctatctcggcgtttccggcgacggcgattccgcctcgatcggcttcggccagtttgcgcactcgatcaggcgcggcgtgaacatgacctatatcgtcgagaacaacggcgtctatggcttgaccaagggccagttctccgcgaccgccgaccgcggctccaagagcaagaagggcgtgaccaacaccgataacgccatcgacctcgtcgccatcgcgctgcaactcggcgccaccttcgtcgcgcgctccttctccggcgacaagacccagctggtgccgctgatcgcggccgcgatccggcacaagggcgcttccttcatcgacgtcatcagcccctgcatcgccttcaacaaccatgccggctcgaccaagagcttcgactatgtccgcgagcacaatgacgccgtgaaccggctcgacgtgctggtcggccgcgatccgatcgcggtggactatgcgccgggcacggtgcaggtggtcgagcagcatgacggcagcaagattgcgctgcgcaagatcgacgcggactacgatccgcatgatcggctcggggccatgaccttcctgcagaagcacgccgccaagggccagatcgtcactggcctgctctatgtcgaccccgacgcggaagacatgcacgagcatctcaacacggtcgagacgccgctcaacagcctggaggcggactcgctgtgcccgggctcggcggtgctggacaagatcaacgccagcctgcggtgatcatcggctccgcgccgataccgccggcctgacgcgtatcttgatcttgtccgacacgacgggtggttcgaacggatagtgcttggcatcaccaagcaccagttgcagggtgtgcgtgcccggagaaagctcgagaaacgtttcggtctgtcctgccccgaaatgcagatgggacttgtcctgcggaatcggctccttgacatcgatggggtctttcacatcgatcaacagatgatgatgacccgcattgtggtaatcgtcgccggcatgcgtcacgcccatgttgcgcaggccgaaccggacccaaaatccaccacggaccttctggccgtcatacggcgtgatgaaatagagcttggcgtccttgggcgcggatttgccttgcgagcaggccgtgcctgggagcaaggcaattgccgctgccagcgcgatacaggaagtgactttcatcagattgactccagtcttacggactgagcgcgatgcggaagccgtgcgtggggtaacgaacacccgcgtcgtatccaccgcggttcgacggccgcacatatcccgaatcgttcttccaggagcccgaccgcaggacatgagcgctgcagtccgcgctggtccaagccgagccgtcgctgggcgcgccctgataggtccggtgccagcagtctgcgacccactgatcgatgccgccgcccatgtcgtaaagcccgaacggattgggcttgaaactgccgaccttggccggctgctcggccgcaagttcaccgcaatccttgcagccggccatgcccggctggagcttgtcaccccaccaatacttcgtctgtgtcccgccgcgtgccgcatattcccattcggcttcactcggcagccggtagggcttcttcgttgcctgcgccagccagtcaacatattgcttcgcgtcgatccagctcacattgctgaccggggcatcgtccttgccgctggccgtgaatccgcacgccttggcggcggcgcattcattccactcctgcaccgtcaccggatattttccgatcgagaacggcttgatcgtgacctggtggacagggcgctcggtcggatcatcgttgcttcccatcgcgaagctgccgccgcgaatggcgatcatctcgggctcgcgaagcggcgttgccgatgggctgggagtcgggaccggcggcggaggcgacgaggccagtgacggagacgcttgcgacatctgcgtggccgcttcgctcggcgaggcttgagcaatcggtgacgcgaccggagcggtgggcggcgcggcagcctgctcgcccatcctgctgggctgcgccagcaagtaccagagcacgccggtggccatcgtcagcattgtgatggcaagcaagaagatcagcgcagtctcgcggcggcttcttgttttgccgacggcgtccgcgtccggtagcacgcgatagacgcgcaccggatcagtgatgttcttgaccttgcggtcgccgagcgactcatagccgcacacgatcttgtgcttgatctgctcatagatggcgccggagatgtagacctgtcccggttccgcgatgccctcgatacgcgtggcgatgttgacgccgtcaccatagatgtcgtctggctccacgatcacatcgccgagattgacgccaatccggtactcgagccgggaatgcttgggaaccgacgcgttgcggccgacgagattttgctggatgacgatgctgcatcgaacggcctccacaggactgtcgaagatggcgatgaagccgtcgccagtcgtcttcaccaaacttccgtgatgttcgatgatgctgggctggatgagatctcgctcgatacgcttgacgcgaatatgcgtgccctcctcgtcagcctgcatcagccggctgtaggaggcgatgtcaccgacgatgatggcggcgagtcgacgaggcactccgctgtgcggcggcggctcatcctggttttcggatctgaagttgcgaatttcgcccatgcgggggactccacaaacttgcaaggcagccccagcttacggctgccacaggcagccgtctgtgaaggctatcacatcgacgagccgagacaatgtcgctgcgaccgtcggcgtcggttccaaggagacaaggcgcgacatccttttgaaccttcttgatcgtggagttgactaaggacgccaacgaccgtggccgcttccctgcaccggctcgcacgagtgacgtgcaaaggttgaacgcggtgcagcgtgccggcgtctaaacgacagcagtcctgttgtgctgcagtagattgtcaccccgagcccgtcatgaagctctccctcgttgctgttcttgctttcgctgctttgaccggcgtcgctcacgccgatgagactgaaattcgggagaccacaaaggctgaagccgagaccttcaatgtgcggatgtatgccggcccgcccggcaacaaggcctatgcttgcttcgtccgccgctacgatgccgaccacctggcgcggcaccccaagcagagggtcgccgcgatgaagctgctgatctcggcggaggtcgacgcagaggacaaggagctgcacagctccttccgcctcgggttccggtaccgtcatcggagcggcgatttcgactccagcggctcctgtaatcacgtcgtgttcactgcgagcgggggcgaggtgcgcctgggctgcggtgtcgactgcgacggcggcggcatcggcgtcgcgctgtccaaggacgacaagtccgcgatcgtccggctggagcgggtgcgggtctggcagaacaacaagccggacgacgatgccgagcattcgctgacggccggtgccgacgacaagatctttcgtctcgatcgcaccgacaacagcgagtgcgcctcactcgtgaccgaccgcaaggagctcgcagcgctgcgccacaagtgatatgcctgtggcacatcagggcttagtcggaggagaccgccatgaaccgccggaacattttgtggagcgccgtgtcagctctgggtgcggcgttcggagcatccagcgcgaaggccgcggcccaggctgcaccgagcaagctgaaggtggcatatcatctcagcgacgccgagaaggtcaatttcgtgctcggcaacatccagaaccatatcgacggcgtcggcggccccgagcatgtgacgatcgcgctggtgatccacggcccggcgctgaaggcctttcacgccatgcaggccaaccccgacgtcagcaagcgcgtcggcgagttctccaagggcggcatcgagctcgccgcctgcggcaacacgatgaaggcgcagaacgtcacactggcggatctcctgccgggcttcgtcaacgcggagagcggcggcgtggtccggttggccgagttgcagtcgcaaggatatctgtatctgcggccgtaggccggcacggcgatggctggcgcagccctttccgcgtcattgcgaggagcccttgcgacgaagaaatccagacagcctccgcggaaagattctggattgcttcgcggagcctgtcatcgggccgcacttcgcgcgaaccgttggctcgcaatgacaggggagtatggcgtcgccgcagcctcccgtcgtacttgactcatccataactccacggttatgaattaatccataactccttggttatggattccacatggccgccgaccccgacctcctgttcaggaccctcgccgatcctacgcggcgggcgatcttcgagcggctgtgccgcgagggcgagcagacggtcggggcgctgacgatgcgatcaggcgtctcgcagccggcggtgtcgaagcatctcggcgccttgaagcaggccgggctcgtgcgcgaccgccacgaaggacgccagacccattacagcgcgcggccgggtgcgctcaacccgctgatcgactggaccagccagatggctgggttctggcagaagaggctcgacgcgctcgacgatctcctgaagaggatggaccaatgaacgaacctgagacgcgctccgtcatcgtcgagcgcgaatttgcggcgccggtggagcggctctggcgtgcgctgacgcagccgcatttgatcgaggaatggctgatgaagaacgacttcaagccggtcgtcggccaccgcttcaatctgcgcggcgaatggggcggcgtgctggattgcgaggtgctcaccatcgagccgcagaagacgctggcttacacctggaatttctcgcatgaggacgcggcgttcgacctgaagagcgtcgtgaccttcacgctgacgccgaccagcgctggcacgcatctgcgcgtcgagcagtcgggcttcagaccgacgcagaagcaggcttttggcggcgcgcatgccggctggaagcagtttttcgccaggttggacgacgtgctggcgcgggcgggctagcacagccggcgcacttccaatcaatttttccaagggacgacccaatgagcacgcagatgtggatccggcagattcatcgctggctgtcgatggctttcaccatcgcggtcatcgccaacatcgtggcgatgaccatgcaggtccaagccgcatggattggcttcctggcgctcgttccactcattcccttgctcgcgaccgggctctatctgttcgcgctgccctatcttcgccgcagcaacgcgtgaacgaggcgagaatgaaaatggctgtgacgttgaagaaggcacgcacgaaggacacgaagcaggcctccccctccaagctgatcgacggcaggatcaaggagctcggcgactggcgcggcgagatgctggggcgggtccgcggcctgatcaagcaggctgatcccgacatcatcgaggagtggaaatggcgcggcgttcccgtctgggagcacgacggcatcatctgcaccggcgagacttacaaggacgtggtgaagctgacctttgccaagggcgcggcgctggaggatccggctggtctgttcaatgccagcctcgacggcaatgtgcggcgcgcgatcgacattcgcgagggcgggaagatcaacgaggaggcgctgaaggcgctgatccgcgcggcggtggacttgaatggatcgaagaagaagccggggaagaagcgagctgtctagaacagccgccaagcggccgcacactccctgcttctccccttgtgggactccccttgcgggagaaggtggtgcgaagcgccggatgagaggtctctctcgacacgagaatgcgcggagacgtacccctcacccgagcgagcttgtgctaaccgacatcgctgccccctcccgcaaggggagagggcgcgcggacgtgcatctcaccgtattgttcaaggtcagcggcctcaagccaccgcggccgggatcgggcgcgggctgacgacgtattcgcgtaggaccttgtcgttggcatcgacctcgatcagcgcgacgtcgtaggtccagagatcggcgagatgctggagcacccgcttggcgtccgtttcgttgagctgcgcgcccttgatgacgtggtgatgcaggatcagccggcggtcgccggagagatcgacgtcgaccacctcgatattggcatcgatgtagccgacatcgtgctgccgcgccagttcgcgccgcacccggcggaaaccgcgctcgtcgtggatggcatcgacgcggattccggcgcgctcctcgggatcgtcatgcagatggaacatgcggaaatgccgcatcagcttcgggctcaggaactgcccgatgaagctctcgtcgcggtaattggcccagacgtcgcgcagcacgcccatgacgtcgttcttgccggcgatgtcggggaaccactcgcggtcctcgtcctcgggattggtgacgatgcgctcgatgtcctgcatcacggcaaagcccagtgcgtaggggttgaagccggagaagcggggatcgtcgaattcgggctggaacaccacgttggtgtgcgatcccaggaattcgaggaagttgccgtcggtgatgcggccctgctcgtgcagcttggtcatgatgcgatagtggacgtaggtcgccgtcccctcgttcatcaccttggtctggctctgcgggtagaaatattgcgcgatgtggcggacgatgcggagcagctcgcgctgccagggcgccagccgcggcgcgctcttctccaggaaatagagcagattctcctgcggcaggccgagcagcttgcggcggcgttcgatgctcagggtggaccggctcttggccgcgcccttgggcaccgtgcgccagagatcgttgaagacctcctcctcgtgctggcggcggcgccctgcccgcttctcctcggcccgcagatcgagcttcttcttgccgggataacggtcgatgccgtgcgacatcagcgcatgcgcggcatcgagcgtgcgctcgacctcgatgcggccgtagcgctcctcgcactgcatgacgtagttcttggcgaagtcgagataatccaggatgccgtcggcatccgtccactgcttgaacagataattgttcttgaagaaatgattgtggccgaaggcggcatgcgcgatcaccagcgtctgcatcgtcgccgtgttctcctccatgaggtaggagatgcagggcgaggaattgatcacgatctcataggcgagccccatcaggcccttgcggtaggacgcctcgtgaaacgcgaaatgcttgccgaacgaccagtgcttgtagaacaagggcatgccgaccgacgagtatgcgtccagcatctgctcggccgtgatgacctcgatctggttcggatagacgtcgagcccgagatccttcaacgccacctcctcgcaggcatccgtgatgcgctgcaaggtgtggaagtcccaatcggcgccttcgaacaaacgttccgtcatggagcggctttctcctgagcagtttcgcggcgctggaacagatcgtggaacaccggaaagatctcgctgcgttcggagaccttgcgcatcgagagcggtgcgccgctgttgcgcaggcgctcgtaaagcgaccacagcgaggaatcggagagatcgaaggcgctgccgccggattctccgacctcgagataggcgaagaactggcagaccggcaggatcttgtcggtcagcagcatgccggtgagctcgccgtcggaataggaattgtcgccgtccgaagcctgcgcggcgtagatattccagtccgacggattgaagcgctcgcgcacgatctcgtgcatcgcctgcagcgcgctggagaccagcgtgccgcccgaggccggaccgtagaagaaggtctgctcgtccacctcctccgcgcggtcggtatggcggatgaagacgatctcgacatgcttgtagcgccgcttcaggaacacgtagagcagcatgtagaagcgtttcgccaggtccttcatgtgctcggacatcgagccggacacgtccatcagacagaacatcacggcctgtgcgacgggcctcggcaccgtctcgaaacgacggtagcggatgtcgagcggatcgatgaagggaatgcgcctggacttcgccttgagtctttcgagctgagccaccagctcggtgcgctcgtcctcgtcctcgcaagcggcgatcgcggcttccagctcctcgatctcctccttgcggggacgcttgagcgcgatgcggcgggcaagcgctagcttcaccgtccggctcaccgagatgttggcgggcgagcctgaggtcgtgtagccggcacgctggatgccctcgctctcggtctgcgcgatcttgcgcttggcgagatcgggcagctcgagatcgtcgaggaagagatcgacgaactcgtcacgactcagcacgaaacgaaaggcgtcctcgctgtcgccctcgcctgggccggaactcttggcgctgccctgtcccgaacgctggagatagtcgccttcgatgaacttcttgttgccgggcaggaccatgtcccgcgttccgccctcacggcgaaagcgcggctcatgcatgccgtcgagcgggatcgtgacctcaccaccctccaggacatccttgatgtcgcgttcctgcgaggtcttcttgacggcgccctgcaccagggacttggcccgacgcaagaaccgctggcggttctcaagactcttgccgcccggattcaggcgcctgtcaatgatgtgaatgggcactttaccattcgcctcccatccgtctcagccggcctgcttcacgcgcatgtaccattcgacgagccggcgaacctggcgctcggtgtagccgcgctccaccatgcgtgcgacgaactcgccatgcttcttctccgtctcgccgtccttcttcgacccgaaggagatgaccggaagcaggtcctccacctgggagaatatccgcttttcgatcacatcgcgaatcttctcgtaggaggtccaggtcggattcttgccgccgttctgggcgcgcgaccgtaacgagaatttgacgacctcgttgcggaagtccttggggttggcaatgcccgccggcttctcgattttggtcagctcctggttcaaaagctcgcgatcgagcagctggccggtgtcgggatccttgaagtcctggtcctcgatccaggcgtcggcatagtcgacgtagcgatcgaacaggttctgaccgtagtccgagtaggattccagataggccttctggatctcgttgccgatgaactcggcatagcgcggcgccagctcggccttgatgaattcgagatagcgtttctcggtctcctccggcagctgctcgcggcggatcgcctgctccagcgcgtacatcaggtgcacggcgtcggccgcgacctcctgcggatcgtggttgaaggtcgcagccaggatcttgaaggcaaagcgggtcgaaacgccgtccatgccctcgtcgacgccggcggcgtcccgatattcctggacgctgcgcgccttcggatcggattccttcaggctctcgccgtcgtagacccgcatcttggcgaacagggtggagttctcgtgcttgcgcaggcgcgacatcaccgagaaccgcgccagcgtctccagcgtcgacggcgcgcacggagccgccgcgagctcggagccctgaatcagcttctcgtagatcttctgctcctcggtgaccctgaggcagtaaggcaccttgatgacgcagatgcggtcgatgaaagcttcgttgttcttgttggccttgaagctcgcccactccgcttcgttggagtgcgccaggatcacgccggtaaagggaatcgcgccgatgttctcggtgccgatgtagttgccttcctgcgtcgccgtcagcagcggatgcagcatcttgatcggcgccttgaacatttcgacgaactcgagcacgccctggttggcgcggttgaggccgccggaatagctgtaggcgtcgggatcgttctgggcgtaagtctcgagcttgcggatgtcgaccttgcccaccagcgacgagatgtcctggttgttctcgtcaccgggctcggtcttggcgattgcgacctgacgcagccgcgacggctggatctttgcaacgcggaactgggagatgtcgccgccgaaggcctcgagccgcttgtagcaccacgggctcatcaagccggtgagacggcggcgcggaatgccgtacttctcctccagcatcgggccgagctgatcgggatcgaacaggctgagcgggctctcgaacacgggcgagagttcgtcgccggccttgagcacgtagatcggatgcacttccatcagcgacttcagccgctcggcgagcgaggatttgccgccgccgaccgggccgagcagataaagaatctgcttgcgctcctccaggccttgcgcggcgtggcggaagaaaccgacgatgcgctcgatggtttcttccatgccgtagaagccggcgaaggccggataggtgcggatcgtgcggttcaaaaaaatacggccaaggcgtgggtccttggccgtgtcaatcgtctgaggctcaccgatcgccgctagcagtcgttcggccgcgttcgcgtatttcatgggatcgcttcgacacgattccagatattccgccatcgacatgtcgtgctggcttctcgcctcgaacgaccgagcgaaagcgttgaatagagaatcgttgtacatgatccctctccgcgtgagttccgctacaagctgaaacgaaagcagttaccggaccgttcctcaggccgtttcgaatcagcgtgagcacatgacgatcattggacacccgggcgccaacacgacgcaacgcacaacgtaggcactccatgagttacgaacaggcacatgcctgtaatttgtgcgaatctatgtctatattggctcatttccagaaaatgtcacttggtcgcaacatccgggccttaccggggaatgtcttcatccggcaatgcagcatagcgatgccggagcggcgatgttatgacacttgtacggcgaagccttgcccgccgcgttcatcatcctgctgcaatgcagtgcgcgcgctgctggaagcgtggcagtcgcggcaagcgcgcagcaatgtctcaaaatcggtcgccaggccctccgggcggatgacaatgcggccgttctgcgcatagctggccagggttgggatggcgcgcagctggtgccgcaacgccggcgtgggcgtcagcgcgatcgccttgtggccgcggcactcttcggccgaaatctcctcgatcgactcccacagcagaaattcattgccaatgcgaagatcgcggatgccgtagggagtgacgaccaccacagcccctcgttcggcgggaagcatccagatcaggcacgccgtcacgaggccgaacagcacgacgccggcatagccgacgctcttgtcatagtcgccgaagccatcccaccagtcgaaggcaaggcttgcactgagcagtgtcatcgcgaaccctgccgcgaccagcagccgcaactgcatcacgcaacgcgggatttcgaggtcgcgggaggcgtcgatgccggccgccgacccagccgcttgcgggctgttggcgacggcgaacgccaaaccttccttgtgggcctgcatgctctcccccagcacggccattcgcgaccgagccattctgcgacggcgaatccaaatccgtcgctggcactccacgcaaccgctggctgacgaggcgaggcggccggcgctacgcaagggacttcggccgcgtcctcgcggacaacgacccttacgcaacacagccactgccgcctggatcgccatgatcgcgacggagttacactggagggtatgactcccacacccttgattggttccctcccgggagcatgtaagttagaggatagcgcgtcaggaccggcgcggaaacccctcgccgcaggcttggagataaagaagcatcatgaatcccgtcaaagaactggaaaagcacggccaagccgtctggctggacttccttgcccgcggcttcatcgccaagggcgacctgaagcggctgatcgagaccgacggcgtcaaaggcgtcacctccaatccgtcgatcttcgagaaggcgatcggcagctccgacgagtatgacgcgccgatcggcaaggcgctgaagcgcggcgaccggacggttgccgacctgttcgaggccgtcgcggtcgaggacatccagaatgccgccgacgtgctccgtccggtctacgaccgtctcaagggcggcgatggttatgtcagcctggaagtctcgccctatcttgccatggacaccgccggcacggtcaccgaagcacggcggctctggaaagacgtcaatcgcaagaacctgatggtgaaggtcccggcgacgccggagggcctgccggcgatcgagcagctgatcggcgaaggcatcagcatcaacattacactgttgttctcgaaggcggtctatctccgggtggctgaggcctacattgccggactcgagaaatacgttgccggcggcggcgatccttcgcatgtcgccagcgtggcaagcttcttcgtcagccgcatcgattcggtcgtcgacaagcagctcgacgagaagatcgcccgcgccaacgatccatccgagaaggaacggctcgccgcgctgaagggcaagatcgcgatcgccaacgccaagctggcctaccaggactacaagcgcctgttctcgggtcctcgctgggagaagcttgccgccaaaggcgccaggccgcagcgcatgctttgggcctccaccggcaccaagaacaaggactacagcgatgtgctctatgtcgaggagctgatcggccccgacaccatcaacaccgtgccgccggcaacgctggatgcgttccgcgaccatggcaagccgcgcgacagcctggaagagaatgtcgaggacgcaaggcgcgtgctcgaggagctggagcgctcgggcatctcgctcgatacgatcaccgaagagctggtcaaggacggcgtcaagctgtttgcggatgccgccgacaagctctacggggcggtcgcccacaagcgcgccgtcgtgctcgggccggcgctcgatcgccaggagatctcgctcggggacggcctcggcaaagccctggctgagagcaccgagaaatggcgggcgtcagccaagatccgccggctgtggcagcgtgacaagtcggtctggaccggcgcagacgaggacaaatggctgggctggctcgacagcccggccaaggccgacattgccgattacgaggactatgccggccgcgtgaaggggcagaagttctccgatgccgtggtgctcggcatgggcggatcgagtctcgggcccgaggtgctggccgagaccttcggcaagaagccgggcttcccgaagctgcatgtgcttgactccaccgacccggcgcaggtgcgcgcgatggaggcgaagatcgacatcgccaacaccgtgttcatcgtctccagcaagtccggcggcaccaccgagccgaatgcgatgaaggactatttccacgagcgcgtcgcgcaggcggtcgggccgaaggtgaagaccggccatcgcttcatcgcggtgaccgatcccggctcgtcgcttgagaaggcggcgaagcagctgcactacgcccgcatcttccatggcgagccatcgatcggcgggcgctactccgtgctttcgccgttcggcctcgtgccggcagcgaccgccggcatcgacgtgaagaccttcgtcaagcacgcgctggcgatggtccgctcctgcgggccggatgttccgccgagcgagaacccgggcgtgcagcttggccttgccatggggttggccgggctcgacggccgcgacaaggtgacgatcctggcctcgaagaagatggccgatttcggcgcctgggccgagcagctcatcgcggaatcgaccggcaaggagggcaagggcctgatcccgatcgatggcgagccgctgggcgatccctcggtttacggcaacgaccgcttcttcatcgacatccgcgtcgaaggcgaagcggacgccgcccacgattccaagcttgccgcgatcgaggcggccggtcatcccgtggtgcgcatcgtcatgaagtcgatcgagcatctcggccaggagttcttccgcttcgagatggcgacggcggtcgccggctcgatcctcggcatcaacccgttcgaccagccggacgtggaggcggccaagatcaagacgcgcgagctcaccaccgccttcgagaagaccggggcgctgccggaagaacagccggtgatcagcaccagggaggcagatctctacacggacgaggccaacgccacggcgctgcgggccgccggcgccgacggcgatctcacctcctggctgagggcgcatctgtcgcgttcgggcgacggcgactatgtcgccctgctcggctacatcgcgcgcgacaaggcgacggtcgaggcgctccaggccatgcgcctcgaggtgcgcgagaagcgtcacgttgcgacctgtgccgagttcgggccgcgctttctgcactccacagggcaggcctacaaggggggccccgacagcggcgtctttctccagatcacggcggacgatgcccaggacctgccggtgccgggccagaaggcgagcttcggaatcatcaaggcggcacaggcgcgcggcgatttcgacgtcctcacggagcggggccgacgcgcgctgcgcgtacacctgaagggcgggctcaagaaaggtctcgcgacgctcaatgcggcgctcaacgacgcgctgaattaagggatatagcagatgcaactcggcatgatcggcctcggccgaatgggcggcaacatcgttcgccgcctgatgcgccacggccactcgaccgtggtctacgacaaggacgccaatgccgtcgcaggccttgccgctgacggcgcggtcggctcggcaacgctcgaagagttcgtctcgaagatggagcggccgcgcgccgcctgggtgatgctgcctgcagggcacatcaccgaaaccacgatcgagacgatcgcgggcgtgatgcaggcggacgacgtcatcatcgacggcggcaacaccttctggcaggacgacgtccgtcgcggcaaggcattgaaggcccgcggcatccactatgtcgacgtcggcacctccggcggcgtctggggcctcgaccgtggctattgcatgatgatcggcggcgagaagcaggtggtcgaccggctcgatccgatcttcgccgcactcgctccgggcgcgggcgacattccgcgcacgccggggcgcgaggggcgcgatccccgtatcgaacaaggctacatccatgccgggcccgtcggggccggtcacttcgtcaagatgatccacaacggcatcgagtacggcctgatgcaggcctatgccgaaggcttcgacattctcaagaacgcgaacatcgcagctctgccgccagaccaccgctacgatttcgatctcgccgacatcgccgaggtgtggcggcgcggaagcgtgatcccgtcctggctgctcgacctcacctcgactgcgctcgccgacagcccgcagctgtcggagtattccgggttcgtcgaggattccggcgagggtcgctggaccgtgaatgccgcgatcgacgaggcggtgccggccgaagtcctgaccgcggcgctctacgcacgttttcgttcccggaaggaacacaccttcgctgaaaaaattctctccgcgatgcgtgcagggttcggcggccacaaggagccgaagcagccgggcgcggcgaagccaaagtaaacgacaaccaagcgaaggccgacagttcgtgacaaaagacccgcagcccaagcgcaagcccgacaattgcgccttcgtcatctttggcgtgaccggcgacctcacccaccggctggtgatgccgtcactctataatctcgccgcagagaacctgttgccggaaaagttctgcgtcgtcggcgccgcccggaagagccagtcggacgacgagctgcgccagagcctgatgaagggcctgcgcgaattcgcaacgcgtcccgtggacgatgacgtcgccaaacagctgctgcagtgcgtcaccttcgtggaggccgacgccaaggacccatcctcgttcgaccgcctgagcaggcatctcgacacgctggaatgttcggaaggcaccggcggcaatcgcctgttctacctggccaccccgcccgccgcgttcgcaccgacggcgcgggagctcggccgcaccggcctgatgaaggagaacggcgcctggcgaaggctcgtgatcgaaaagccgttcggcaccgacctcgcctcggcgcgcgcactgaacgccgaactcctgaagatcatggaggagcaccagatctaccggatcgaccactatctcggcaaggagacggtgcagaacatcctggtgctgcgctttgccaacggcatgttcgagccgatctggaatcgcaaccacatcgaccatgtccagatcacggtcgaggagaagctgggcgtcggccatcgcggcggcttctatgatgcaaccggcgcgctgcgcgacatggtgccgaaccatctgttccagctgatgtcgctggtggcgatggagccgccgacgcgattcgacgcgcattccgtgcgctccgagaagtccgacattctcaccgcgatccagcggcccagtgaagaggaagcactgaggaactcggtacgcgcacagtatctggccggccgtgtcggcgacgaggagattccggactatcgcaaaaccgcggacatcagaccggacagcaccaccgaaacctacgtcgccctgaaactgatgatcgacaactggcgctgggccggcgtgccgttctacctgcgcaccggcaaggcgctggcgcacaagcgcaccgaggtcgcgatcaagttcaagcaggcgccgctctcgatgttctcggggacggcggtcgaccgcctgtcgcagaacttcctcaccatcggcattgcgcccaccgagaccatcgagcttcaattcaacgccaagatccccgggccgagcgtcaccatcgacggcgtcgagatgaaattccgctacggcgactatttccgcgccgatccctcaaccgggtacgagacgctgatctacgactgcatgatcggcgacaatatcctgttccaacgcgccgacggcgtcgaggccggctggcaagccgtgcagccgttcctcgacgcctggaagaatgcaggcaccaacggcatcgagacttatgaggccggcagcgacggcccgaaatgcgcggacgagttgctccggcgcgacggccgaagctggcggaaatactcgtgatcgcggccgaccagccgaagctgatcgtcgaaaccggcgccgaagccttggcccgcgccgcggccgaacggctgctggcgcggatcgcggccaatcccgggcgtatcgcgatctgtctcaccgggggctccagcccgaagaggctctacgaattgctcggcagcgacggctggcgcggcaggattccgtggcagcgtgcacactggttcatcggcgacgagcgcttcgtgcccgaaagcgatcccctcaacaacatggcaatcgcgcgcgcggcgtttctcgacggcaacgcgccgcccgaacatatccatccgattccaaccacgggcgagaatcccgaggccggcgccgaagcctatgcacgcgagctacaggccttctacggctcggaccggctcgatcgggcgcgcccgctgttcgatctcgttctgatgggtgctggaccggacggccacaccgcctcgcttttcccgggctttcccgaaatcgaagagaccgagcgctgggccgtcggcgtgcccaaggccaatgtcgcgccgttcgtgccgcgcgtctcgctcaccctgcccactttggcctcgtgccgcgagatgctgttcgagattgccgggcccgacaagcgaccgatcttgacgcgcctcttcaacggcgagaacctgcccgccttgcgcgcgcgctcgaatggcgagaccgtctggatggtggacagggccgcgcttccggaggaaattcgtgggccgcgctgaagcaccctgtgcattgatcgtgatgggcgtgtcgggctcgggcaagagcacgatcgcggaggcgctcggccaacgtctcggctggcgtttcgaggacggcgacagcttccatcccgccagcaacgtcgagaagatgcgggcgggccatccgctcacggacgaggaccgctggccctggctcaatgccatcgccgacgagatcgcgcttgtctgcagacggggcgagcacgtcatcatcgcctgctcggcgctgaagcacgcctatcgcgacgtgctgctgcgcgggcgcgacgacgtgcgcttcgtcttcctgaagggcaccaaggagctgatcgcagagcgcctggcgcaccgcaagggccacttcatgccgccagggctgctgacgagccagttcgacacgctggagccgcccgaggcgagcgagcacgtcatcaccgtttcgatcgacgagaccgtcgaagcgatcgtggacggcatcgtgcggcagctgaaactgggcggcgtaggacgctgaggcaacaaacctgatgatttccaaggtctggccatgacgcaaatctcactcgtggtgtccgatgtcgacggcacgctgctgaccaaggacaagacgctgacggagcgtgcgaagaacgccgtgcagcggctgcaccaggccggcatcggcttcaccatcacctccagccggcccgcgatcggcatgcgcttcttgatcgagccgctggcactctggctgccggtcggtccgttcaacggctcctcgatcatcgatcccgagatgaggccggtcgagcagcacctgattcccgcggctgcggccgagcgggccctgcagatcctccgcgagttcggcgccgacgtctggctcttcaccaccgacaaatggctgatcgacaatccggacggaaagtacgtcgcgcacgagcggcacacgatccgctccgatccgaccatcgtgactgacctgtcgccgtaccttgccggcgcctgcaagatcgtcggcgccagcgccgacgccccccgcctcgaggcgtgcgagaaggtcatgcaggaagccctcggcagcgcggcgaccgcggtacgttcgcaaacctattatctcgacatcaccccgcccggcttcaacaagggcaccttcgtgcaggccatggccaagcgcctcggcgtttcgaccgacgcggtcgccaccatcggcgacatgcagaacgacctggccatgttccgcgtcagcggtgtctcgatcgcaatgggcaacgccgccgaaaacgtgaaggacgaggcgacgcacgtcaccgcgaccaatgagcaggacggttttgccgaggcgatggagatgatcctgatgcggaatggggtgggttagctggagcgtcaaccctggcgtcattgcgagtgagtgcggtcgatagcttttatttctgtcatagtcacttcgaccgctgcaccgccggtttctcgctgccttgccttgccgccgacagattatgtgcggtgttgatcagggcgatgtgggtcagcgcctgcgggaagttgccggtctgacgtcgggcgtctgaatcatattcctctgccagcaagccgacgtcattcgcaatgccgaccactcggtcaaacaattcctgcgccttgtcgagatcgcctgacagcacataggcatcggcgagccacaggctacaggccagaaacgcaccttcgagcggcggctggtccgctggcagctcgcgcggatcgtgccgcagcacgaagccgccgcgcatcaggcatttctccacggcggcaatggtgccgcgaatgcgcggatccgaaggcggcaggaacccgacctcgggcagcagcagcacgctggcatcaagcagtttcgagccgtaggattcgacgaaggcgttctcctccgcgtcgaagcccctgttgcagacgtcgcgatgaatcgcatcgcgcaaggtgcgccagtgcaggagcggcgccttgaagccgaacgtctctgcgctcttgatgccgcggtcgaaggcgacccaggtcatcaccttggagaagacgtagtgcctgggctggccgcgccgctcccagatcccgtgatcgggccggtcccaaacctcggccaaatgattgagcacggcgcattccagcgcccaagtctcatcgtcgagctcgagcttggccatgcgcgactggtggaaggcgtcgatcaattcgccgtagacgtcgagctggagctgcgcatgcgcggcattgccgacccgcacgggccgcgcgccctcgtagccgccgagccagcccgcctcccattcgagcagccggcgctggccccagatgccgtacatgatctgcatcttcgccggcgaaccggcggccgcacgcagtagccaattgtgccaggccagggcctcctcggtgtagccagagttcatcagcgccagcagcgtgaaggtggcgtcgcgcagccagcagaagcggtagtcccagttcctgctgccgccaagcttctccggcaaggaagtggtgggtgccgcgacgatgccgccggtcggcgcgaaggtcagggccttcagcgtgatcagcgaacgcaacacgagctcttgataatcgccgtcgcgggtgcaatggccgcaccaatcctgccagaatctctcggtctcctggagagcgatttccggatcgatcggcgccggcggatcgaggtgcgagggaccgtaggccagcacgaagggcaccgtctcgccggccttcacctcgaattcggcaacggtcgtcagattctcgccgcgggtctcgacgggtgttcgcaacacgatcaggtcctggccggcaatcgccatcagggagtggtcaatacgccgcacccagggaatgttggcgccaaatccgaaccggatgacgagctccatccgcatcttcaccgtgccgtcgacgccgcgaaccagccgcacgatgtcggacgccttgccgcgcagcggcatgaagtcgatcagggcgacggtgccgccaatcgtctcgaaacgcgtttcgagaatcagggtgttgccgatgtagcgccgcgagatggcggtcgcaccctcgctcggcgcgatcagccagcgcccgttctcatgcgtgcccaggatggcggcaaagcaggcatcggaatcgaatgcaggccagcagagccaatcgatcgagccgttgcgcccgaccagcgccgcggtctcgcaatcgccgatcagcgcatagtcctcgatcctctgagacaaagccgtccaacctgttcaatttccgccgggcaacgaccgttcccgtgtcgcggccttcaaagctgccagatcgactttggacgcgatcttgtccagcgcgaccggaagacgctggcgccagttcggatgctcgtcgatcgtgccgggaatgtttggctgatcgaccacacccaggagatcttccagcgatactgcgagcagccgcgagggcgtgcgcgacaggaaggcgagcaccgaatagagatcgttcgccctgatgccgttctggcgcaggatctcgtccagcctgccgagcgcatcccagcgcgcctgatcgttctcgccgggatcgagcccgagcgaacgcttcatcttgagatcgccgaacgaacgccagccggcataggtcgacagatcatgcgtgttcagcgtgaccagcgcattgggccggtagtgatcgacgttgcggaaatggccggcatcgtcgcgctcgaacatcatgacgagataggaccagataccgaaatcctgcatcgtctcgcggaagccttccggcacggtgccgaggtcctcgccgatcacgatgcacctatgggccgcgctctcgcgcgtcaccactgccagcagtgcctcgaacggcatctcgacgtaggcaccgttgtcgggtttgaagccgcgtggcacgagataaagccgcttcaggccgagcacgtggtcgagccggatggccccggcatggcgcatcgaggccgcgagcatgtcggcgaacggcacgaaggactgcgcttcgaggccgccggcattgaagccggcaaggccccagtcctggccgatcgtgttgagcacgtcgggcggcgcaccgacggcgagctggcgggaaatcgccgtctgctcgttccaggcatcgaagccgttggattgcacgccgaccgcaacatcgagatagagcccgacccgcatgccgagctgaccggccagctccttggctgcatgcagctggctgtcagccgtccattgcacgaattcgacgaactcgacctcccgcttgtcgggccccttgcgcagctcggcacatttcgcttcatccggccgttgccactccgacggccattcccaccagggcacggcgaagcgatgtcgcagaacctcgaagcaggcgaagcgggacaggagcggtgcccgggcggcgcggaaggcgtcgaactccttgcgacgcgcgtcgctcgcgcttgtcacgaaacgctcaaaggcaccgcgcagacccagccatttcaagtttgccatggcggtgtaagggacgcggtcaccttcgcgcagacgagccgcggtcacggctgcgtcgggcacgagctcggcggagaattcgggaatagcctcgacgtcgatgtagagaggattgaggaagagccggctgttcggcgaataggggctgcaatcagccgggcggtcgtcgaacaggacatgcagcggattgagccccacgccgtcggccccgagctgcttggcgagcctgaccaggtccgcaagatcggtgaaatccccgatgccccaattgcggtccgaacggacgctgtagagctgtacggcgagcagccagccgcggtcgaaatcgccaccgaagcagcgttcgggcgccacgatcatcggcacctcttccgtcacgccatcggcatcggtcagcgtcaagcggtgatatccgagcggcagggcggcgggccaggcgatgacgggctcgcgcgtctcgcctgtcgcgatcacattgccgttgccaaggagtttccattgcagcggcggcgcaccgatggccgccaattccgtgcgtggatgtcccagcgcacggaccacgaccggaccgctgacaaagcgatagacccgcttctccggcagggcgtcgaggatggacttgagcgcctcgggcgcggtcacccgcagcttgccgagggcgtcgatgaattcggactgaacgcccttgagccgggcttgagctaaaagatccattcggcacgcagcttgcaggccattgttcggccaagggtattgattttaacgaactcgcggaagaggttagtcaggggtaactcgcagactgcgcttgccgttcccaacggaaccaatgacacacaagcggctttctatcatggtaccaagcgtggattcccgacaagggaaacgggctcctgctttcttgtcaatggcatcaccgtgaacaagacaattcaaactgtcgagagtgctgcggccggcggcactttcctcatcgaggacgtctatccctcgatcgacggcggccgcttcgccgcgaagcggatcgcaggcgagccggtcgaggtctgggccgacatctatcgcggcggtgacgcggtgatcgccgctgcgctgatctggcggaaagagcaggaccgcgaatggcggagcgagccgatgacccatcacggcaatgaccgctggtccggcgcattcacgcccgttgagcccggccaatatatctacgcgatcgaagcctggaccgatgagttcgccacctggtcgcgcgcggtggcgcgcaagcagcgcaccggggccgacatcagcctcgatgcgatcgagggcgccggcctgctgaccaaggcgcacggcgcacggcaggatgccgccgcaatcatcatcaggcggtgtgaggattatcttcaaagcggggacgtcacccccctgctcacgaccgagctgggccaggccatggccgagagccagtcgcggcccgacctgacgcgttcaccatccttcccgctgacgatcgaccgcgacaaggcgcgcttcggcgcctggtatcagatgatgccgcggagccagagtgcatcgccgggccggcacggcacgctgcgcgactgcatcgcgcgcgtgcccgacatcgccgccatgggctttgacgtgctctacttcacgccgatccaccccattggccacactcgccgcaaaggccgcgacaacgcgccggtggcgagtgacggggatcccggatcaccctacgcgatcggttcggccgcgggcggccacgatgcgctgcatcccgagctcggcacgatcgaggatttccgcgcgctggtggcgacctgcctcgaatatgacctcgagctcgcgctggatttcgccgtgcagtgctcgccggaccatccctggctgacgcagcatccggaatggttcaaatggcggccggaccgctcgatacgggcggcggacggcccctattccgacatcgtcatccccgatttcggctccgtcgacagggcaggcctttggaatgcctttcgcgatgccatgctgttctggatcgaccatggcgtgacgatcttcgccatcgacaatcacgacactgcgccgcttgcgttctgggaatggctgatccgcgacattcgccgccgccaccccgaggtgatcctgttctccaagacctatgcacgaccgaagctgatgaagggcctcgccaagatcggctttgcgcagtccttcacctatttcccctggcgcacctcgaagtgggagctggagcaatatctcggcgagctgacgcgccatccggaacgcgatttctaccggccgcacatgttcgtgaacacgcctgacctgttgccttatcatctgcagggcggcgagagctgggctttcaagtcgcgcatcacgcttgcggcgacgctttccggcaattacggcatccacagcgggttcgagctgctggagcatgaggcgattcccggccgcgaagaatatctggactccgagaagtaccagatcaggcagcgcgactgggacaggccgggtaacatcaagccctacattgccgctctcaatcgcgtccgccacgagaacccagcgctgcagcagacggccaatctgcgctttcttggcatcgaggacggcgagaccatcgccttcgtcaaggaggcagccgggcccggcaacaccgtcgtcatcgtggtcgcgctgtcgcgcgacgtgcgagaatgctggctgcccctcggcgacgtcatggttgacgccggcggacagagtcaccatgtgacggcactcgaaaacctcctcaccggcgaacagtcccgcagcgaatggggtgggatcaggttgcgaatcgatcccgatcgcgatccggcccttctgttccgctgcctggcgtaagggttcacgccatgaatgttctgtcttccgtcgacaccaagaaggttgaagctgccgagatcgtggacgagctctggtacaaggacgccatcatctaccagcttcacgtcaaggccttcgccgacagcaacaatgacggcatcggcgattttgccgggttgaccgagaagctgccctatctccaggagctcggcgtcaccgcgctgtggctgctgccgttctacccgtcgccgggccgcgacgacggttacgacatcgccgactacggctcggtcaatcccgatttcgggacgatgaaggacttcaagcgcttcatccaggaagcgcagaagcgcggcttgcgcgtcatcaccgagctcgtcgtcaaccacacttcggaccagcacaaatggttcaagcgcgcgcggcgcagccatccgggctccagcgcgcgcaactggtacgtctggagcgacaccgaccagaagtaccagggcacgcgcatcatcttcaccgacacggagaagtcgaactggacctgggatcccgaggccggggcattctactggcaccgcttcttctcgcaccagccggacctcaatttcgacaatccgcgcgtggtcagcgccatcatccaggtgatgaagcgctggctggatgccggcgtcgacggcttccggctcgacgccattccctatctgtgcgagcgcgagggcacctcgaacgagaacctgcccgagacgcatgcgatcatcaagcggctgcgccaggagctcgacgcgtattcgaggggcaagctgctgctggccgaggccaatcagtggccggaggacgtgcaggaatatttcggccgcggcgacgagtgccacatggcctatcacttcccgctgatgccccgcatctacatggcgatcgcgcaggaggaccgcttccccatcaccgatatcctgcgccagacgccggacattccggcaagctgccaatgggcgctgttcctgcgcaaccacgacgagctgacgctggagatggtcaccgacgtcgagcgcgactatctctggaccacctacgccaacgatccacgcgcccgcatcaatgtcggcattcgccggcgcctcgcgccgctgatggacaacgaccgccgcaagatcgagctgatgaactcgctgctgctgtcgttccccggcacgccgatcatctattacggcgacgagatcggcatgggcgacaacatctatctcggcgaccgcaacggcgtgcgccccccgatgcagtggagccccgaccgcaacggcggcttctcgcgctgcgatccggcccgcctgtacgcgccgctgatcatggaccccgtctacggctatgaggccgtgaacgtggaggcgcagtcgcgcagcctgtcgtccctgctcagcgccaccaagcggctgatctcggtgcggaagtcgacgctggccttcggccgcggcaccatgacgttcatccgtcccgtcaatcgcgccgtgctcgcctacgtccggcaataccgcgacgaggtgatcctctgcgtcgccaatctgtcgcgagccgcgcaggcgaccgagctcgatctgtcgccgtggaaggaccgcattccgcaggagatgctgggccgcacccgcttcccagcgatcggcgaactgccgtacatgatcaccctggggccttacgggttctattggttccagcttcaggagcgcgacaagtccgagccggtgacgccgcgcgcggtgccggagttcgagacgctcgtggtgccggtgaactcgaactgggtttctctcgcccgcgagcgcggcgtgttcgagcgcgacgtgctgccgggattcttgtcgcgaacgaggtggtatcccgagcacaaccccaagcacatcaagaccgcgctgacctcggcggtgccgttctgcgacatcggcgataaccggccgtggatcgcgttcttcgagagcgggcaggcggacgcggccacccgctacgtgctgccgctgcagatcgagtgggtacgcttcgaccgcgaacgtttcaatccgagggcgctggccgccgtgcgccagggcgcgcgcgaaggcacgctgctcgacgtcgcgaccgaccagatcttcatcggcctgttactgcgcaacctgtcgcagaatctggtggtggaagagaacaacctgcggctggagttcaagccgaccagccgcttcgccgattacacgatcaaggagccggaacgggtccgcgcgatcgagcagtccaacagcactgcgctggtcgacaaccagtatgtcgccaagatctaccgccggctcgaaagcggcatcagcccggagatcgagatcggacactatctcaccgaggtcgcgcgcttcgccaacacgccggcgctgctcggcagcgtcgagcttgtcgaaggcaaccagcgcagcgcactcggcgtgctgcatgcttatgtcgagaaccagggcgacggttggaccgtgagcacgggctacctcgatcgctatatcgacgagcaacgggtaatgccggcgggcgagacgctccgcgagacgcaggagcaggctccctatctgcatttcgtcgcgcagattggccggaggctcgccgagttgcacgtcgctctggcagcggcagatgcagatgatcttgccccggagccgattggctccgcccagatcaaggcctgggtgtccgacctgagggcgcgtgccgagcgggttctcgagcggctggccgacagccgcgacgggcttcgggagatggaccgccccctgatcgaccggctcatcgcggcacgcgcgggcctattcgacggcctgaatgcactcttgccatccgacatcgccgggttgaacatccgtcatcatggcgacttccggctcgggcagactttgatcgtgaaggacgatatcttcatcatcgatttcgacggcgatccgcgccgaccgctggcgagcaagcggcgcaagctgcccgccgcgcgcgacgtcgccggcatgatccactcgattgacctttccgtgaacgcagcactgagccgcgcgctcaccggcgcctccgacgagcaggaccggctcgcggctgcgctcgatgaatggcgcgggcgcgccaccgcgaccttcctgtccgcctatcgcgaagccatgaccgatcgaagagtatggccggaagaccggcaatccgcggatgccctgttacgattcttcctgcttgatcaagcgttcgacgaagtcgagtacgagctgtcccatcggcctgaggggctccatgcgccgctgaccggactgcttcgcattttatccagtgccgagagcgaagcccatgcctaaactgcctgccgaggcctatgcgatcatcgagggccgccactccgatcccttccactatctcgggctgcacccggaggacggcaggagcgtggtgcgcgcatttctgcccgaggccaccaatgtcgaagcggtcggcgaacatggcgaggttgcaccgctggaccgtgtccacgattccgggctgttcatcggcgccctgccaaacggctccaagcactaccaactccgcgcaaggttcggcgacaacgtcgtcgagttcgaggatgcctaccgttttcccccgatcctgaccgacttcgacctctacctgctcggcgaaggtacccatcagcgcatctatgacaagctcggcgcccatccgatgcggctcgagggcgtcgacggcatcgggttcgtcgtgctggcgccgaatgcgcggcgcgtgtcggtggttggcgatttcaacttctgggacgggcggcgtcatccgatgcgggtgcgcggcaacggttattgggagttgttcatcccgcatgcgaagacgggcgatcactacaagttcgagatcatcggcccgcacggccacctgctgccgttgaaatccgatccgatggcctttgcgagcgaggtacggccgaagacggcttccatcgtgttcgacgaagcgcacctgcctcggccgcgcccggcgcctgacgggatcaattcattgtcggcgccgatgtcgatctacgaggtccatctcggctcttggcgacgcacgaacgacaatgaatggctgacctaccgcgagctggccgagcaactgccggcctacgcccgcgacatgggcttcactcatctcgaattcctgcccgtcagcgagcatccattcgacggctcgtggggctaccagccgaccggactctatgcgccgaccagccgcttcggcacgcccgacgacttcgcggcgctggtcgacgcctgccatcgcgaaggcatcggcgtgctgctcgactgggtgccgggccatttcccggacgatccgcacgggctcggccatttcgacggcacctcgctttatgagcatgccaacccgctccagggccgccacctcgactggggcacgctgatctacaattacgggcgcaccgaggtgacgaacttcctggtgtcgaacgccctgttctggctggagcgctatgcgatcgacggcctgcgcgtcgatgcggtggcgtccatgctctatctcgactacagccgccccccgggcgcatgggttcccaaccagtatggcggccgggagaacatcgaggccatcaacttcctgcggcgcttcaacacggaagtgttcgcacgcttcccgcaggcaacgaccgcagctgaagagtcaaccgcctggccgcaggtctcgcgcccggtcgaattcggcgggctcgggttcggctacaagtggaacatggggtggatgcacgacacgctgagctacatcagcaaggacccgatctaccgcaagcaccaccacggcgagatcctcttcggcctgcactacgcgttctcggaaaacttcatcctgccgctgtcgcatgacgaggtcgtgcacggcaagcgctcgatcctcggccgcatgcccggcgacgagtggcagcgcttcgcgaatttgcgcgcctattacagcttcatgttcggtcatcccggcaagaagctgctgttcatgggcgcggaaattgcgcagagccgggagtggaatcacgaccagtcgctcgattggcacctgctggaatacaagtaccatgcgggcatccaggcgttgatccgcgatctcaaccggctgtatcgcgctgtacccgcgctgcaccagatggattgcgaccaggccgggttcgaatggctgatcacggacgacgccagccgcaacgtgttcgcctggctgcgcaagggattcgacgagcacgcgcgctgcctcgtgatcctcaacttctcgccgaacgtctaccagaattatcgcgtgcgcgtgcccttcggcggaaaatggaaggaagtgctcaactcggattctgcccattatggcggcagcaacgtcgggaatatcggcgaggttcacgccgaaggcggtgagcttcgcctcaccatcccgccgctcgctgcgatcttcctcgttccggaaggctgagtgatgcgcctgaccgctggatcgcccgcacgcctcggcgcaagctgggacggacgcggcaccaatttcgcgctgttctccgcgaacgcgcagaaggtcgagctctgcctgttcgactcacaaggccgccgcgaactcgagcgcatcgaattgccggagaagaccgaggacgtctggcacggctatctcaacgatgtctcgcccggccagctctatggctatcgcgtgcacggcccctacgaacccgagcacggccatcgtttcaacgccaacaagctgctgctcgacccctatgccaagcgcctagccgggcgcctggtctggagcgatgcgcacttcgcctaccgcaccggaagcccgcgcgaggacctgtctttcgaccggcgcgacaatgcgcgcggcatgccgaaggccgtcgtcgtcgacgagaccttcaactggggccggcgcgagatccgtcccaacattccctgggaagacaccgtcatctacgaggcccacgtcaagggcctgacgcagaagcgggacgacgtgccgccaaacttgcgcgggacctatggcggcctgtcctcgccggcgatgatcgagcacctgaagaggctcggcgttaccacggtcgaactgctgccggtccacagcttcgtcgacgaccgcatcctcgtggagaagaagctcgccaattattggggctacaacacgctgtccttcttcgcgccggaaccgcgctacgcccaggacaacgcgctcgattccttccgcaccacggtggcgcggctgcacgatgccggcatcgaggtgatgctcgacgtggtctacaaccacaccgctgagggcaatcacctcggcccaacgctgtgctatcgcggcatcgacaattcctcctattactggctgagccgcgagaacccgcgctactacgacgacttcaccggctgcggctcgtcggtgaacctcactcatccgcgcgtgctgcagatggtaatggattccttgcgctactgggtcgaagtctgccatgtcgacggcttccgtttcgacctcgccaccacgctcgcgcgtgggccgaacggttatgaccgcggcagctcgttcctgaccgcgatccggcaggacccggtcctggcgaccgtcaagctcgtcgccgagccgtgggaccttggcttgggcggctaccaggtcggcgccttcccatcgcaatggtcggaatggaacgaccgctatcgcagcgccatgcgtcgctactggagcggcgaaggcagcctgatcggcgatatctccagccgcatgacggcgtcgtcagatctgttcaaccacgacggacggcggccgcgcgccagtatcaaccacatcacggtgcacgacggcttcacgctcgccgacctcttcagctacaacgagaagcacaacgaggccaatggcgaggacaatcgcgacggctccaacgacaaccacagcaacaattgcggtgtcgagggcccgaccgacgatccgaacatcatcagcctgcgccgccagctgcgcaagaacgtgctggcctgcctgatgctggcgcagggcgttccgctgatcctcgccggcgacgaagtcggcaattcgcagtccggcaacaacaacgcctattgccaggacaacgaagtcggctgggtcggctgggacaatctcggcaaggatggcgacgacatggtcgatttcgtcgcccatctcgccgacatccgccggcggttctcgcagctgcgcagccatcgctggctcgatggccggcccaaggacggcgtctcctacggtgcgctgtggttgacgcccgccggggacgagatgaccgagagcgactggaatttcccggaagggcggttcctgtcctatgtgatgggtccgatggaaccgggcagtgccgcgatctttatcgttttgaacgccgccccggaagagatcgcattcaaactgcccaaaatgaccgagtacaggagctggcagcagattctcaacacgaccgctgccaagctgaacacgatcgacttcctgcccgggagcgacagcaaggcgccgccgcgctccgtgctcgccttcgcgggtgcaccatgaggccatccttcggggcgaggccgacgaaagaaggcgtgtcgttccggctgtgggcgcccggagcgcgccgtgtcgacctcctgctcgagcgaaggcatgcgatgcagcgccggcaggatggctggtacgtcgccgacatcgccgggctcgccgccggcagtcgctaccagttcaggatcgacgacgagatcgatgtgcccgatcccgcttcggccttccagccggaggacgtgttcggcccgagcgaggtgatagatcacgatgtcttcgcatggcgggcgcgggaatggcgcggccgtccctgggaagagacggtgctgatcgagacccacgtcggcaccttcacccaggaaggcacctatcgcgcgatgatggacaagctcgatcatctcgcagcgacaggcattacggcgctggaattgatgccgctggcggatttcgcaggacgccgtggctggggctatgacggcgtgctgtggtatgcgcccgacagcgcctatggccggcccgaagacctgaagacgctgatcgacgaagcgcatttgcgcgggctgatggtgtttctcgacgtggtctacaatcattttggacctgaggggaattacctcggccgctatgcgcctgccttcttcaccgaggcgcacacgccgtggggcagcgcgatcgactatcgcgtgccgcaggcgcgcgcctttgccgtcgagaacgcattgtcctggctcaccgactaccgcttcgacggcctgaggttggatgccgccaatcacatcctggcaatccccggcgagcagtccatgctgcaggacctcagcgtcgccgccggcgagctcgccaaggcgaccgggcgccacatccatctcgtgctggagaacggcgacaaccgcgcgagcctgctcgatgccgcgcaggagccgccgaacggcaagtaccgtggacagtggaacgacgactatcatcacgtctggcacgtcatgcttacgggcgagcatgccggctattatggcgactaccagacgccacgcatggacctcgcgcgcgcactcgcctccggcttcgtctaccagggcgagatttcggaattctggggcaagaagccgcgcggcgagccgagcggcacgctgcccccggcgaccttcgtcaacttcctgcagaaccacgaccagatcggcaaccgtccgcttggcgagcggctggagagcctggcaccgccacaacagatcgaggccgcgctcgcggtaacgctgctcgcaccgatggtgccgatgctgtttcagggggaggaatggggctccaaggtgcccttcccgttcttctgcgatttccagggcggattggcggatgccgtgcgcaggggccgcaggcaggaatatgcctgggcttacgacaagtacggcgacgacgtgcctgatccgctcgacccggccacgctgcaatcggccgtgctcgactggaccggccacacgccggagcaaaacgcgcggctcgccctggtgcgggagctgctcgcactgcgtcgcaaggcgatcatgccgcggctgaacggcgcaagcttcggcggcgcagaggcggcggacaacggcttgctcacggcgcattggctgatgggcgacggcgcggctctgcgcttgactgcgaatctctcgaacaaggacatcgcgcattccagcgatagtgctggtacgccgctctggggcggcgcgaccggcgaccggcttccgccctggtcggtggtctggcagctcggagcttgatgatgccttccgccgttcctctcgcgacctaccggcttcagctcaccgcggatttcgactttgacaaggctgccgcggtcgtgccctatctcaaggcgctggggatcacgcatctctatgcctcgccggtgatgaaggcccgcaagggatcgacccacggctatgacacggtcgatcatggccagttgaatcccgagctcggcggcgatgctggcttcgcgcgcctgagcgagacgctcaaggcacatgatctcgggcttatcatcgatttcgtgcccaaccatgtcggcgtgcattttgccgacaatccctggtggctcgacgtgctggaatggggccaggcctcgccgcacgccgtctccttcgacatcgactgggatcaactggcctaccgcgcacgaggcggcgtgctgctgcccatcctcggctcgtcctatggcgaagcgctggagcgcggcgacatcgagctgcgctacgccccggaggaaggaagcttctccgcctggtatttcgagcatcgcctgcccatcgctcccgagcgctatggcgaggtgttgcggatgatcgtcaaggaggcggacgcggcggaaacgcagccgggcgagcgcctgctcgcgctcgctgcgcgctacaccggattgcgccggcccaatcgcaaggaagctcccgccttcaaggccgagctcaaggagatcgcgggcgccgccgatatcatcgcgcgaggccttgccgcctacggggccggcaaggaccgcacggcccagacgctcgcgctgcatcacctgctcgagcgccagcactacaagctcgggcactggcggcttgcctcaagcgacatcaattatcgccgcttcttcgatgtcaacggactcgcaggcctacgcgtcgaggatcccggtacgttcgctgccacccaccggctggtgaagcagctcgttgcagagggcaagctgcacggcatccggctcgaccacatcgacggcctgcgtgatcccgcgcaatattgccagcggctgcgccggctcgtgcgcgatgctcaaggcaacacaaagcccttctataccgtgatcgagaaaatcctgtgcgagcacgagcgcctgccacagttcgccggggtccagggcaccaccggctatgagtggatgaacgtcgtcacccacgtgctgatcgatccgaaaggactggaagcgctggacgagacctggcggcagatcagcaaccggccgccgcagcttgcaccttacgtcaaggaggcgaagcggcgggtgctggagaagctgcttgccagcgagttcaccgtgctgacgggcctgctcgcacgcattgccaacggacattattcgacacgggacttttcagccgacagcctgcgtcaggcgctcgagctctatgtgctgcatttcccggtctatcgcacctacctgacacacagcggcccgactgcccccgaccgcaagctgatcgaagacaccatcgagcgcgcccgccgagagtggtttgccgccgacgaaggcatcttcgatttcctgcgcgatgccctcaccatggacctgctgaagcccggccgtcccccgcacagtgccccgcgcgtgcgccgcttcgcactgaaggtgcagcaattcaccgggccgatgatggcgaagtcgctggaggacaccgcgttctatcagtttcaccggctgctcgcgctgaacgaggtcggcggcgatcctgcgagcacaggcctcaccattcccgccttccaccaggccatgcaagcccgcgccaaggaatggccgctaggcatgacggcgaccgccacccacgacaccaagcgcggcgaggatgcccgcacgcgcatcgcggcgctcagcgagattccgggcgaatggaccagcgcggtggcgcgctggaaggtgctgaacgcggcgcatctcacaacgtacggcaatttccgcgcgccctcggcgacgttcgaatacatgctctatcaaaccctgctcggcgccttgccgctcggggaggaagtcgatgccgccttcgtcgagcgcatccaggcctatgcgctgaaggccgcgcgcgagggcaaggaggagacgagctggctcaacccgcatgaagcttatgagaacggcatccgcgacttcatcggcaagatcctcgatcctgcccagtccgcagaattcctcgaagcattgcagaggctggcccgccgggtcgcactgcttggcacgctgaactcgcttagccagctcacgctcaaggcgactctgccgggcgtgcccgacttctatcagggtaccgaattctgggacctgtcgctggtcgatcccgacaaccgccgcccggtcgacttcgccgcccgccatgcggcactgaaatcattggaagctccggactggaacgcgctaagcaagagctcgccggacggccggctgaagctggcctggacgcgccatcttctcgcgctgcgcaaccgccttcccgatatcttcgtcgggggaagctatcggccgctcgaagtgcgcggcgcgcacgccaaccacgtcattgccttcgcccgcggccatggacgtgcggcagccatcgtcgtggtcgggcgtcattttgcgccgttcacgcaaggaggccgggagtggccttcactcgaaggtctcgatgcgactctcgatatcagcggctatgccgcgccaggtctcgcaggcaacgagctgccgctcgccccagcccttcgcgatcttcccgtggccgtgatcgaggcgcgcagcacgagtgcagcgaagccgacacggcagcgcgcgcacccctgaggttacttgcccccgtccttggtgagcagcaactggccgcgcttcttgatcgtggcctgcgccatctcggcgaagcgctgcaacagccagggcagcaccacctcgacccggacctgatcgtcgccgacgtcgacctgcccgctcgcgatctggcccagcgcacggatgcggaaattcatgctgtcgccgctccagcgctcctcctcgacctgcatcacaggaatgctcgcagcggcgcggccgagcccggtcttgagccggcgcgcagcctcctcgcggccgagacgatgcggaatggagacgataagtggtgctgacatgaccccgcctctcgtagctgccttcacatagtcatgtcgggttgaccagcaaaggttccatgcaagttgatgatccggccgtgtttcaacggcggaactatacaatctgcggcaagttgcccccgcataacgggacaggttgcaacgaccctttttaccaagggctggaggagatttgcatgtctatcggcacgatcattctgatcattctgatcatcgccctgctcggcggcttcagcggcatcggcggcgggccgttctacggcaccggttattacggcggcggcggcctcgggctcgtcatcgtcatcctcctgatcctgatcctgatgggacggatctagtcagagacggcaatccgggcgcgcgcaagcgcgaacccggcttttcgtctcacaagctccggattccgggcctgcgctccgcgcagcccggaatgacttttttggaagctcctatttcaccttgccggccagcttcttgatcgccgccttgatcgacgtcgccgcgtcgtcataaccttcccatgccttcgatcgcgccagcagaccaggcactgtgcgcagcgtatagcgcttagggtcgagatcgctcttcacttgcgcccaggtgaccggcatcgagaccgtcgcccccgcgcgcgcacgcggcgacagcggggccaccgccgtcgacatgcgatcgttgcgcaggtaatccaggaagatctttcccttgcgcagcttcttcgacatgttgagcagatagcgttccggatcgtcgtcggccatccactggcagacgccttgtgcaaacgccttggcctctttccaactcaccttgtcgcgtgcgccgtaacgcagaggcaccacgacgtggaggcccttgccgcctgtggtcttgcagaagctgtccatgccgatatcgcttaatcgctgccgcatctccttggcggcctcgacgacgtcggcgaactcgacgtccggtgccggatcgagatcgaacaccagccggccgggcgtatcgtaggcgtaaggtgcgcaattccaaggatgcagctcgcccccgccgatctgcgccacggcggcaagcccttcgattcggtcgatctgcaagtatggtttgcgatcgccggagactcgcgcgagttcgagaaggttcgacgtgccctgcatggcgtggcgttggaagaagcattcgcccttgatgccatcaggcgctcggatcagcgagcacggccggcccttgaggtgcacgatcatccattcgccgacggcttcgagatagcgggcaagatccagcttggtgacgggagtgccgtcaccatcatctggccagagcggcttgtccggcttcgagatgatgacgcccatgacctcggcattcggggcggcctgcttcggctgccggcctgttctcgcgcgcgccggcttcttggcccggggctcggccaactcggtatcgacaggcgtctcggcctcgacctcctcggccggcttgtcctgccgcagtcccttgaacgcggcctggcgaatattgccgtcggcggtgaagccggcgaattcgatctccgcgaccagctccggcttcagccagtgcacctcgcgcgtcttcttcggcgcattcttgccgccgaacgggctttccttggcttccatcgccttcagggcaggcatgatgcgcttgaccttgtccgcaccgaagccggtgccgaccatgccgacgaaggcgagatgatcgccgcgctgaacgcccgccatcagcgagcggaatttgccgttggtggtcttgtagccgccgatcaccacctcgtggccggcgcgacatttcgacttgacccagctctcggtgcggcccgagcgatacggcgcgttcagcttcttggacaccacgccttcgagctcgagcttgcaggccgatcgcagcacggcatcgcctccgctctcgaaatgctcgacatagcggatctggcccaatttccgcttgcgtgactcaagcagctccttgagccgcaccttgcgttcgccgagcggaagacgacggtaatcctcgccctcggcgaacaggaggtcgaacgcaaagaagatcagctcgtcggtcttgccatcggacagcgcagcctgaagcgaggagaagttcggcgcgccgttatgatcaagcgcgacgatctcgccgtcgatcatcaggtccggcagcgtggatgcttccttggcaatggagccgaacttggcggtccagtcgaggcccttgcgtgtcttcagggtcgcctcgccgtcctcgacccgaagctgcacccggtatccgtcgaacttgatctcatggcaccagccctcgtcggccggcggccgctcgaccagcgtgcagagctgcggcgcaacgaagtccggcatcgcagagacctttttggccttggtcgcggtcgtggcgctcgtcttggccgtcttgccgcgtttcaacgcggtgcgcggcgccggcttcaccgtgcgccctttcgtctcctcggcacggttggactgccagaccgcgtcggccttgcccttagtgcccttcgccagcatgaacggcttcggcgcgcggcccctcccctccgcaatctgctccatggcgcggccggaggcgaccgacttgtcctgttcgagaatgtcgttgtcggcgccttcgcgggcgtatccgtcgcgatgcttgatcaggagccagttggtgcgcttctcgccgccccggttgcgcatgcgcaccagcacccagcttccatgcagcttctcgccgtgcaaggtgaacttcagatcgcccttcttgaagccggcttcgggatcgtccgcttcccaggtgccgcgatcccacagcatcaccgtgccgccgccatattgcccttccggaatcgtgccttcgaaatcgccataatcgagcggatgatcctcgacctcgactgcaaggcgcttgtcgtgcggatcgagcgatggccccttcgtcacggcccaggacttgaagaccccgtcgaactcgagcctgagatcgtagtgcagccgggtcgcatcgtgcttctggatcacgaagcgccgctgcttcgagggcgccaccgcggtcttgcccgacggctcgggcgtcttctcgaaatcacgtttctgccggtaagtggagagtttctgcagcacgacctgtcccgcttctctttcggggttcaagcctatcacggccagactcccgcccggaaccaaaaccctgtgggacggttggggttccaaaacgccttgaaaacgctggagaatggaatggccccgcgcgcctattggaagggaacgttgaagctgtcgctggtcagctgccccgtcgtgctctatcccgcgaccacggcggcggagaagacgcggtttcacctgatcaaccgcgagacgggcaaccggctcaagcagcagatgatcgattccgagaccggcgacatcgtcgagagcgaccagaagggccgcggctacgagctccgcaagggcaagtatgtcgagatcgagccggaagaactcgaggcggtccagatcgagagcaatcacaccatcgacatcgagagctttgtgccgagcgaggaggtcgatcagcgcttcctcaaccatccctactacatcgctcccgacggcaaggccgcggtcgatgccttcgccgtcatccgcgacgccatgaaagaccaggatcgcgtggcgcttgcgaagatcgtgttgaccaaccgcgagcacgtcatggcgatcgagccgcgcggcaagggcctgctcggcaccacgctgcgcttcccttacgagctgcgcgacgaggaccagttcttcgatgacatcaagagcccgaagataaccaaggacatggtcgaactggccggtcacatcctgcaatccaaggcggcgcatttcgaccccagcaaattcaaggacgagtacgagaatgcgctgaaggcactggtgaagcgcaaggccagcggcaagacgatcgagctgccggagcccgaggagcgaccgagcaatgtcatcaacctgatggacgcgctgaagcagagcctgaaaggacgcggcggagggaagaaggcggcgaagtcgcatgcacgccgggcgaccgggcgccggaaaactgcgaagaaggcgcaccggtctacggcgcggcatcgcaaggcgggttagaccagcaggctcgccgtcattccggggcgatgcgaagcgtcgagcccggaatccatgccgagcgcgacgggcggagaaatggattccgggctcgcgctgacgcgcgccacgccgcggaatgacagcgggactcaatcccccgccttcagccggtacccgatccccgtctcggtcagcacgtattgcggcctctccggatcggcctcgatcttctggcgcagctggcggacatagacgcgcaagtactgcgcgtccgtcagctcgtcccagagctccctgagcaggaagcggtgggtgagcaccttgccggcatgctgcaccagcacgcgcaacaggtcgtattccttcggcgagagcttcacgtcgcgatccccgaccttgacgatacggcggacgagatcgaccgacagatcgccggcgcgaaacaccgggcgctcgcccttgacctgaagttgatggcgcagcgcagcgcgcaggcgcgccagcagctcctccatgccgaacggcttggtgagatagtcgtctgcgccgagatcgagcgcctggaccttcccggcttcgtcgccgcggctcgacagcaccacgatcggtacgccttcgttgcgggtgcggatggtgcgaagcagctcatgtccctgaacgtcgggcaggccgagatcgaggatgatcagtgccggctcttcggccagcttctccagcgcggccttgccgttcgacgcctcgaggatctcgtatccttgcgtcgtcagccccatccgcagcaatttgcggatcggcggctcgtcgtcgatgaccaggaccttgatcggagcagcgctcatgcggcggtatccaatgcgtggctttctgctggaacgggcaggcgaatggtgaggaccgcgccgctcctcccgctgcgattggccgcggagatcgtcccgcccatcgcctcgacgaagccgcgggagatggcgagtccgagcccggtgccggggcggacgtgatcgcccttctgcacgcggtagaacttgtcgaacacgttctcgagttcgtcaggcggaatgccggctccctcgtcggcgatctcgagcacgacatgggcgcggtcgcgccggccgcggatcgaaatcgtggtctcgggcggcgaatatttggcggcattgtcgagcagattgaacagcacctgctcgaacagcacggcatcgagctggagcatcggcagatcggcggccagcgccagctcgaccttgtggcggttgagaatcttgctggcgcgccgcagcgcactgccgacgatctcgctgagatcgtgcagcgccgcgttgggcacgattgcgccggattcgagcttggtcatgtccagcagattggcgatgaaacggttgagccgctcggattcgtcgatcacggtggcgagcaggtcgcgcttctcggtgtcggagagcgcgccggcgagatcgcgcatggtggaggccgcgcccagcaccgaggcgagcggcgtcttcaggtcgtgcgagatcgaggtcaacagtgccgaccgcagccgctcggattccacggtgcgcttgacgcgatccatgtcctcgaccagcagcacgcgctcgatcgcgagagcgccctgatcgaccagcgcatcgagcagccggcgctggtccggcgtcagcagcgggccgctgcggtcgtcgtcgatgccggtcaccccgatcgggccgcgcccggtgcgcatcggcaggaacagccgtcttgcgcccggcagcgtgtccgagccccgaccggcggggcgatcgttgctccaggcccagttggccgcggcgagatcggcctgatcgagctcgtcttcgggcggatagcctgatttcaccgtgagcaggccttcgtccggcagcagcaggaccacgcggaccttcagcatcaacgcgatctggtaggcggttgcccacagcacgtcgtcgagcgtggccgtgccggcgagcttgcggctgaaggcatggagctgctcggtcatccggatccggccgatcgcggtatcggcctggatgcgcacgcgcgcggcgacgttggagacgattatcgccacgcccaggaacagcaggaaggcggcgacattggtcgggtcggtgatcgtgaaggtgtagagcggcggcaggaaaaagaaattgtaggacagcgaggcggcgaccgtcgcaagcagcgaaggccacagcccgtagcggaccgcaaccgtgaccacagccgtcagcagcacgaggtcgacgttctcgatgccgaagcgcggctggagcagtttcgctgcgccgagaccgatcagcacgatgccgagcgccttcaggtaaggcagcggatcgaagggctccgatcgtgcagcggtctgcacctccgtcttgggcggcgcttcgcccggcagttcgtcgcccgcgatgacatggaccgtgatgttgccggcacggcgcaccaaatcgtgcaccacggagccgcgagtcatctcgaaccagcgcgagcggctcgacttgccgatcacgatctgggtgacgttgttgccttgcgcgaaactgacgacgtcgtcggcgatgcggcgcccgaccgcgggaatcgtcagcgcttcgccaccgagcgattccgcgaggcgcagcgtatcggccagccggtcgcgctcctcgtcggacaattgcagggatcgccgcgtctcgatcgacaccgcggtgaacggcgcatgcagccggtccgccagccgcttcgtgtagcgcacgaggccggccgcgcgtgcatcctcgctgacgcagacgaggatgcgctcgcccgcggcccagggcccggcaattgcattcgcctgcatgtggttgagaagctgctcatcgacccgttcggcggtgcgccgcagtgcgagctcgcggagcgcggtgagattgcccggcgagaaataatgctccagcgcccgctcggcctgcttgggcacatagaccttgccctccctcaaccgctggatcaggtcgtcgggagtcaggtcgatcagctcgatcgcatcggcgcggtcgaacacggagtcgggtaccgtctcgcggacccggacgtgggtgatctgggcaacgacgtcgttcaggctctcgatgtgctggatgttgacggcggtgtagacgtcgatgccgtgcgacagcagttcctcgacatcgagatagcgcttgggatggcggcaaaggggcgcgttggtgtgggcgagctcgtcgaccagggcgatctgcggccgccgcgcgatcacggcgtcgaggtccatctcctcgacgatctggccgcggtaatccagccgcttgcgcggcaccgcttccaggccgcgcaccagcgcctcggtctcggcgcggccgtgggtctcgacaaatccgatcaccacgtcgacgccggcccttcgcttggcatgggcgctctgcagcatctcgtaagtcttgccgacgccaggggcggcgccgacgaagatcttcagcttgccgctcgcgccctcctcccggcgcgcggcttccagcagcgcctcgggcgacggacgttgttcgggatcgcggcgctctcggaccatcatgcgaatatattcatgcgcgcgccgcgagcctagacggctacttcggggccatgcgatcgagcgcgaggttcagcgccagaacgttgaccctgggttcaccgagaaggccgagcagacggccttgggtattggcggcaacgagctgcttgacctgatcctcaggcagattccgcgccttcgccacgcgcggcacctggaattgcgccgcctccggcgagatgtccgggtcgaggccgctggccgaggtcgtcaccaggtcgaccggcacggccgcgttcggattctcgcccctgagcttgtccacatcctgcttcagccggtcggccagcgccttgctggtcgggccgaggttcgagccgcccgaactgccggcgttgtagggcgccggcaccgtctttgccgagtcattggggtccggcgccagcgtcgccgaggggcggccatggaagtattttccgtccctgaactcctgcccgatcagggcggagccgatcaccttgccgtccttctcgatcaggctgccctgcgcctgtacgggaaacaacgtgccggcgatggcggtcatcgcgagcggataggcaaggcccgtgatggcggtgagcgccagcaacagggcgatggcggggcggatttctctgaacatgttgggtctccaattctcgtaccccggtcattccgggatggtccgaaggaccagacccggaatctcgagattccgggttcgatgctacgcatcgccccggaatgacgaccgagagatgcggtttcgcttcgttcgagacaacggactcaagccaagtgcaaggcggtcacgacaacgtcgatcgccttgatgccgatgaagggaatgacgatgccgccaagcccatagatcaagaggttacggcggagcagcgcaccggctccgaccgcacgataggcaacgcctttcagggcgagcgggatcagcgcgacgataacgagcgcattgaagatgatcgccgacaggatggcactccgcgggctcgacaggttcatgacgttgagcacgttcagctgcgggtagaacgccaggaacatcgccgggatgatcgcaaaatacttcgcgacgtcgttggcgatcgagaacgtcgtcagcgcaccccgggtcatcaggagctgcttgccgatctcgaccacctcgatcagcttggtcgggttggagtcgaggtcgaccatgttgccggcctcgcgggcggcttgcgtgccggtattcatggcgacaccgacgtcggcctgggcgagcgccggcgcgtcattggtaccgtcgccgcacatggcgaccagcttgcccttggcctgctcgtcgcggatcagcctgagcttgtcctcgggagtcgcctgcgccagaaaatcgtcgacgccggcttccgcggcgatggcggcagccgtcatcggattgtcgccggtgatcatgatggtgcggatgcccatgcggcgcagctccgcgaaacgctcgcgaatacctcccttgacgatgtccttgagctggacgatcccgagcagcctgccgtccctggcgaccgccagcggcgtgccgccggacttcgacacgtcatcggcaatggcctggatctcgcggccgagctcggagagcgcggcaggctgcaccacccgcgccgtgttgcccgacgcgaccgcggtcggggcgccgccgccgacatagttgaggatggcatcgatggcgcccttgcgcactgatgagccggcagcgtcgacgccgctcatgcgggtctgcgccgtgaacggcacgaagttcgcgcccagctcggtcatgtcgcggccgcggatgccgtatttctccttggccagtacgacgatggagcggccttccggcgtctcgtcggcgagcgaagcgagctgggcggcgtccgccagctcctgctcggtgacgccacggacgggacggaacgctgtggcctgccggttgccgagcgtgatggtgccggtcttgtcgagcagcagcgtgtcgacatcgccggcggcttcgaccgcgcggccggacatcgccagcacgttgaagcgcaccaggcggtccatgccggcgatgccgatcgcggacaacagcgcgccgatggtggtcggtatcagcgtcacgaacagcgccaccagcacgatgaccgagatcgagccgcccgcataggcggcatagctcgggatcgtcaccgtcgcgaacacgaagacgatggtgaggccggccagcaggatgttgagcgcgatctcgttcggcgtcttctggcgttctgccccctcgaccagtttgatcatgcggtcgatgaaggtcgagccctgcgcggcggtaatgcgcactcggatccagtcggacagcacctgggtgccgcctgtcaccgccgaacggtcgccgccggactcgcggatcacgggcgcggactcaccggtaatggcggcctcgttgacggaggcgacaccctcgatcacttcgccgtcggaagggattgtatcgccggcctcgaccagcaccacgtcgccgaccttcagactggtgcctgaaaccagctcgtagtctcggcctgcaccgctcaggagcttggcctggctctcggtgcgggtcttgcgcagcgtctcggcctgcgccttgccgcggccttccgccaccgcttcggcgaaattggcgaacagcaccgtgaaccagagccacaggatgatctggaaggtgaagccgaggcccgcgccgcccgtagcgacatcgcgcaggaagatcaccgtggtgagcgcggccacgacctcgaccacgaacatgaccgggttcttcaccatccagcgcggatcgagcttggtgaaggacgccttgaccgcgggcatcacgatcccgggatcgagcattgccgacatcggcgcgcgcttttgcaattttgccatattcatggaggtcactccagacatcagaagacgttgcccgcggtcatcgcaagatgctcgacgatgggaccgagcgcgagcgccgggaagaaggtcaggccgcccatgatcaggatgaggccggtcacgaggccgatgaacaggccgccggtggtcgggaacgtgcccatcgagggcgggatcgacttcttggccgcgagcgaacctgcgatcgccatggccggaacgatcatgaagaagcggccgacgaacatcgcgctggcgagcgtgagattgtagaagaaggtgttgccggtgaggcccgcgaaggccgagccgttgttgcccgtccccgagctgaaggcgtacagcacttcggtgaagccgtgcggtccggcgttcgccatggaggcgactgccgccggatagaccacgccgatggcggtccaaccgagaatcatcaagggcaggacgagaatggcgagcatcgccatcttgacctcgcgcgcctcgattttcttgccgacatattccggggtgcgtccgaccatcaggcccgcgacgaagatggcgaggatgacgaacagcagcatgccgtacatgccggcgccgacgccgccgacgatgatctctccgagctgcatgttgatcagcgggatcatgcccccgagcgccgtgaagctgtcatgcatggcgttgacggcaccgcaggacgcggccgtggtgatcaccgcgaacagcgaggacgcgacgatgccgaagcgaacctccttgccttccatgtttccaccggtcaggcccagggcatgcagggtcgaggtgccgttggcctccgcccaatagcaggcggcgacgccggcaacgaacagcacgcccatcaccgccaggatcgcccagccctggcgctggttgccgaccatccggccgaatacgttggtcagcgcggcgccgagcacgaagatcgacagcatctgcacgaagttggacagcgcggtcgggttttcgaaggggtgcgacgcgttcgcgttgaagaatccgccgccgttggtgccgaacatcttgatggcgacctgcgaggcgaccgggccgaccgcgatggtctgcttggcgccttcgagggtggtagcctcgacgtaaggcccaagcgtctgcggcatgccctgccagaccaggaagagcgtgagcacgacgcagatgggcagcagaacatagagcgtgcagcgggtcacatcgacccagaaattgcccacggtgcgcatcgacgcacgcgagaagccgcggatcagcgcaatcgccagaacagtcccggttgccgccgacaggaagttctgatgtgtcaggccgagcatctgggtcagataggaaagcgtgctctcgccgccgtagttctgccagttggtgttggtgatgaaggagaccgcggtgttgaacgagagatcttcggcgaccgcggactgcccggccggattgaagggcaacatggcctggagccgcatcaggccgtagatgatgaggaagccgccgacatggaacaacagcatggcgaccgtgtaggtcagccagtgctgctcccgcttctcgtcgaccccggcgatccaatagatgcccacctcgatcgggcgcagggcgggcgacaggaacgtgtgctcgccgttgaacactcgcgtcatgtaccagccgagcggcttggtcagcgcgacgacaatcgcacagtaaagaatgatctggagccaaccgatgacagtcatggcattaacccttcaggcttcgggtccggcggcgcaagagcggcaggagcagcgcaagcaggcccgcgacgagcgcggcgtcggccagcagcaattcgacgatcagcagcacggcctcagaaccgctcgggccgcagcaacgcgtaggtgagatagatcaggaggccgaacgaaacggcgccggcgagcgcataatcgaagatcatggtcccgctccgtcacaaccgttcgcaggcgtaggtgtagccgatcgcgagggcgaagaaggtgacggcgagcaccagcatcagaaagtccatcatggcgatactcctcgttgcgccctcattgtcggggcgaccgctttcccgggattccggtgagcgcacggatcaagggtgtacttccacgacaccagccggcgctcttgaccctgctgaggtgccaccactggcataggttttcgagaagatcgctggggcgaagttataggaatctcataaaggcaggtggagcgatctggcgcagtttcacggaaccgtgtagatcgctttcatgagcactggcagcgtcaacgtcgtcaaccatcccctggtccagcacaagctctccctgatgcgggagaaggaccgctcgaccaagagctttcgcgagatcctgaacgagatcgggatgctgctcggctacgaggtgacgcgcgacctgccgctggagctggtggacatcgagacgccgatcgcgccgatgcaggcacccaagatcgccggcaagaaactcacgctggcgccgatcctgcgcgcgggcgtcggcttcctcgatggcatgctcgccttgatgccgtcggcgcgcgtcgcccatatcgggctctaccgcgaccccgagacgttgcaggccgtggaatattacttcaaggccccgcaggacctgtccgaccgcaccgtcatcctgatggacccgatgctggcgaccggcaactcggcctgcgccggcgcgtccctgctcaaggcgcgcggcgcccgcgacatccgcttcgtctgcctgctcgccgcccctgaaggcatcgcccaattccagagcgagcatcccgacgtgccgatctggaccgccgcgatcgacgaacggctcaacgaccacggctacatcgtgccgggcctgggcgatgccggtgaccggatgttcggcaccaagtagacaggtttgcgcggtcgggttagttcggtggcatgagcgccaacgacttttcactgcaatcgctgattcggatcgagaccgccgccgatcctgccttcgtattcgatgctacagccgtctcgcgcgcggagttctcggccaaggtcgaacagaccgccgcctggcttgcggcgcaaggcatcggcaagggcgacgtcgtggcggtctggctggttaaccgggccgaatggctggcgctgctgttcgccgcggcacggctcggggccatcgtcgcggccgtcaatacgcgctaccgcagcgcggaggtcgcgcatctgctcaagctgtccggcgccaggctgatggtggtcgaggccaatttccgctcgatcgactttgccgccattctcgccggcatcgccaagaacgaggtgccggcgctgcaaaagctggctgtggttggtgcggatgcgatcccggcgcattggcccttcgtgtgtttcgatgcctttgaccggccttatccaccagccccgccggctcaggacgacatcgacctgcccgtgctgctctacacgacgtcgggcacgaccaaggggccgaagctcgtcgcgcattcgcagcgcacgctggcgacccacgccgtctccgtcgcccgcgcactccagctcaatccgcagcgccattcgctgctggccatgctgccgttctgcggcacattcggcatgacgagcctgctcggcttcgtcgcagccggtgcgaccgtccacgcgctcgacgccttcgaggcggcgccggccctggcgattctccgcgagcacaggatcacgcattccttcggctccgacgagatgtttcggcgcatccttgcgcacaccgatgcgccacgcccctttccatatatcgagctctgcggttttgccgcgttccagcccggctggcgcgaactggcggcagaagctgaagcccgcggcttgccgcttcacggcctgtacggttcgagcgaggtacaggcgctgttctccatcgcccgcgctagcgatgcgttcgcggatcgcatcgagggtggcggctggccgatgtcgccggatgcgaaggtgcgcgtgcgcgacacggacaccggcgagcttgcggccagcggcgtctccggcgaaatcgaaatcagcgcgccgtcacgcttcctcggctatttcaacaaccccgaagcaacgcgcgaggcgatcaccgccgacgggttcttccgcaccggcgatatcggccacctgcgcggcgatggctcgttcgtctacgagacgcgcgccggtgatgcgatgcggctcggcggcttcctcgtcgcgcccggcgaaatcgaggacgaactcaaatcctgtgccggggtcgccgacgcccagatcgtcgcagtcgatctcaaagggcaggcgcgctgcgttgcgttcgtgatcccggcgaaggagccgccaatgcaggagatgctggtcgcgcacctgcgcgagcggctcgccggctacaaggtcccggcacgcatctatgtcgtggacgcctttcctgtcacggacagcgccaacggagtcaagatccagcgcgccaggctccgtgccatggcgatagagcggatcgccgccgaataggcgccacattcggattgcgccacaagactcgttcagtacgacttggcgagccccagcaccttttccgcgatgaagctgagcgcgagctgcgggctgaccggcgcgatgcgcgggatcatgacttcgcgcaaatagcgctcgacgtgaaactccttggcgtagccgaatccgccatgggtcatcaccgcctgctcgcaggcggagaagccggcttcgccagccagatatttcgcggcattggcggcagcgccgcacggcatgcccttgtcgtattgccaggccgccgacatcaccatcagccaggcggcctccagctcgacccagttgaccgctagcggatgctggatgccctggttcttgccgatcggacgattgaacacgacgcgagtcttcgcgtattcggtcgcgcgcgacagcgcgagcttgccgagaccgaccgcctccgcggcgatcaggatgcgctcggggttcatgccttcgaggatgtactcgaagcccttgccctcctcgccgatccgatcctccatcgggatctcgaaatcctcgaagaacagctcgttggaatcgacgatcttgcggcccatcttctcgatctcgtggaccttgatcctgttgcggtcgaaatcggtgtagaacaggctgaggccgtgggtcggcgagcgcacctcttccagcggcgtggtgcgcgccagcagcaggatcttgtgcgcgacctgcgccgtcgagatccagaccttctggccgttgacgatgtagcggtcgttcttggcgaccgcgcgcgtcttgagctgcgtggtgttcaggccggtgttgggctcggtgaccgcaaagcacgccttttcgcggccctcgaccatcggcggcagcatgcgcctgcgctgctcctcggtgccgaacaggaccaccggattgagcccgaacacgttgatgtgcaccgcggaggcgccggacatgccggcaccggactccgcgatggtgcgcatcatgatcgcggcttccgtaatgccgagacccgagccgccatattcctccggcacgcagatgccgagccagccggcgtcagccagcgccttgtggaagtcgtgcgggaaaccgccgtcgtgatccttcttcagccagtaggcatcgggaaagccttcgcagatcttggcgatggcgtcgcgaatggcttcctgctgatcggtgagcgcgaaatccatggccttgatctcctcctcgggagccgcgaccgcgctatctcccgtctcttcgcgttccccacaccagggcgtgccgcttgctgcgcccagccttgcttcgcccgcgttcttagctcgaaaaactgcgcacagatacgtgaatttccctgggaagtgtgtctaccatgcatagggtcatgcggcgcgacggcaagagcgcgcctttatttcgcagggaggaaaccgcgatggccgggctttatttcgaggacttttccgtgggccaggagttcaggcatccgctgacccggaccgtcacggagatggacaacaccatgttcagcctgctgacgctcaacccgcaaccgctgcacatcgacgcgcatttcgccgagaagaccgagttcggccagcgcattttcaacagcctttacaccctcggcatcatgatcggcatgacggtctatgatacgaccctgggcaccaccgtcgccaatctcggcatgaccgacgtcacgtttccgaagccggtcttccatggcgacacgttgcgggctacgacgaaggtgctgtcggtgcgggaatccaggtcgcggccaatggccggcatcgtcgagttcgagcaccacgcgtacaatcaaagcgacgagatcgtcggcaaatgccgccgcatggcgatgatgcacaagaggccggtttgatgcgttcgatgctgttcgttccgggcgattccccgcgcaagttcgagaaggcgagcgaaggcaaggccgacgcgctgatcatcgatctcgaggactccgtcgtcaccgagaagaagccggaggcgcgttcgctgacgcttgccatgctgaaaggcaatcgcggcccgcaccaactctatgttcgcgtcaatgcgctcgacaccggcatgacgctggccgatctcgccgcggtgatgccgggcaggcctgacggcatcgtgctgccgaaatcgcaaggtggcgacgacgtgcggcgggtcgcgacctggctcgaggccctggagtccgcctccggcaccgaggtcggcgcgacccgcatcgtctgcgtcgcgaccgaaaccgccggctcgatcttcgggctcggcagctacaagggctgctcccctcgcctcgccgggctgatgtggggcgctgaggatctttcggcctcgctcggcgccaccgagaaagcctccggcggcgtcttccacagcccctatcgcctggcgcgtgatctctgcctgatggccgcggccgcggccgaggtcgccccgatcgacactgtgtacaccgacatcgacaacctcgcgggcctcgagcaggaaacgcacgccgcacggcgcgacggcttttcggccaaggcgctgatccatcccaagcatgtcgacatcgtcaacgcggcgttcgagccgaccgacgcggagcgcacctgggcggagaaggtgatcgcggccttcgcgagcaatcccaattccggcacgctgcggctcgacggccagatgatcgacaagccgcaccttcgggccgcgaagaagatcctcggccagccgtagataagaagacacgagccccgccgagccgatcggctgcgcggcggctcaatgcctgcggcgtcagtcgaatgcctgaacaggcggtgccgacggttgcgccgacacgctaggcgcggcctgaaccggcgccgccggattgccggcagctctcatctggccattggcggccatcgcctcgcgcgtgcggggtgcaccgcccctcacgaccgcacggcgcggcggctgccgatgccttgccgagtgcgaacctctgatcccccaggagcgggcgatcgaaggtccggccgtgtagccaatcaaggccccggcgaccgcaccgacggggcccagcacgaccgcaccggatacggcgccgagcgccgcatcgccggcgcgctcctgcgcaagcgcgctcgcgggcacgcaggccagcattgcaacggcagtgatcagagctttggtcatcggagcgcctccctcatgggaaatcactcctgctcaaatatggccgcatgaggttcgcttgccggccgaccaatggcaatcgccggcggaacccagccgttcgctggacacttcggtctggctgatcatcgatcttcagcagccagcgacgaggacaagcgtcactctgaacgtcttgacactgatgacccgctgcctattttttccaccgagaagagactttctcatcctcgaaaatcaaaggactcaacgcgaccgtctggagagacgatgatgctcgatgagaatctggcccgcatcctccgcagcgcaggccgacgcgatgagggtggcacaatgaacagccggcgagacctgctcattcgaggcagcgagaaggtgatcggccattacgagctcctgcttgcaagcgcgaagaccgaacatgagcgcgaactctatcttcagcgcatcgagcgtgagcgtcggctgatccggagcctgcagtgggagctcgatcaccgcgcggcctgagtcaagcggccatgacgatcgcagggacgagccagccgctcgcgcctgcggtccctccgcagagcatcgattcagcggaggaggcgattggggcctgcgagcgcgctgctcggttggaccgcgggcgcgactctcacactggcggtgaatggggcgccgttgcgcaacagggtgagcttcacatcctccccgacccgcgcaaggccgatcgtgttacggagctgggcggcggtgcggatcgggcggtcgtcggctccggtgacgacatcgcccttgcgcaagccggccttctccgcgggcgaacccgcagcaatctcggcaatgacggcgccttgattcaatcccttgttgaccgacggatgcaggtccttcagcgagatgccgatgcggccgcgctcgacgcgcccattggcgatgatctgctccatcaccttgcgcgccatgttgaccggaatggcaaagccgatgccgacgttgccgccggcaggcgagatgattgccgagttgatgccgacgagttcgccgcgcaggctcaccagtgcgccgccggaattgccgggattgatcgcggcgtcggtctgaatgaaatcctcatagccctgcttgccgaggccggtgcggcccagcgcgctgacgagccccgatgtcacggtctggccgaggccgaaggggttgccaatcgcaagcacgaagtcgccgacctcgagtccgtcgctgtcgccgaagggaagcgccttgagcccgaccgggttctggacctggagcaccgcgacgtcggtgggcggatcgcggccgatcaccttggctgaaaactgccggccgtccttggtcgtgatctggaccgcggaggtgccttcgacgacgtgattgttggtcagcacgtagccgcgctgggcatcgacgatgacccctgagccggtcgcattgacctccttctcgatctgtcggggaacgtcgaagaattcgcggaacagcggatcgcgatagagcggattgtcctcgcgcacgcggccatgcacggagatgttgacgacggccggcgtcacgtggcgcaccagaggcgccagcgtcggcaccgggccgccggtcttcatctccggaatctggccggcggcaggctgcgacgccgtgagcgtcagcaccagcaaggccaggaacagcagacgcacagcattcatcatcgtcaccctgccgctttgtgttgtgtggatatgcgagatcgtcctggcttcagccctcgccgcgcggtgcgacgacccagccctgcagggccaggaacggaacggcccaggccgccgaggcctggccgagcagcacgaggccgagaacggtcggcgtgaccatcatgcagcccgcctctctgcggcggcccaaggccgccgcagccgcatcggcacgccgccgccgcgcggcgggtcgtcgttgtcgttgtcgccgtccagcttgcgcagggcggccagaatatcgaccagtcgaaccgcgtggctcataccgggaatttctcgcaaggcaggacaggattcgacggcgtacatgtcggacgcccatgacgacaggatgatccgcttctccggcgcagagagatccttcgcattgaggacctcggccggcgagtcgtaatgggcggcgggatgaaacagcgggttgagagtgccgggattggtattcacgttggtcatcggtcgtgcctccctcaagctcctttccaaagggacggggttgttgacggcgggacggcggcgccaatcgcccccgtcccgcttgacattaatgcgtgttgatcgcgatgcgcttgacgccctcgcgcgccttctccgatttcggcagcgacacggtcaggacgccattcttgaacgacgcctcggccttgtcctcctcgacgccctccagcgggatctgccgctcgaaggcaccgtaatagcgctcggtgaagtacctgccttcgccgttgcgctccgccttcttctcgccgcggatggtcaggacgccgctggccatctcgacctggacgtccttctcggtgaggcctggaagctcggccgagacggtcagcgtcttgtcggtctcgctgagctcgaccttcggccagccgaaccggccctccatcagcggcgacaggccggtcccgccgaagccgcggaagacgtcgtcgaacagacggttcatctcgcggtgaagcgtcaggaacggatcgaaattgtcgcgcgccggcgcgagctcctggttcctcgaccagggaatgagatcacgaaaagccatggttgtctccttcatgcaccgggagcgcggcccgcgcctccgcgcgccgcgttccgccattcgatcgatcgagcgttaggctgccttcttctgctcgatctgcgatgccgcagaagcgccgcccgcaatcggaatccggcgcggcttcatggcttccggaacctcgcggacgaggtcgatgatcagcagcccgtcctggaacgaggcctgcttgacctggacgtagtcggcaaggttgaacacgcgccggaacggacgcgcggcgatgccctggtacaggtattcgcgcgcggcggtctcgggcttccggccctcgatggtgagcgcattctgctccgccgtcacggtgatatcgttgacgccgaaccccgccacggcaaggctgatccggtaatggtcttcgccggagcgctcgatgttgtaggggggataattgtcctcggtcgcctggcgcagcgtgctgtcgacgaggtcggccaggtgatcgaagccgatggtggagcgccacaggggggcgaaatcaaaactggtcctcataaccaagtcctcctaagagcaagatggatacgaaggagcgcaaggcgggaattcagacgggtccgaaaagaccagcccggcgcccgtgccgaaccctcatggcatccggcacaccgctctcgcggcgaaaaacgacttagaaaaccggaaaccggtttcaaggggccgcccaaaaatttttttgggccgccgggcagcccgctggccgcgctgaccctcaggatctcagcgcgtcccgtgccgtctccggcgccagcagcgttgcgatgatcgtgacgaccgacagggcgatgatgtagacggacaccgcccaataggagccggcccaggcgagcagcccggccgcaatcagcggcgagaagccgccgctgagcgctgctgcgacgttggcgccgagcgaggcgccgctgtagcgcacctttgtgcggaacagttccggcatgaaggcggccttcggcccgaacagcagcgcatgggtcagggtcatcgtgacgacgagcgcgagcgtgatcagcgccggctccccggtgtcgaggaaccagaacagcgggaaggccagcgccaccgagaacacgccgccggccagatacagcgccttgcggccgaagatatcggacagccagccggcaagcggcagcgtcgcgaattccacgacggcggcatagaccacggcatctaggatcacctgccggggcaggccgagcttcgtcgtggcgtagaccacggtgaagacggtgaggagataggcgagtccgacctccgacaccgtgatgccgacggccagcagaaagctgcgccagtcgcggcgcagcacctcgagtaccggctgcgccagcacctccttgcgctcgaccacttccttgaagtgcggcgtctccgcgagcttgagccgcacgatgaagccgacgccgacgagcaggatgctgatcaggaacggcacgcgccagccccagctgaggaagtccgcctcgggcagcttcgtcatcagcgcgaagatgccggtggaggcggcaacgccgacgggaaagccgatctgcaccaggctgccgtagaagccgcgtcggcggccggcatgctcgatcaccatcaccaccgcgccgctccattcgccgccgagcccgatgccctgaacgaagcgcaggcagacgagcaggatcggcgcccagatgccgatctgatcataggtcggcaggcagccgatcaggaaggtgccgaggcccattgcgatcatggtcgcgaccagcatggtcttgcggccgagccggtcgccgtaatgcccgatgatggccccgccgatcggccgcgccacgaagccgaccgcataggtcgagaatgccacgagcgtgccgacgaagggatcgaagctcgggaagaacagcctgttgaagaccagcgccgccgccgtgccgtagatcaggaaatcgtaccattcgatcgcggtgccgagcgcgctcgcccacaccacatgcgccgtcttcgatttctccgccgcagcggagaacccaattgctgctgtcatgccctgcccacagattccgtggagcatcatggctaatcgttatgacggccgcaatgtggaggcgttgtctctcacaggataacggcgcgggactttgcgcgctgcctccacgatcgtcattgcgagcgcagcgaagcaatcca

SEQ ID NO: 253 - DNA, 2732 bp, Bradyrhizobium colbertium
  misc_feature (2062)..(2071): n is a, c, g, or t
ccgagaaggacgagcacggtgccgaccgcatagtgatcagcgatgtcaagctggccgccgccggcgccactttcgccgaagcgggcccggcgaccctgaccgaaaccctatcgttcaatggcgtattgcgtgccaaccaagagaccgtcgtgcaggtcacgcctcgctttccgggcatcgcccgcgccatcaagaaacggatcggcgatgtgatcggcaaagacgacctgctggcatccatcgaaagcaaccagagcctgaccgtctacgatctcaaggcgccgatcgctggaacggtgattgaccgtcagatctcgctcggcgaatacgtctccgagcagaagccgtcgttcgtcgtggccgacctgtcgacgatctgggtcgatctgtcgatctaccgtcaggatctcaggcgcgtccggatcggggacgaggtcctgatcgatccggatgatggggcgggcgacatcaagggcaagatctcttacttggcgccagtcggcgcgagtgagacgcagacggcgatcgcgcgggtgatcctgccgaatccagacggaaggttgcggcccggactgttcgtgacggctcgtttggtgttggccgagcggaaagtcggggtcgccgtgcgcactggcgcgatccagaccttcgaaaacaagaccgtcgtgttcgtgcgcgagggcgacgacaagctcgaggcgcgtcctgttgagctcggggattccgatcaaaaattcgtggaggtccgcgccgggatctcaccgggcgagaagtatgttgccgaaaactcgttcgttgtgaaggcggagatgggcaagggagaggccgagcatgattgagcgcctcattgagttctcgatccgccagcgctggctggttctcctgttcgtgctcggacttctggctttcggcggctggaacttcgtgcggctgccgatcgatgcggtacccgacatcaccaacgttcaggtgcagatcaacacgcaggcgccgggttattcgccgctcgagaccgaacagcgcatcacgttcccggtcgagacagcgatgggcggcctcccgaagctggaatacacccggtcgttgtcacgctacggtctgagccaggtgacggtcgtcttccgggacgggaccgacatctacttcgcccgtcagctcgtcaacgagcgcatccagcaggttaaggatcagcttcccgccggcgtcgaagtcgccatgggccccgttgcgacggggctcggcgagatatttctctataccgtcgaggccaagcagggcgccaaggcacagggcggcaaggagttcacgccgagcgatctgcgaacgatccaggactggatcatcaaaccgcaactccgcaacgtgcccggcgttatcgaggtcaacacgatcggcgggttcgagcggcagttccacgtgctgccggatcccggcaagctcatggcctacaagctgggattccgcgacgtgatgacggcgctcgccgccaacaacgcgaacgtcggcgccggctacatcgagaagaacggcgaacagtacctggtcaggactccggggcaggtcgccaacatcgctgagatcgaggacatcgtcatcggctcgcgcggcggcgtaccggtccgggtcaaggatgtggcccaggtcgccgaaggcaaggatctccgtaccggcgcagcgactctcaacgggaaggagacggtcctcgggacagccatgctgctgattggcgagaacagccgcgcagtggcccagcgggtttccgccaagttgaacgaaatcgccaagtcgcttccggaaggcgtcgtcgcccgcgccgtctacgaccgaactcacctcgtcgaggcgactgtcaaaacggtcgagaagaacctcgtcgagggcgcgattctcgtcatcatcgtgctgttcctaattctcggcaacttccgcgctgctttggtgacggcctgcgtcatcccgctttcgatggcgatgaccgtcaccggcatggtcgagacgaaggtcagcgccaacttgatgagcctcggcgcaatcgacttcggcatcatcgtcgacggcgcgnnnnnnnnnngtctcctcgcggaagcgcagcatgagaaaggccggctgctgaacctgaacgagcgactggagacgatccgcaacggatcggcagaggtcatcaagccgagccttttcggcacgctgatcatcgctgtcgtgtacctgccggtgctgaccttgacaggggtcgaaggcaagatgttcacgccgatggcgctgaccgtcctgatggcgcttgctgccgcagctctgttctcggtcaccttcgtgccggcagcggtggctatcattgtcaccggcaagatctcggagaaggagaacttctttatgcgcgccgccaagcgcgtctatcttcctctactggaccgcgccatcgcctttcgacgcgttgttgcggtcggggcggtcctgatggtcggggcgagcgtgttcgcggcgacccgcatgggcggcgagttcattccgagcctcgacgagggcgacgtcgccctcgcagcgatccgcattccggggacgagcctgacgcaatcgctcgacctgcagatggcgctggagaagaggattcaagaactgcccgaagtgaaggagttcttcacgcgaacgggcacggccgaggtcgcgaccgatcccatggcgccgtcgatgtcggacggttacgtcatgctcaagccgcgcagcgagtggccgga

SEQ ID NO: 254 - DNA, 1317 bp, Bradyrhizobium colbertium
cgcgcttcccacccagattgtcgcgctatattgaacggttcggggttgtcgagactggccgtcgccgtcgctggaccgatgatgagaaactcaagatcgttctggagagtttgcaggccccgcgcgcggtctcgtcgacagcacgacgatacggcatctcgcgctcgctcctgttgacttggcgacgatcgtttgggacgcggacgagcaatactgaacaacctcagccagcgtttgtgccaacgatggtgatgccggaccaaccgccggcgccgccagtaattttagcggggccagcgagcggacgcatggagattgtcgtcggcaaggcctgtcgggtgatcgtggacgccggcgttgatatgaccgcgttgtctcgcgtattggatctgctggagcggcgatgatcccgatcgcgcaggggcgaggatctggatcgcaactggtcacactgacatgcgcaaaggcatgcagggtctggcattgctggtgcaggaggggctggggcgggatccttttgccggcgacgtctttgtgttccgtggtcgtgctggcaccctgatcaaagccctttggcacgacgggatcgggctgtcgctctacgccaagcgactggaccgtggccgcttcatctggccggcgacggtggatggcgtggtatcgctgaccgcagctcagatgggctatttgctggaggcgatcgactggcgcaatccccaacacagctggcggccgcagagcgcaggataggttgcgcaagagtcccgtgagattgcagaaagcgcacgccaaatcgtcgcttttgtgattccatcggtgcatgggtgacggtccggcagaagctgccggaagacattgaggcgctgcaagcggcgttgctggcgacgcgcgccgaactcgccagcgttcgcgcccagcagtccgacgaccatgctctgatcgctcacctgaagctgcagatcgaaaagctgaaccgtgatcgttatggccctcgctcggagcgtaccgcaaggctgctggatcagctcgaactgacgctggaggagctcgaggcctcagcgactgaggacgaactcgctgccgaaatggccgcggccaagacgacgaaggtggcctcgttcacgcgcaagaggccgtcgcgccagccgttcccggaccatctgcctcgcgagcgggtgctcgtgccgggacctgtggcgtgcgtctgctgcggcggagcgaggttgtccaagctcggggaggacatcaccgagacgctggaggtgatcccgaagtcctggaaggtgatccgtaagcgaagcttttgtcccatttgat

SEQ ID NO: 255 - DNA, 3745 bp, Bradyrhizobium colbertium
gctattcatcctgtcgctgcgcgggctgtcgagcccggcaacctcgcgccagggcaatctgttcggcatggtcggcatggcgatcgcggtcgccacaacgctggcgagccatccgccggccgacggcatggcctgggtgctggtcatcctcgcggttgcgatcggcggcggtatcggcgcggtgatcgcccgccgcgtgccgatgacctcgatgccggaactggtcgctgccttccattcgctcgtcggcatggctgcggtgctggtggccgccggcgcgttctacgcgcccgaagcgttcgacatcggcaagcccggcgcgattcatgcatcaagtctggtcgaaatgtcgctcggcgtcgccatcggtgcgctgaccttcacaggttcggtgatcgccttcctgaagctttccgcgcgcatgagcggcgcgccgatcattctgcccgcccgccacatcatcaacatcgcattggccctggcgctggtgttcttcatcgtccgtctcgtcctcacgggcggcgctttcgacttctggatgatcaccatcatcgcgctggcgctcggcgtcctcatgatcatcccgatcggcggcgccgacatgccggtcgtgatctcgatgctgaactcctattcggggtgggccgcggccggcatcggcttcacgctcggcaattccgcgctgatcatcaccggcgcgctggtcggctcttcgggcgccatcctgtcctacatcatgtgccacgcgatgaaccgctccttcatctcggtcatcctcggcggcttcggcggcgagaccgccgccgccgccggcggttcgggcgagcagaagcccgccaagctcggctccgccgacgatgcggcgttcatcatgaagaacgcctccaaggtcatcatcgtgcccggctacggcatggcggtggcgcaggcccagcacgcgctgcgcgagatggccgacgtcctgaaaaaggaaggggtcgaggtgaaatacgccattcacccggtcgccggccgcatgcccgggcacatgaacgtgctgctggccgaagccaacgttccctatgacgaagtgttcgaactcgaggacatcaactccgaattcgcgcaggccgacatcgccttcgtgatcggtgccaacgacgtcaccaacccggccgctgaggaagacaagtcctcgccgatctacggcatgcccgtgctccaggtctggaaagccggcaccgtgatgttcatcaagcgctcgctcgcttcgggctatgccggcatcgacaatccgttgttctatcgcgacaacaccatgatgctgcttggtgacgccaagaaggtcaccgagaacatcgtcaaggcgatgtaacgcgaggcgaggatcgtggccatcaacaaggaatggcaccggtctcatcccatgccgcccaaagcgacgcgcgagcagcgcgtcgcctggcacgccgcgcacagggcggcgtgcggctgccgcgatattccggcgagccttcggcccgatgtcatcaaattgctgcggagccatcgcaagccgtgagccgaaaggctgccgcctgtcatgaccttcatcaagtggaccgccatcctgctcgcgaccgtctatctcgctggtctcgttgtgctgtacgtccgacagcgcgagatgctgtttccgatcccgcctgtcggccggactgcccccgatgccgcgggccttccggaagcggaagagcatgtcctgatcacgtctgacggcgagaaggtcatcatctggcacgtcccggccaagccaggccgtcccctgatcctttacttccccggcaatggcgatttcctcgccggccggatcagccgtttcaaggcgatgaccgccgacggcaccggcctcgtcgcactgtcctatcgcggctatgccggctcgagcggcgcgccgagcgaacagggcctgctgcgcgatgctgaggccgcctatgccttcaccatcgcgcgctacgaagcggaacgaatcgccgtctggggcttttcgctcgggacgggcgtggcggttgcgctcgcctcggaacgtcgcgtcggaaagctcatcctggaggccccctatacatcgaccgccgacatcgcagctgcatcgttctggtacgttccggtgccgctcttgatgcgcgatccgtttcgctccgacgagcgcatcgcgcgcgtcacggtgccgctcctcgtgatgcatggcacgaatgattttgccatttcgatcgtgttcggagagcgtctgttcgcactcgccaatgagcccaagcggttcgtttccatggctggcggcggacatgacgatctcgatcaatttggtgcggtcgaaaccgcgagagattttatcggcagttgataatctctttgtacgttacatttgggcgctcgccgccttctgccgcgctgattccgcgttcctgctgttgacgctgctgccggtcgcgccgatcctgcactggcattgaatctcgcgcctgatttgctactgctcgtccaggcaattggaagcggtggatgagcgcgcataatcggatgccccggtcggcttggatgtttcccgcacttgccgtgctgttgttcgctgccgtcaccgcgacggactacgtgttcacgctgtcgctaggcgggctcgtctttgccatcgtgcttctggtcatcctgttcggcacggtgttcgccgcggttcaccatgccgaagtgatcgcagagcgggtcggcgaaccctatggcacgctcgtgctgacgctcgcggtgaccatcatcgaggtcgcgctgatcaccacgatcatgctgggcgacaagcctgccccggcgctcgcccgcgacaccgttttcgccgtggtcatgatcgtctgcaacggcctcgtggggctttgcatcttcatcggcggcctgcgctatcgcgagcagggtttccagctctcaggggccaacgtctatctcagcgtgctgtttgcgcttgcgaccatcacgctgatcctgccgaactacaccaccaccgcgccgggtccggtctattcggcggttcagctcggcttcgtcgacgtggtcacgctcgcgctgtacggagtgtttctctacactcagaccgtcctgcacaaggattacttcgttcatgaacgggcggagggcgaggctggggaggtgcaccggtcggccggggcgctcgcccttaccgtggtgctgctcctggtctcgctgctggcggtcgtgcttctggcaaagaagttctcgctggtggtcgacgccgtcgcggcccggatcggcgcgccgcccgcttttgccgggcttctggtcgcgctcctgatcctgatgccggaaggcgtcgcggccgtgtcggcggctcgcaagaacgacctccagaagagcatcaacctggcgctgggctcctcgctcgccaccatcgggctgaccatcccggcggtcgggctcgccacctacgcgctcgagaaggagctcgagcttggcctcaacgcccagggcagcgtgctcatgctcctgaccttcttcctgagcatgctgaccttcggcacgggcaggaccaatgtcctgttcgggctggtccatatggtggtatttgccgtctacgtattcatggtgttcgtgccctgaagcgcgaaaggagagatccaatgcttgcagccaagtccgaagttcaggtcgacaacgagcaggtgcgggtgacggaatggcgccttccgcccggcagcgcgaccggacatcacacccacggcatggacta

SEQ ID NO: 256 - DNA, 14879 bp, Bradyrhizobium colbertium
tcggcgctgcaccaaacttgcgtcagagccccgattggatgccggtcaccccgaaaacagggtccttattccacgcctattcacagcagcatcctgtcttcgccaaacgagatatcggcacagcattgactttataagagccgtaatgcgcgacaggctttgaagtggagccgcataatgtgcgcggtgcagagacgatccgaccaacgatcttccagtattgcttcaaagctcttgcgcgattgatcggattatcgcgggcaaaagatcacggcatatccgaagcgagggcatgaacccttgcaccgaaacaaccgaccgtggaggccactatgcgcattcagcggcggcagggcgctgccctgcttgcgaccatcgccatcgtcgccaccatcggcggcgctatcatcttcgagggtgaccggacggcgcttgcgcaagcccccgcaaccgcccccgtcagcgcggccgtcgccacagttcaacgatccgacattgctctgtgggaatccttctccggacgtttcgaaccagtcgaggccgtcgatgtacgagctcgcgtctccggtgcaatccgctccgtcctatttgaggagggagcgatcgtccaacgcggtgatctcctcgtcgtcattgaccccgatcccttccgcgccgaagtcgaacggcttcaggctcaggtcgccatggcggaggcgcgcgcacgcttcacacgatctgaatccgatcgtgccgatcgcctggtggaaaccaacgctatcgccacgcgcgaccgtgaccagcggaccaacgctgccgaggaggccgcggcgaacctcagcatggcgcgagccgccctgcgaagcgcggagctgtcactgtcctacacagaggtgcgggcgccgatatcgggaaggattgggcgacgcgaaatcacagtcgggaatctcgtcgacgctgggccaagcgcgccgatcctcaccaccatcctttccgtcgatccgatctacgccggtttcgaggcggatgaacgcacggtcgcccgtgctttggccgacatacgcggtgaccgtggccacatcaacaccattcccgtcagcgcggacataggtggcgatgctccgccgcttcagggtcggctgcaactggtcgacaatcgggtcgacgctcgatcgggtacggtgcgtctgcgcgcggtcttcgaaaacacgcaaggcatgttcacgccgggtcagttcgctcgcatccggctcggccgcgcgcaacgcgagccggtgatcctgatccctgaagaagcaattggtacagaccaaagccgccgcttcgtgctggtggtcgacggtgataaccgcaccgcgcgtcgcgaggtgcagcttggccaattgcttgatggcagccgcgtcgtgacatcgggcctccagcctggcgaacgcattgtggtctccaacctccagcggcttcggccgggtgctcaagtgcagccccgcaccgacggagctcgcccatcgacaagttgatcctatgaacatctcgcccttcttcatcaaccgcccgatcttcgcgggcgtgctctcggccttgatcttcattgccgggttgatcgccatccccaacctgccggtttctgaatatcccgaagttgtgccgccgaccgtgatcgtgacggcacgctatcccggggcgagcccgacagtgatcgccgagacggtggcgacaccgatcgaggagtctgtcaacggcgtcgagaacatgctctacatgagcagtcaggcgacgacggatgggttaatgacgctggtcgttaccttccggctcggcaccgatccggacctcgcaactcagctcgtgcaaaaccgcgtgcagcaagccgaagcgcgcctgcccgaggcggtgcgccggctgggcgtgacaacgatcaaaagcacgccggacctcacgttgaccgtgcacatgttctcgccgggcggtcgctacgacatgaactacctgcacaactatgccctcctgcatgtccgggaccgcttggcgcgcatccccggcgtcggccaggtgatgatccgtggtgccggcgactattcgatgcgtgtctggctcgatcccgagaagatcgccgaacgcggtctatcggcttccgatgtcgtgacggcgatccgcaacgagaacgtcgaggccgccggcggtgccttgggcgcgacgcccactgcggagggcgttcggacgcaactcaccgtcaatgtccgggggcgccttcgcaacacggaggagttcgagaatatcatcgttcgcaccgcgtccgatggcgcaattacacggttgaaggacgtcgcccgcgtcgagctcggttcggccgaatacgctgtgcgctccttgatggacaaccagcctgcggcggctctattcgttctgcaggcaccaggttcgaacactgtcgagatcggtcggcaggtccgcgtggtcatggacgaattgaagcggacgatgccggcgggcgtggactaccgcatcgtcttcgacccgacgcagttcgtcgtcgcctcgatcgacgccgtcgtccacacgctgttcgaagcagtgctgctggtcgtgctcgtcgtcatcctgtttctacagacgtggcgcgcatcgatcatcccgctgatcgctgtgccggtgtcgatcatcggaacgttcgcggtaatggcgctgctgggctattcgattaatgcgctgacgctgttcggtctggtgctggcgatcggcatcgtggtggacgacgccatcgtcgtcgtcgagaacgtcgaacgaaacatcgaggccggtctcacgcccaaggaggcggcgcttcgcgccatgcgggaggttacagggccgatcatcgcaatcgcgcttgttctcgttgcggtgtttgtgccgctcgcgttcacgaccggcttgacggggcagttctaccggcagttcgcgatgaccatcgccatctccacggtgatttcggcgatcaactcgctgacattgtcgcccgcgctggcggcgctgctcctcagagcgccggatgcccctaaagattggccgacgcgccagatggatcgggtgttcggccggtttttcggctggtttaatctgggctttagccgcggcggccatgcctacggggctggcgtcaagcgcatcctcgcaaggcgcctatcggtcctggtggtgtatggcggcctcatcgtcgtgaccacattgctatttcacacggtgcccggcggcttcgtccctcagcaggaccgcacgtacctcatcgccagcgcaacgcttcccgatggggcgaccctcgaccgcagcgaggatgtcgtgcgacagatgggcgagatcgccctcaaagatccggacgttcgtgcctcgctcgccttccccggcctctcggtgaatggccagctcaacagcaccaatgccggcatcgccttcatcaatttgcagccctttgccgcgcggcgcggcgccaaccagagcgctgctgcgatccgcgaccggctgcgtgtcgcttttgcgcagatcgagaatgcacgaatcgtcatcttcccgccgcctccggtgcgaggactaggcgcaacgggtggcttccggctccagatcgaggaccgcgcctctctgggctatgcggcgctcgacgctgcggtcaaggcgtttctcgaacgagcgagccgacaaccggagctaaacggcatgttctcgtcgttccaggtgaacgtcccgcaagtcgatgccgatgtcgatcgcgaacgggcacgccaactcggtgtctccatcccggacatcttcagcacgctgcaggtctatctcggcagcttctatgtgaacgactacacgcagttcggccgcacctacacggtaagggcacaagctgatgctccgttccgagcttccatggaagaccttggcgcactcaaggtacgctccggcacgggcgagatgatcccactcgcgaccttgatgacgatccggcagagcgccgggcccgagcgcgccatgcgttacaacggcttcccgacggccgacgtcagcgggacggctgctgcgggttactcgtcgggccaggcacaggccgccatcgagcgaactgcggccgaaacgttaccgcctggaatcagcttcgaatggactgacctgacctatcagcagatcctgaccggcaacaacagcatctggattttcccgctcgccctgatactcgtcttcatggttctggccgcgctctacgagagcctggttctgccgctatcgatcctgatgatcgtgccgatggcggccctgtccgcgctggccggcatctggttgacgggaggcgacaacaacatcttcacgcaaatcggcctcgtcgtactcatcggcctatcggcaaagaatgcgatcttgatcgtggagtttgcgcgcgagctggagttcgccggccgaacgcctgtccaggcggcgattgaagcagcccggctgcggctgcgcccgatcctgatgacgtcctgcgcctttatcatgggtgtggttccactggtgctctcatccggcgcaggctcagaggttcgacgcgtcatgggcgtgacggtgttcagcggaatgctgggagtgaccctctttggattgttcttgacgccggtcttctatgtcgtgcttcgcaagctgagtggggatcgtccgctcgctcatcatggcgccgaggtagaaggcattgccgaacggcctgctgcggccgctgagtgaccaagcacagagcacgtctcggaactgagacctccctgatccgcgtgttcgaggggcctcggtccatgacaggacggctcgctctccctcgccgtcgacgggcgcctgacgtcgacgcccccgttcatggtgtttctggccggtgagatggaaggacagggctacgccatcgttcttggttgacgacttgccgccagcaaaaacagggctccgagagcactcaatgcaagaaaggaagcctgggtgattgtcggcagttctcccgtcaggctgctcccgaacaaaaccccggcggccggcgtcagtgccggaaacaacatcgctcgaacaatcccctcgagccggacacacagcgaaaacgctgttagtgcgacgacgcccgcgaccaaaccctggccgacgacctgctctccaaggagccataacgacacccccgaaagacgaccgagtccgtcaacaccgagataatatggaccaaaagtgcaggcagacatcactgacacgacagccgtcgccgccagcggctcaatctgccatttttcgacgagagcgacgaatgctgcaaacatgcagcctgcgcccgcatacatgatcacgcccatccaactgcgcgacgtacaacacaggaacacgggacccgcgacgacgataatccgaaccgtgagagcgacaagaccggctacacgtatggcgtcgagcctctcacccagccaccatgtggcgagaagaatacccacaacagccaacaccgccagttcgaccagcatcccagtcgcgaatggggcgtgccggctaccgccagcgaccaacatcaccaatggcggtccagcaaggagcgccaaaataagcgatctcgacaaactgaggccggaacatcgatcgcgccagtgaagcaacaaccatggcccaagaataattccagccgtcgtatagcgtatgaacgccagatcgtttgaagtgagtccctccgcaacggcgtgcctggttgcggcaaggtacccaccccatccaagtgccgcgcacaatccaaacatcagtccggctcgcatcctgaaatatctgcgagatactgtgattgcactcttgagcttgtgcagttgtgtcgcggacataattgcaccctatgagaggggatggtgtccttgtgttaggcatggaacggccgtccgactattctggaaaacgtcatcagcctttgaagtgatacttctcattactgaagccaaccggaagggagcgcttctgcggctccagtggaccgcgatgggaacccgcgacatcgataacaggcgtcccgatatcgcgtatcatccatccgccgctcccatccgcaacgacgtgtggctcgcgacgagcggcgtcgatacgtaaggctgacttcaaaacctttcgcgaattacctgtctaatcctacgaggtcgcgccctctaaatctccttccaagagacaggagatttcaaatgactcagaaaatctggttcatcaccggcgtcagcacaggtttcggccgcgccatcgccaacgctgccatcgctgccggcgacaccgtcgtcggcacgctccgcaatgaagagcagcggaaggcgttcgacaacgtcgctcccggacggacgcacggcgtcatcctcgatgtcaccgacaatgccaaaatccatccgaccgtcgatcgcgtcgaacgcgagatcgggccgatcgacgtgctcgtgaacaacgccggttacggccatgaggggaccttcgaggaatcatcgctcgaggaccttcgtcggcagttcgacgtgaacgtcttcggagccgtggcggtgacgcaggcagtgctgccccacatgcgccagcgccgcgccggcagaatcatcaatatcacatcgatgggcggcctcattaccttgccgagtctcagtttctaccacggttcgaagtttgccttggaaggcctctccgaggcgctcggcaaagaggtgaagggcttcggcatcttcgtcactgccgtcgagccgggttcattcaggaccgactgggcgggacgctcaatgaaccgcgcaccacgccggattgcggactatgacgccctgatagacccgttgcgcgagaagcgcctcgcgatgagcggcaaacagcttggcgacccggcaaagctcggtgaggcggtcgtaaagatcgccaacgcagagaacccgcccgcgcatctgctgctcggctccgacgcccgcacgctggtcgaccgcaagctgtcggaccttcgcgccgaatacgacgcctggaatgacctgaccctctcgaccgacttcaacgacaaggcgtcggccggcaatagctgggcgtgaccgcccgccaacgggactgtcaagcatcgctcggcagtccaggcatcgcccgcagcgaacgcttcgccacaaagcacatcaacgagcgctcggccgacgatttcgcgagcgtgccgttcggcgacgagaagagccccccgttccgctccggcgcgcacggcgtgatcgacggcgccacgaccgagcatcggatctcgcttcgccgcacccctcgcgcccttcctttctgactgaaaccaactgtgtaaggagattcgacatgacacagattgacgctcgcccgtccggcacgtttgccattggcggcgatatgacaatcaaccggctcggcttcggtgcgatgcggattacaggccccggcatctggggtgagcccgaggaccgacccgaagccctccgcgtgctgaagcggttgaccgagatcggcgtgaacttcatcgatacggccgacagctatggtccattcgtcagtgaggagctgatcgccgaagcgctgtatccttatgacggtctgctggttgctacaaagggcgctctcgtgcggccgggtggcgaacccaacccgtggccgatcgtcggcgacccgcactatcttcgccaagctgtccgcatgagcctgcgtcggctcaaggtcgaacgaatcgatctatggcagctgcaccgcatcgatccgcgtgtcccgcaggacgaacagttcgatgtcgtaaagtccttcatcgatgatggcttcatccgtcacgccggcctcagtcaggtctcggtcgagcagatcgaggcggcacgcaaggtgtttcccgtcgcgaccgtgcaaaacctctacaatctcggcaaccgagccgatgaggacgtgctcgactattgtgaagcgaacgggatcggattcatcccctggtatccgctcgccgcgggcagcctcgcgcgaccgggtggccttgtcgacaagctggcgaaggcgaagggcgtgacacccggtcaaatcgcaatcgcctggctgctcaagcgaagcccggtgatgctaccgacccccgggaccagtcgggtcaaacatcttgatgaaaacgtcgccgccgccagcatcaccctgagcgaagacgagtttgccgagctcgacgcggtaagccgcgcgtgagtggttgcgagccggactcgagagcccaatgaaagggcccccgagccggtttgacacgctcaagacgcctatcgcttcttggccacgtttgcgttgtagaagcggatcatattcgaggcgatgtagtcgagattatcctcgacagcaaagtgtccgcccgccaaacggtgaatctcggcgttggggagatcttttttgaacgcttcaccgccttgcggggtgaagaagacatcgtcctgtccccaaaagatgatcgtcttggggtggcgttcgcgaagaaacttctgccacaccggatagagctcgacgtttttgcggtagtcatagaacaagtccaagttcaaccgcaccgcgccagggcgctgcatgaacccgtagtcagattcccagttgtccgggctgatcagttcgggatgagttgcaccatgcagatagatactcttgatcgcatcgcgcgtgagaaacgccgccaagggcttctccgtctcaggcgagcgattcttccagagcgctccccggaaaccatcccacgccggcgtgaagccctcttcgtaagcattggagttttggataatcaaccaatccagcagctccggatgccgtccgacaatgcgaaaaccaaccgggccgccgtagtcctgaacgaacaggccaaaatgatcgaagcccttggccgcgaggaatttctccatcgtttcggagataccgtcgaacgtgtaggcataggtcgccgggtccgggacgtcgctgttgccaaaaccttgatagtccggtgcgatcacatgaaaccgcccggagagcgcttgtatgagattgcggtattgatgcgacgacgacggaaagccgtgtagaaggacaagcttcggggcgttgggatcgccggcttcgcgataggcgatgttcagatcatcgaccttgatggtgccgaaggtaacctgcttcgccgttactgccggcgtatgaaccggcgattttgtttcggcggcgctcacgtttcctgccaagacgcaggtcatcagggtagcggtcaatagcgctgggactacccgcaagaatccagctttgatatgccttgtcacgttctgctccttagtcttgctgttcgagttctgttgtgtgcgtaaggcatgaggcgccgaagatgcttgtgttggcacaggcgctgctgccccggcactgttgtagggactctcgttcttgcggaatattgcccgtgcgtgggaccttatcttccaagttttgagaggaagcatcgcgcgcgtttgatgccgccttgacctgctgctcgcctcagatgagcggcaggatcagcgaactcgaatcgagccagcagcaatgcaagcagtcggtcggacgaaaggacgatgctggccacgcgctcatcgagccgcgcaagcgatgagcaattgcatatgacgcagatgcggctcgcgacgactgtttgcacagccgtcaggtcgagccggtcatctgtctgcttcaatgatgtgtggaacggctcggatgaagaaacggcgtcagagcgagcatgacggccgaaacggccaccagcaaccaccatcccgagcggaagtcgccggtgacatcgcggagatagccaacgacaagcgggccgccagcggcaatgaggtaaccgacggtgagagcgaatgcgttccacatatccgcttcctcgacgctgttcgtgttgtcgagtggcaaggtcatgcccagcgtgaacgcgccgccaaggccgatcgcagagatcggaataaaaatgaacggtgcgagaccaggcgcgagcgctgttggaacgagaccagcgagcgaaagcgccgcacagatcgcaagccacccacgacgatcatgcgaacggctcaaccagccgaagacggggttggcgaccgtgaacacggccgtgaaactcgccaggacaagacctgcgagtgtcgtcgacaacccgacctcgcggtacataggcgacgtccatgataccatcgcgtagaacaggaaattgacgcaggcaaaaaacagcgacaccagccacgccgttggattgccgagcggaagcctgactctctgccccgagactgggaccaccgcacgatgacgtcgctcattcaagacaaccgccagccatcccgcaattccaaatagcgccagcacgctccacattccggacgcaaggcgccagcctcccgtggtctggatggcgatcgggcctgtcacggcagcggacacagtgctgcctagcgacagagccgtcgcgtaaagtcccatcagcagtgccgcctttgtcgcgaagcgagctttgatgaagcctgcaataagggccccggttatggcgatcccagcgccaacgccggccgtcgcgacaagcaacgggaagacacccgtcgcaaacgcgcgccccgcgatcgatatggcaagcaagagcagcgcggcgaggataacgggatcacgcccgaaacgccgcgccagccacgggctcggcagcgccagcgcacccatcagaatgtctggaatggatgtcagcagcgaagccatcgcgtgcgaaagtcgaaactcatcgatgatcgacggtagaatcggacccactgcaatgattccaggccgcagaccgattgccaccagaacgatcgccacgatcgcgacggtcgggctgacagccgtgaccgggcgtggctcccgaccaagcccgcctgaagctcgctccgcgtctgatggtgagttgacctcaacgtccatgacataaaccctcgtcgtcgcatcacttgcgaacggctcgtcgttagttctccccgccagaccagcatgcgaatgcgagtgcttgggcaggctgctcaagtttcagccgacaagcggcggggcgatcgctgtcagcgatcttccccgcacgccacactcaagctgacaggatgcctcgacgagtacttgtcatcggttcttggcaaggaagtcgccgatcagcgcggcgatttcgcggtgatgcgtttcgagcgcgaaatgccccgtgtcgaagaagtggacttccgccttcggaagatcgcgcttgtaagcctccgcaccggccggcacgaagaaggggtcgttcttaccccaagtcgccagcaccggcggctgttccttgcggaaataggcctggaaggcaggatacagcgcaacgttgctccggtagtccagaaacagatcgagctggatttcgtcgatgcccggccggctcagataataggaatcgaggttggagccatccgacgagacgagggtcggatcgggcacgccctgaaggtattgccaccgaaccgaatcgggcttgagaaaatcacgcaacgcctggcggttcgtgtccgagggatccttccaatatttctggatcggattccagccttcgctcaggccctcgacataggcgttgccattctgcgtgatgattgcgctgacgcgctccggatgcgccatggccacgcgcagaccggtgggagcaccgtagtcgaagatgtagattgcgtaacgcttgagattgatcgcctcaacgaagccgttgacgacctgggccaggctatcgaagctataggtgaactgaccgtgcggcggcgccttggtcagaccgaagcccggaaggtccggcgcgataatcctgtaacgatcgctcagcagagggatcagatcgcgaaacatgtgacccgacgtcgggaagccatgcagcaacaggatggtcggcgcatcggcggggccggcctcgcggtagtagacttcaacgtcacccaccttctgcgtgagatagcggatgttgttcgccgccggcgcgactgacgcggtctgcgccagcgcattcgttgcgctggcgagcatggccgcacccggcgctgctgccaagccggcgaggattgaacggcgcggaagtgcgattgtcgacttattcatagtagcctcctgaatcttgctggatggttcgcgcgtgacgaacctgtcggcctgcgtcgtccgccgaccggtgacaaacgggcgtttgctcgcccgctctacgaaatcgaagttgtaatcagcgcgccgcttcggccgccgcaatgatcgtctcggcgaccttctcgggatgactgaggatgacgacgtgactcgatggcaccttgacgatttgcgcgccgatgttcttcgccatctgctcctggaattcaccggggatcagttgatcttgctccgcgacgacgctccaggacggtttgctgcgccatgccgcctccgtcaccttctgcgatgtgcagtcccatttccacggaccctgcgtcgccgcgatgatgcggacctcggaatccggcagatcatgggcgagatatttcccgaccgtattcgcggcaagcttcacgaaaccgccggcgtccttttccagcgagtctgcccatgccggaacgtttcctgccagaaggtccaccaccgactgtccctgatcgggcgcgagtgctgtcacgtagacgagcgactccaccttttcgtgaacgccggcttgcgcgatgacgacaccggcccaggaatgtccgacgagaatgacgggtccgctctgctggtcgatcgcattgcgcgcagcggcgacatcgtcctcgagcgaactgagcgggttttgtacggcgacgaccttcaaccctttggcttccagaaggggaattaccctcgcccaactggagccatccgcgaaagcaccgtggacaagaacaaccgtcttgccgttgagcttgcttgacatgatttcctctttctcaaacgaaacgagcaacggctaaccttcccctgcgacgttccgcacgagggaagcgtgattgcttgcttgtttttaggagctatcggttttgttgaatatgatgcgattttggaattacggcttccaatttttggaaggacgcgccgtcccgtttcgcgctcgatccgaaggcactgcgaatgaaagacgatcgcgatcacgccttagaacgactgaccgcgtttactccgccgtgtcgggcgaggaacgcctcaatgttgcgttcagcctgatcgctgcaagcggcgtcgtggcgaatatcattccggcagggacggcggcacggtcgttcgacgtattcgcctttcattccagcagacgatggagcgggcgtgcctttgcacggagcgccggtccgtggcggggcgatcgtcggctatagccgttgcagccgggaagagacaccagcgccgtgtgaggtctcggccgaggcgaaccaatcccgctcttcagtgatggcgtcctggtccaccttcggatcttccacgatcaacccgcaaggggtcggctagcaagctgccgccgctgcggctgcgccttcgcggtgatcgcgaccgaaggcggccccccgaggaagccatcgagcgggaattggcccgctccggatggagccctcaaaaatgtcgcacgatctttccctggcccagaaccacgccttccagctcgctcgcacgctgatgatcccggtcaccctcttcaaatcgggcgacgcctatggcgccctgccctcgaacgaactcgatgacggcgacgatgtcgaattcatccacgaattcgatccctacgagcgtggccctgctcaatgagcccgcctccgggcgccgcgcgcaacgcggcgccgccacttcggggcggaagcggccgaagccgacgctccgaacaaacgacaagacgcgcggccgtcgtccgcgggcgttgcacgctgtcctaaatgtcggtgtcgcgatagccccgccgcctcttgcttttctccagctggatcatggcatcgtttgccgcatcgagatgatcgaacgtctccatcatcgattggccgaaggtgccaattcgtccccagctgcgcacaacagatgcgccgccgaacaaagtcggttgtagcgacagcacgtagaagcggcgcatattctgcgacggatcgatacggcgaagatgacgcggtttttgatccctggtggacatggcaggagtctcgcctgcttcggcgacgcggtccaattcatttcctgaatcgttgtggccggattgattcacgccgtcgatagtgcgcgcatcatgcgaacggccccgcccgatggcgcggcgacaatgtgcggttcgtgtcggccggtacaaggaccgtgataaacctgaacccgacgtcttcgcccccgacgcgcccgggagcggagcgagcgttgtgggacgcggagccgaccgaagcgcagaggtttgcgtttccggttggggtgccatgaggcggcctgtccggactggtgttgccggagcggacagcgcaggcgctcgtccagtctgactgaagtcgtgcggccggacgccagacaatgttcaggaagggtcatgcgtgtgtcccgcgaatgaagcgccccgttgatggtggccgatgggcgagcagccatgggttgcctttccctcaggtatgaccggcccacttgcgggctcgatctggcatgtctgaccggagagcggcttcgcctcgatcgttatcccgcaacggccgtgcgcaactttcttcccctggcgctgcgcgccattcctcgcgatccaagaaagccgcttccggccgtcctcctttgcattccggcctctgcgaggtgcggtccgatcgtctccggtctcttcgacagccatcgaggccgcggtgggcgcggtccgaaaacaaggaaaggcaattaccatggcgaccatcggctctttcaccagcaccggcgacggcttaggttacgcgcgagaaggtgtcctt

SEQ ID NO: 257 - DNA, 70016 bp, Bradyrhizobium colbertium
  misc_feature (32083)..(32092): n is a, c, g, or t
  misc_feature (60738)..(60747): n is a, c, g, or t
tgcggtgcccgaattcgggtcaaccgcggcctgaccatgcaaccccgaggcaagatcgtcgtcgcgagccagcattacccgcctgacccgagcaccacagcggcgatcatggccgagatcgcctgccgcctgtcggcggagcacgaggtcgtcgttctctcgggctcgccgggtgcattgccggccgcgcagaccggccccggcaagccgcgcgtcgtcgcgatcaggaaccggatggcgggcaaggcggcgctggtgcggcgcggcgcttccgagctcctgttcgcgggccgcacgttcttcgcattggtgcgggaattgaggcgaggggacgtggtgctcacggtcactgcgccgttcatgctgccctatgcggtggcggcggcagcaagggtcaagggcgcgcgctcggcgttgatcatgcacgacctctttcccgacgtgctggtgatggcgggtctgttgaaaccaggctcggtcgtcacgcggacgatgcgcgccgccaacagcctgatgttccgcgcgctcaacgccgtcatcaccatagggcgagatgcggagcggccgctgctcagctattccgggatgaggcgcagcaagattcgtttcatcccgaactgggcgacgctcgcgcccgcgccgcggcccgtcagcgcggacaatccattccgcaagtcgattccggcgcgcttcatcgtggggctatcgggcaatctcggcttcacccatgatccggacgtcgtgttcgaggcggcgcggctcctgcaggaggaggcggacattcacttcctgctgtccggctggggcatcggtttcgagcggctgaagcagttgcaggcgacggcgaacctctccaatgtctccttcgtcgggcgtgtcgaggattccgagctcgaagcgtttctcgcttccgccgatgtctggatcattccgtaccggaaggacgtggcgggagtgtccgtgccgagccggttctacaatctgctggcggtggggcgccccgtggtgctggtgtccgagccggaggccgaggccgccttgacggtcgcggagagcaggctcggctgggtcgtgccgccaggccgtgccgatcggctcgccgaagcgatccgcgccgcgttccgttccgacgacgccaccatcgcggtgcgcgcggtgaaggcggcatcgcgtttcgacaagacgacggcgatgaacgcctatgccgagctgatcggcgaattgttgcgcaacccgaacctttcggagcagggatgaacgagcgtcaaccggtcgtgctggtgacgggagcgagcggcttcgtcggtcgtcatctcgtgccggcgctggctcatgccggatggtcggtccgccgtgcggtccggagcccggaaggcgccggcgacgaggtcgtgatcaaatcgatcggccccgagaccgactggcaggccgcgctggaaggcgtcgaggccgtcatccatctcgccgcgcgcgtgcatcacaagcacgaggagcacgcggtccagctgtaccgcaacgtcaacatcgccggaacgctgcatctggcgcgctcggcggcgacggccggcgtgcgccagttcatcttcatcagcaccgctctcgttcacggccgcagcaatgagggccgtgcgccgttcagcgagaacgaggttctgacgccgcgcggcctctacggcatgtccaaggccgcggccgaggctggcctgaggacgctggcgcgcgacaccgatatgaagatcactgtgctcaggccgccgctggtctatggcaccggagccaagggcaatttcgccctgctgacccgtgcgataagcgcggggctgctgctgccctttgcggcgatcaacaaccagcgcgcctttctggccgtgcagaacctgtcgtcgtttatcctgcaccggctcagccatcccgatccagcgagcaacttcgagatattcctggtggccgataccgaacaggtctcgacgcccgaattcatcaggcgcctggctacagcgtccggaaagaacgcgcgtctgttcggcatgtcgccgcgcctgctgtcgacgctgctcaatgtgatgggtcggcaggacacgcaggacagcctgattggctcgctcgagctcaacatctccaaggcgctggcgaccggctggcagccacagatctccatcgacgaggggctgcggcacgcgctttcggatcaggacgcctgagcccgcgagaaccgctgcagcacgagggcgaccgcgcccgcgcctccgaacaaggcaacgatcgtgatcgtgatcgagccggcgcgaaccgtgatgatggcaaggattgccagaacgaggttgagcgcgaatgtctccccgaccacccgctcgaccgtgaacccgttgtcgattgcacgctgatagaagtgtgtgcggtgtgccgaccagaacggttcgtgcctgatgatgcggcgaaacagcgtaatggtggagtctgcgaggtaataggccggcaatagcagcgccggggccggctgcccccggaaggccagctccagcaggcaccagccgagcaaaaggccgatcggcagactgccgacgtcgcccaggaagacctttgcaacgggacggttgaacggcgcaaagcccagcatggcgccgcatagcgcggtggcgatcagcaccgccggccaagagagatccccgagcactcccagcagcagcagcgcagcggtgaccggcacgacttccgccaccgtcatcaggtcgagcccgtccatgaagttgacgagattcacgaaccagacgccggccaggacgatgaggccgcgctccagcccgagcggcagagccggcacgatgcgcgcgctctcgggcgttgtgaacaccactgcgccgacgcaggctgcctgcagcaccagccgcacgagcacgggcagcgatacgatgtcgtcggcaaagccgaccagcgcgatcacgatggtcgcagcgaccagcgccggcgggatcgcgacattggccgaggcgctccagatccaggcgacgaggagagtcgcggcaatcaccgcgatgccagcgccctgcggggtcgggatgcgatgcgaggaccgcgcatttggccgtgccagcgcgtagcgctggagcagggggcggctgatccaggtgacgagcgccgagatcagtgcggcgatcgcggcggcaagcagcagtggggcgccggcgagcgcatcggctgcggagctcactccggcactccgataggggcagatccttgcgcggctttctccgcgctgaggatccagaccaggccgccgacagcgccgaccatgaagaacacggcaccgaacagcagcgagacgttgacgccctcgttggcggaaagtcccgcgaagccgaacgccaggctcatcgtggcttcacgcacgccccagccggcgatcgagatcggcatcatggtgatcagcatcaccggcggcaccagcaaaaagacgtcgctgaagcggaccggggccgcaatcgactgcacgacacaccaggcgatcacgacggccagcacgtggacgaggaccgacaggatcgcgatgatcggcccgcgggtgcggctgaagatcacgcgattggcgatgacggcgcaggcgtgaatgtgatgcgtggcccaccaggtcttcagccaacgccatttcagcgcgccgaaaatcaggaagccgacgccgcccgcgagcgccaggaggtcgatcagcagcagtgccgagcgcccgtgcggatcggtgatgagagtgtagctccagggcaggcttgcgacgatcaggatcgcgagcgcgatcaggccgatggcgcggtcgacgaagatcgagtaggtcgccgcacgccagccggcccctgcgcgtgcgaccagccacagccggaccgcatcgccgccgattgccgacggcagggtctggttgaaaaacgagccgatcacgttgtaacgcatcgcgcggccgagctcgagcggcgctccgcaggcggcgctgatctcgcgccagcgcagcacgccgacgaagatctgcaggaacgtgatcgcgatcgccacgccgatccagaacaggctggtgatggtgaagcgcgaaaacagttcggatagatcgaccttgcgcagcgccagatacagcagcgccacggaaatcacgattttggccgtcgacagcaggattcggcgcatctcgcccgcatgagggtttgcgaagaattgaggcaacccgacgcgaggcgccgaattcggccgctttggtatggtcttggcgccgatcttgcaatagccgtcgtgtaaggacgccatgaggccgcttatggatgcggccagcctattgcgaccctgtcaaagtggcggctaaacaggggccgctagcgatcccagggaacaggatgacggatcaggcaattttggtcaccggcgcggccggtttcatcggcttccacgtcgcccgccagctcctcggcgagggccggcctgtcgtcgggcttgacaatctcaacagctattatgatccggcgctgaagaaggcgcgcctcgagctgctcaagggcgactcccgcttctctttcgtccaggccgatctcgccgaccgcgagacgatggcgaccctgtttgcgcaacatcgttttgccaaagtcgtgcatctggcggcgcaggccggcgtgcgctactcgatcgagcaaccgcaggcttacgccgattccaatctcgtcggctttctcaatgtgcttgagggctgccgcaacaacggctgtcgtcatctcgtctacgcctcgtcatcctccgtttacggcgccaacacaaaactgccatttgcggtcgcggaccgcaccgatcatcccgtgagcctctatgcggcaaccaagaaggcgaacgaggtgatggcgcagtcctacagccatctctatcgcctgccggtcaccgggctgcgcttcttcaccatttacggcccgtggggccggcccgacatggcgatgtttcttttcgttaacgccatcatggcgggcaagccgatccggctgtttaaccatggcaagatgcgccgcgatttcacctatatcgacgatgcgacgcgtgtcgtatcgaagctgatcgatctcgtccccgcgaatgatgcggctgccgcaaatgcgccgtcaaagctctacaatgtcggcaatcaccgcccggaggaactgatgcatgtcatcggtcttctggagcgggagctgggccggacggcgatcaaagaattgctgccgatgcagccgggagatgtgctggaaacgttcgcggatgtcgaggatttgatgcgcgataccggctttgcaccgtcaacgccgatcgagcatggggtccataatttcgtcacctggtatcgggactacttcaaggtttgagatcacgatggacaaacgcataatccccctgatcatgtgcggcggtgccggcactcggctgtggcccgcctcgcgcgaggtgcgcccgaagcaattcctgccgctgttcggcacgcgctcgacgttccaggacacactgctgcgcgtgtccgatccgcagctgttcgatcgtcctattgtcatcaccaatgcgtcctatcgcttcatggtgctggagcaactcgccgagatcggcatcgaggcggacgtgatcctcgagccgatgcggcgcgattccggccccgcgatcgccgccggcgcggtgttcgcgcagaaccgcgccagtgaagcgatcgtgctcgcgctcgccgctgaccacgtggtgcaggacaatgccgccttcgtcgcggcctgccgcgagggacttgcggcggcgaatgccgggcgcatcgtcaccttcggcgtcaagccggagcggccggcgaccgaatatggctacatcaatccgggggaggtgatctcgggcgaggtgcatgccgttgcgcgcttcgtcgagaagccggatgcggtgaaggcatccgactacgtcaattcgggttatctctggaacagcggcaacttcatgttcccggccgccctgctgctcgatgaatatcgcaaggtcgatgctgcgagcgtcgaggccatcaccaacgccgtcaaccatgccggccgcgatctcggcttcgtgacgctggagcccgaggcattcgccgcggcaaaggcgatctcgatcgattatgcggtgatggagaagacctcgcgcgcagccgtggtgccggtgtcctgcggctggtccgacgtcggctcctggcacgcggtgtgggagctgtcggagaaggacgcgctgggcaatgctgcgcatggcaccgccgtgttcgaggactcccgcaactgcaacgtcacgacggattccgcgctggtcgcgctcgagggcgtggacgatctcgtcgtggtcgcgaccgccgatgcgatcctggtctcgcgccagaaggatgccaatggtctgaagcgcctggtgacgaagctgaaggcggtcgcacccaaggtcaccgaggagcatctcaaggtgcaccggccctggggcagctaccagtccgtggacaatggcgagcgtcaccaggtcaagcgcatcgtggtgaagccgggcggacggctgtcgctgcagaagcatcaccatcgcgccgagcactggatcgtggtgcgcggtaccgcccaggtcacggtcaacgagaccgtgaagaccgtgcacgagaacgagtccatctatattccgatgggcgccgtccaccggatggagaaccccggcaagatccagctggaattgatcgaggtccagaccggctcttatctcggggaagacgacatcatccggattgaagacgactaccaaaggtcgtaaccagcaaactccgactcatgcgacccgggccggaagggcggtatccctttcggcttaaggcccggggaacgtgtaactttttgaatcaaatcgtgtccgggccgccagcgcgccattcgccacatatgtgacgcccgtgctagaagcgcgccggggatttgggttgaatcggggtttgctcagatgagttccaggggatctgcaccggtaaaggccgccttgcgcgtcggcgtcattggtgccggcgtgatgggcagcaaccacgcgcgcgtgctcagcgggcttcccggcgtcacactcgtcggtgtcgtcgacccctcgccggcgcatcgtgcgcgggccatggaacttgccaattgcgagagcttcgagacgctcgaccagctcgtcgccgaaggcgtcgatgccgtcaccatcgcagcgcccacccatctgcatcacgaggtcgcgctcgcctgcatcgccaagaacatccatgtcctggtcgagaagccgatcgcttcgacggtggacgaggggcacgagatcgtcgctgccgcgcaaaaagccggtgtcacgctgatgatcgggcacgtcgagcgcttcaatccggcggtcgctgccgtcaagcaggcgatcgcgggcgaggatatcctctccatcgcgatcacgcgggtcggcccgttcccgccgcgcatgtccaatgtcggcgtcgtcatcgaccttgccgtgcacgacatcgatctgatccgctggttcaccgaatccgacatcgtcgaggtgcagccgcaattgtcgagcgcggtggccgagcgcgaggatatcgcgctgttgcagttccgcaccgccaacggcgtgctggcccacatcaacaccaactggctgacgccgttcaaggcgcgcagcgtcacggtcgcgacccgcggcaaatacgtgatgggcgatctcttgacgcgccaggtcaccgagtgcttcggcttcaagcccgatggcagctactcgatgcggcatctgcctgtcggccacgacgagccgctgcgtgccgagctgatcgcgttcctgaaggcggtgcgccatggcgagacgccggctgtgacgggcgatgaaggcgttgccagcctcgcgatcgccacccagtgcctggagacgccctcgcgtcccgcagccacgtcgccggctcgcaaggctgctcgccgcgtcgccggctgattccttccatgtcgtccgctcaaacgtcacaaggtgccatgaaccagcatctgcgttccgaacctattcccttcatcgacgtcgcctcgcagcggcgccggctcggcgcctcgctcgatgcagcggtgaagcgcgtgatggaccattgccagttcgtcaacgggcctgaggtcttcgagctggagaagcagctggcggcgtattgcggcgccaagcacgtcatcgcctgcgccagcggcaccgacgcaatcctgatggtgatgatggcgaagaatttcggccccggcgatgccgtgctgtgtccgtccttcaccttcatcgcgacagcatcgccggtggcgcggaccggcgcgacgcctgtctatgtcgacgtcgacgaggcgaccttcaacatgagcccggagtcgctgaagcgcggcatcacgacagcccgcaaggcgggcctgaagcccgtcgcggtgattccggtcgacctgttcggccagccggccgatcatgatgccatcgcggagatcgccaaggccgagggcctgttcgtgctcgacgacgcggcgcaaggcttcggcgcgagctacaagggccgcaagctcggcacgttcgggcatgccactgccaccagcttcttccccgcaaaaccgctcggctgcttcggcgatggcggcgcgatcttcaccgatgaggacgaactcgccgccaccttgcgcagcatccgcgtgcacgggcagggcgtcgacaaatacgacaacgtgcgtctcggcctgaccggccggctcgacaccatgcaggccgcgatcctgatcgagaagctgaagatcttcgatgacgagatcgccgcccgcaacgaggtcgcggagcgctacgcgcgcgggctgtccaatgtcgtcactgtcccgcgcctcgcgcccggcaacacctcggtctgggcgcagtacaccatccgcctgcccaaaggcaccgaccgcgacggcttcgcggccgcgctgaaggcccagggcgtgccgaccgcgatctattacggcaagtcgatgcatcagcagaccgcctacaagcactatccggtcgccgagggcggcttgccgggttgcgagagcctgtcgcaggacgtcatcagcctgccgatgcacgcctatctgaccgaagccgaccaggagcgggtgatcgccgccgtccgcggcgcgctcgcggggtgatttgcctctcgcctctcccgaagggagaggtcggatcgcatcgaagatgcgatccgggtgaggggttacaaactcactgaatgccgcagcccctcacccggattgccgcgcaatccgacctctccccgtcggggagaggtggacaccgagcaagccgcttttttgatctcaaggtctttcaaagccttatcggcggcccgataagcctctagaagagtccgcatgctcggacgcatctttacggtcggtggttacacgctgctctcgcggctgacggggtttgtccgcgacatcatgctcgcggcaatcctcggcgccgggccggtggccgacgcctttttcgtggcgctgcggctgcccaatcatttccgtgcgatcttcgccgagggtgccttcaacgccgcctgggtgccggcctatgcccacgtccatggcgagaagggggaggcggcagcaagcctgttcgccgaccgcatcttcacgctgctcctggcctcgcaggtggtgctgttggtcgttgcctggctgttcatgccacaggccatgagcatcctggcgcccggcttttccgaggacgccgcgcagcgcaagctcgcgatcgagctcacccggatcacctttccctatttactgctgatcacgctggtgacgctctacggcggcatgctcaacgtcatgcagcgctttgccagcgccgcggctgcctcgatcttcctcaatgtcgcgatgatgatgacgctggcgctggccgcctggtttccgaccgcgggccatgcggcggcctggggcgtgctcatctccggcttcctgcaatatttcctgctcgccggcgatctcgcccgccatggcggcctgccgcgctttgcgcccttgaggctcgacgaagacatccgcgacttcttcaaggcgctgggaccggcgacgctgggctcgatgggcacccaggtcgcgctgttcgccgacaccatcatcgcgaccttcctgcccgccggcgcgctgtccgcgctctattatgccgaccggctcaaccagctcccgatcggcgtgatcggcatcgccatcggcacggtgcttttgccggagatgtcgcgacggatcacggcgaacgacgatgacggcgcgatgaaggcgcagcgccgcgccttcgatttcacgctgctcttctcgatcccgttcgtcgcggccttcctcaccgtgcccgacgagatcatgcgcgcgctgttcgcccgcggcgccttctcgcaagccgatgcggtcgcggccggcggcacgctcgcggcctatgccattggcctgatcccgttcgtgctgatccgcagcgctgtcgcgaccttctatgcccgcaaggataccgcaacgccggtccgggcgtcgctgaccggcatcgccgtcaatgtcgcactgaaggtcgccttgatgggatcgctcgcgcagatcggccttgcgctcgccaccgccgtcggggtctggaccaatctcttgctggtgctcttcttcgcagtgcggcgaggtttcctcgtgctggatcgcggctggctgctgtcgctcggaaaattcctgctgaccggattagtcctggctgccgcgttctggttgatcgcgcattttagcggtccgttattgggctcgatacacttccgcgatgagctgacgctggttgtgctcgccgtcggcggcgccatcatttacgcgattgcggtcctcgcgctgttcggccgcaattgggtgatctcgctggtccgtggctagtttttgttgccaacccgtttgccttgccagtttttccacggcaatatggcccacaaaacaaccatgagaacgggaacagaaaatggcggctcccatcaagttcggcgttggccaaagcgtgctgcgcaaggaggatgacgcgctcatccgcggcaagggccgctacaccgatgattttgcgccgcaggccgcgcttcgctgcctggtgctgcgctcgccgcatgcgcatgccacatacaccatcgatgcgagccgcgcacgcagcttgccgggcgtcgcgctgatcctgaccgccgaggacgtcaaggatctcggcaacctgccgtgcctgttcaatctcgagaccgatccgttcaccggcccgccttacccgatcctggccaaggacgaggtgcgccatgtcggcgatgccgtcgccttcgtggtcgccgagaccatcgaccaggcccgtgacgccatcgaggcgatcgacgtcaaatggtcgccgctgccggcagtgaccggcgtcgtcaacgcggtgaagaagggcgcgccgcaggtctggccggacaagccgggcaacgtgctgttcgacgtctcgatcggcgacaaggcggcgacggaagctgccttcgccaaggcgcatgcggtggccgagatctcgatcgtcaatccgcgcgtcgtcgcaagcttcctggagacgcgcgcggcggtgtgcgaatacgacgccaagcgtgaccatctgacgctgacggtcggcagccagggcagccatcggctgcgcgacatcctctgccagaacgtgctcaacatccccaccgacaagatgcgggtgatctgccccgacgtgggcggcggttttggcacgaaactgtttccgtaccgggaatacgccctgatggcggtcgcggcgcggcagctgaagaaggcggtgaagtgggcggccgatcgcaccgagcatttcatgggcgatgcgcagggccgcgacaacgtcaccacagccaagatggcgctggccgaggacggcaagttcctggcgatggactgcgacctgatgggcgacatgggcgcgtatctgtcgaccttcgggccctacatcccgcatgggggcgccggcatgctgccggggctttacgacattcaggcattccactgccgggtgcgcactatcttcaccaacagcgtgccggtcgatgcctatcgcggcgcgggccggccggaggccgcctacgtgatcgaacgtctggttgatgcctgcgcgcgaaagctcgacatgacgccggacgcgatccgccgcaagaacttcatccagccgaaggctctgccgtacaagaccgcgaccggcaaggtctacgattccggcgatttcgccgcgcatctgaagcgcgcgatggagatcgccgagtggaaggagtttcccaagcgcgcgaaactcgccaagaagcatggcctgatccgcggcatcggccttgcgagctatgtcgaggtgtgtggcaccatgggcgaggagaccgcgaatgtgcggctcgatcccaatggcgacgtcaccgtgctgatcggcacgcagtcgagcgggcagggtcaccagaccgcctatgcgcagatcgtcgccgagcagttcggcgttgcgcccgagcgcgtccatatccaccagggcgacaccgacgagatcgcgaccggtctcgggaccggcggctccgcttcgatcccctcgggcggcgtcagcgtcgaacgcgccacgcgcgaactcggttcgaggctgaaggagattgcggcgcaggcgctggaagcgagcgccggcgacctcgaaatctccgaaggcgtgatccgcatcgccggtaccgaccgctcaatctccttcgccgatctcgccaagcggcccggcgtggatccgtcgaagctcaacggcagcgcgacgttcgccagcgccgacggcacctatcccaacggcacccatgtcgcggaagtcgagatcgatccggccaccggcatcatcaagatcgtcaactatgtgatcgtcgacgacttcggcaagacgctcaatccgctgcttctggccggacaggtgcatggcggcgccatgcagggcatcggtcaggcgctgatggagcaggtggtgtatggcgccacagacggccagctcatcaccgcaaccttcatggactacgcgctgccgcgcgcggcggacgggccggctttcgtgttcgagaccaacaacatcccctgcaagaccaatccgatgggcgtgaagggggcaggcgaagccggggcgatcggctcctgtccggccgtcgtcaacgccatcatcgatgcgctgtggcgcgaatacaagatcgaccacatcgacatgccggccactccggagcgggtgtggatcgcaatccacgagcaccatcgccgtcacagcctgtgatccccaatcaaacgcggaaagttcgggacaccatattcgacagcgatccaatgcgtgacgatccgccgccgcgctttggatggaatgaaatctgccgggcggtgttagtccattgaggggtcggcacgatcctgcatcaggagaagggatgtttcgaatgaagcgagtgttggtcgttgggggcgcgctgttgctcggcatgggcgccgtttgggcgcaacaggactccgtcaaggaggtccaaagcctgatgaagggcaacggcaagaacgccggggcgatgtcggcgatggtcaagggcgagaagccctacgaccaggccaccgtggacagcgcgctcgcgcagttcgaggataccgccaagaagctgccgaacctgtttccggccagcgccaagggcgtgaagctcgatggcgattactcgacctcgcccaaggtctgggaggacagggccggcttcgatgcgaaaatcgcgagttttgccaaggtcgtcggcgaagccaagaccaagatcaaggacctcgattcgctcaaggcaacgatgcctgccatcggcagggaatgcggcggctgccacgagacctaccgcatcaagaacggctgaggcgggaagctttgtagcccggatggagcgcaagcgaaatccggggggccatccgagttgatagttcgtcccggattgcgctccgctccatccgggctactgggatcagccggctatcggaatcgagaagggcggttgcgaaagcagccgctctttttccgtctgcaaggtctgacggaccgccgtccgagcagttatcttcgcagcaacggccgtggcgttgatgcgagtcggcacgcctccttcccgactgcctcgtgacgtcaggagttccaacccgcggcgatcacctccatcaggacaagcgagacaggccatggcgaaaccgttcccctcgaagacccacatcggcaaccatatgctgcatcctgagaccttgatgctgacctatggctatgatccgcaattgtcggaaggcgccatcaagccgccggtattcctgacctccaccttcgtgttcaagacggccgaggatggccaggatttcttcgactacgtcgcgggccgccgcgagccgcccgaaggcatgggcgcgggcctcgtctattcgcgcttcaatcatccaaacagcgaaatcgtcgaggacaggctcgcgatctacgagcggaccgagagttgtgcgctgttctcctccggcatggcggccatcgcaaccacgatcctggcgttcgttcgccccggcgacgtcatcctgcactcgcagccgctctatggcggaacggaaaccctgttgacgaacacgcttgcgcgcctgtcgatcggcgccgtcggttttgccgacggtatcgacgaggcggcagtcaagcaggcgtcggaggacgccatgggcaaggggcgggtttctatgatcctgatcgagacgcccgccaatcccaccaacggcctcgtggacatcgcaatgatccgccgcgtcgccgacgcgatcggaaaggcgcagggacacacaccgatcatcgcctgcgacaatacgctgctcggaccggtgtttcagcggccgatcgagcacggcgcagatctctcactgtactcgttgaccaaatatgtcggcggtcattccgacctgatcgcgggtgcagcgctcggctcgaaggcgatcatgaagggcgtcaaggcgctgcggggcgcgatcggcacgcagctcgatccgcattcctgctggatgatcaaccgctcgctcgagacgctgagcctgcggatggagaaggccaacgtcaatgcacgcctcgtggcggacttcctgcgcgagcacccgaaggtggcaaaggtccattacctcggtcatcacgaggagggttcgccggccggacgtgtattcacgagacaatgcctgggggcgggatccaccttctccttcgacatcgccggcggcaaggaagcggcagtcaaattcctcaatgcgttgcagatcctcaaactggcggtgagccttggcggaacctaatcgctggcgagcctgcctgcgactatgacccattccggcgttcccgccgacatccgccgcaaaatcggcgttctggattccacgatccggctgtcgatcggcatcgagaacgcatcggacctgatcgcagatctcacacaggcgctgaacgccgcttgagcgcaatcgaacgcgctcagagggcggtgtcgttcgtgacattctccgcgccgaacccgttcggaccgccttccaagagaccgtatttcagtctattcccgttcccggccagggcgagctgagttcttcgcgctggagccacgacgagatcggaataagtgcgcccgcaacgagtgaacgagccgcatgttgcaacgaacaattctggtggtgctcctcgctgcgattgccgctgccggcgtctattggtggctcagcgcgccggtggttgcggccgcgagcgccacgccctcgcgcacgcctgatctcgccaatggcgaggtgatgttcaacgccggtggctgcgcgtcctgccacgccgttcccaatcagcccgaccgtctgaggctcggcgggggcgtttcgatcaagtcgccgttcggaacgttccacgcgccgaacatctcgccggatccgaacgacggcatcggcaaatggacggaggcggatttcgtcaacgcggtgatgtatggcgtctcgccgtccgggcagcactactttccatcgtttccctacacgtcctatcagcacgccaggcgcgaggacgtgctggatctctttgcctatctgaaaacgctgccggcggttgcgggcaaggtgcgcgaccacgacctcggctttccctttcacatccgccgcaatgtcgggatctggaaacgcctgttcatggacgacaggccattcgttgccgacggtagcaagtcgccgcaatggaatcgcggcgcctatctcgtcaacagctttggccattgcgccgagtgccacagcccgcgcaatgcgctgggcggcatcatcgcaagccagcgctttgccggcggtcctaatcctgaaggcgagggatgggtgccgaacatcacccagaagcgccttggcgagtggagcgtgaaggacctcgcctatttcctgaagaccggcgaactgccggatggcgacagcgtcggcggttcgatgacgcgtgtgatcaagaatacctcgcaattgccggaggcggacctggcggcgatggcggagtatctcaagtcgctgtcgccggcggaggggccgccccggccggcacgcaaggaggggagctagggcggcagcgctagccggtaccgaacgccttgaacgtgatgatggtgagggtgtcctggatgcccggcagcacctgcaccttctcgttgacgaaatgaccgatgtcggtgtccttgtcgacgtagaacttcaccaggaggtcgtactggccggccgtggagtagatctcggaggcgatctcggcctcggcaagcgcattggccaccgtataagactggccgagcttgcacttgatctgaacgaagaagggaaccatcgcgagcactccgaaagcctacctggcggccaataggccaaacccggccggatttagcaagcggcgggccgacggcacaagccgccagatgcgagctcgagcttggctaggtggcaacggctgccacgaccaatgcgtccctgagccgctgggcaagctcgaccttgcggtagggcttggtcagcacgatcgcttgcgcctgcgcgcggccctgctcgaccagggtctccagcgcgtagccggaggtgaaaaggaccggcagaccgggacgaacccgccgcgcctgatcggcgagctcccagccgctcatgccaccgggcatcacgatgtcagtgaacagcaggtcgatgctgggatcgctccgcagttgctgcagggcatccttgccgttgaccgcggcaacgacgcgatatccgagagcttccaccctgcgaatgacggaggagcggacgaacggatcgtcctcgacgatcaggatcgtctcgtagcctcgcggcgccgtgtcctcgccttcgggaagatcgacgtgtgattgtccggtgctggcgcgaggcaggtagatcctgaccgtagtcccgaggcccgcctcgctgtagatcgagacatggccgcctgattgctttgcgaagccgtagaccatgctgaggccgaggcccgagcccttgccgacctccttggtggtgaagaacggctcgaaggcgcgttcgatgacatcgggcgtcatgccttcgccgtcgtcggcgaccgagatcaaagcgtagctgccgggtacgacttcgggatggagggcacggtaatcgtcgtcgatcgcagccaactccgtgctcagcgtcagatgtccccctgatggcatggcatcctgcgcgttgagcgcgagattcagcacggcggattcgagctggctgcggtcggcaaaggcgaggaccgtgccgtgtccggaggtcgtcctgatctcgatgttttcgcgcaacgttcgcttgagcagcttgaacatggaatcgagcaggctccggcagtcaatcgattgaggctggagcagctggcggcggctgaatgcgagcagccgctgcgtcagctcggcgccgcgctcccctgactggcagatgtcgtcggcaaagcgccgcagctccggccgctccttgagctgctcgccgaggtgctcggcattgccgatgatcacggtcaggagattgttgaagtcgtgcgcgataccgccggagagctggccgaccgtctccatcttctgcgcctgctgaagctgctgctcggtcagcttgcgcgcggtcaggtcgtggacgatgccgacgaagatcagttcgccgtcctgcctggcctggcccaccgagaggtccatcggaaaggtcgagccatccttacgccgggcgatggcctcgccgccggtcgcgaaatgtctcgcgcggctgtcgggcgttgcttccgcctctggcatcagcatggagacgttccggttcatcacctcgtcggcgcggtagccgaacaagcgctcgcaggccggattgaacagcaggatacggtcatgcgcatcgaacaggatgacaccgtcaaccgcggtctccacgatcgcggtgaggcgcgcgacactggcgcgcagcgcgcgttgggcgtcgctgacttgctgaagcaggagcgcggcgtcgcggctcttgatctcctcttcctcgagcgccgccttgacctgccgaagctcgaacggtgatggaatggtcaggaccctcggcagcagtggccagagcgcggcggcggtgaagaccgacgcgaccgccgtggccgccttgaccatgccctcgacgccatagaccggaacccagagcgtgtagatcgacagcacatggctgaggccgcaagccatgatgaagatcgcgaacgcccagtagacccagccgaacttgaggtcccggcgcttgatgaccagtatcgcgagggcaaacggaatcgagaaataggcagcggcaatgcaggcgtcggaaacgacgtggagccagatcaactccgggtcccacagcaggcagatgccgtgcggcgacagcatggacgagtcgaggagacgttcgaaaaaggcccacatcgttccaccccaagttcctgtttcaggtggcttgcgggccggagcggcgcgcaatcggcgtcactcgacggttccaccacctgacgtctcacgcaatcggcgaagcacgctaaggtttgagactataccaagggcccggcgcgatgcattttcaagcccgcatcattgcgggcgccgcgctgtgcccgactgatccgctgggtggcatcgccctcgcgaatcacgacggcgggcggcttggcgtggcttgctggcgttccacggtcgcgctaggacaggccatggcgatgtcctccagcatgtgtatccggccatgacgaccccggtcgccctcactatcgccggctcggattcgagcggcggcgccggcatccaggccgacctcaagacatttgccgcgctcggcgtttacggcgcctccgtgattaccgcgctgacggcacagaacacgcgcggcgtgagcgggattcacgcggttcccgccgacttcgtcaccgcgcagatcgacgccgtgttcgccgacctcgagattggcgcggtgaagatcggcatggtggcccaggtcgccagcatcgacgccatcgccgccgcgctgtcgcgcttggcgccgcggcacgtcgtgctcgatcccgtcatggtggcgacctccggcgaccgcctgctcgccgccgaggccgtcgatgccctgcgcacgggactgatacccttggcctcggtgatcacgccgaacctgccggaagccgcggcgctgctcgacgaggttgttgcaacgagcgaagccgagatcgaaagccagggccgtcgcctgctggcgctcggctgccgcgccgttctgatcaagggcgggcacggcgagggcgccgagagcatcgactatctggtcgatgcgaacaacaccatcgcgctggcggccccccgggtcgccacccgcaatacccatggcaccggatgctcactgtcgtcggccatcgcggcaggtctcgccaagggcgaagatctcgagcgtgccgtgcgcaatgccaagtcctggatcagcgccgcgatcgaggccgccgaccgcttcagcgtcggtcatggccacgggccggtccaccatttccacaggttctactgacgcgggccgtccgaatggggacggggggtgcgcggccgcagtttcaccggcacccggtgccctccatgggcgcccgctgcgaccccatgtcgcctgattgtcgcatgcgactgatattcgcggggagggcgaggcggaacttgattcgaatctgaggggcctcgagggttcaccggtcatccccctgtcacgggacattgttacaggctggcgcatgggaagttacgatgtgagtgacgaaagccaggagcggcgctttcgcacgttgttcatctccgacgtccatctcggagcccgcggttctcaagccgatcttctgcttgatttccttcgctaccacgatgccgacacgatctacctcgtcggcgacatcgtcgacggctgggcgctgaaatcgagctggcactggccgcaatcgcacaacgacctggtccagaagctgttgcgcaaggcgcgcaagggcgccaaggtcatctacattcccggcaatcacgacgagttcctgcgcaactattacggcacgcatttcggcggcatcgacgtggtcgagaacacggtgcacaccggcgtggacggcaagcgctatctcgtcatccacggcgacatcttcgatctggtggtgcagaacgcgcgctggctcgctcatctcggcgacagggcctacgacttcgcgatccagatgaatcgcctggtcaacttcttccgccgcctgttcggcgtgccttattggtcgctgtcgcaatgggccaagcagaaggtcaagaacgccgtcaactatatcggcgcgttcgagcaggcgctcgcggctgaagcacgccgctacgacgccgacggcgtgatctgcggccacatccactacgccgtgatccgcgacgaggccggcattcgctacatgaattgcggcgactgggtcgagagctgcacggccctggtggagcatgacgacggccatttcgagatcatcacctgggcggatcatttgcagaggccggcagtcgtcccgcaggtcgcggcgagagccgcatgacaaggaccacatgatgcgcatcctggtcgcgaccgacgcctggcaccctcaagtcaacggtgtcgttcggacgctgaccaagctggccgacgccgccagaggcctcgacgtcgacttcacgttcctgacgccgcaatcgttccgcaccttcgcgatgccgagctatcgcgacgtgcgcctcgcgatgccacgcccggcccggatcgcaaagctgatcgaggaggcgcgccccgacagcattcacattgcgacggaagggccgatcggactgatggtccgccgctattgccgccagcgcaagctgccgttcacgaccagcttccatacccgcttccccgaatatgtccgtgcccgcgtgcccgtgcctggctcgctgatctggcgtgcgctgcgccgcttccacgagcccagccgtgccgtgatggcggcaacgccggcactggcgcgcgaactcagcgagcgtgggttcgagaatgtcgtgctgtggccgcgcggtgtcgacaccggcttgttccatccccgcgccgtcgatctctgtctgccggcaccggtgtttctctcggtcggccgggtggctgtggagaagaacctcgaggccttcctcgacctcgacctgcccggaaccaaggtcgtcgttggcgacggcccggcgcgcggctcgctggaagaagcctatcccgacgcgatcttcctcggcgagaagcacggcgaggacctcgcggatatctatgcggccgccgacgtgttcgtgttcccaagcaagaccgatacattcggcctggtgctgctggaggcgctcgccagcggcctgccggttgcggccttcccggtgaaggggccccgcgacgtgatcggcgatgcgccggtcggcgcgctcgatcacgatctgcgcaatgcatgctttgccgcgctcgagatctcccggcaggactgcgtcgagttcgccgccaagtacacctgggaggtctctgcgcgggtcttcatcgacagcattcaggccgtcggggcggtgctgccgggccggagcgacgcggaacggccgcgtttcgtcgcctagatcaggaaggaacctcgcgcggaggtgtcttgcccggccttcatgggccgcgataacattccaccatgaccgaacagctcctccccatcggccctgccgatatcgacgccgcagcgcgcgtgatcgcgccttatgccatccgcaccccgctgttgtcctttcccgtgctcaacgagcgcgtcggcgcaaaagtgttcctgaagccggagatgcttcagcgcaccggctcgttcaagttccgcggtgccttcaacaaggtgttctcgatcccgcacgacaagcgcgccggcggcgtcgttgcgttctcctccggcaatcacgcccagggcgtggcggccgcggcaaagatcctcgagatgcaggccaccatcgtgatgccggcggatgcgccgctgtcgaagcgcgagcgcaccaagtcctacggcgccgaggtcgtgctgtacgatcgcgaccgcgacgatcgcgaggcgatctcacgcggtatcgccgagaagcgcggtgcgacgctggtcaagccctatgacgatcccttcgtgatcgcagggcagggtacagccggccgcgagatcgcggaagacatggcgccctcggcctcagccccgacatcgtggtggcgccggcctccggcggcggcctgatcgcgggcgtcgccaccgccgtcaaggcccgctatccgcaagccgagatcgtagtggccgaacctgaatccttcgatgaccacggtatttcgttgaccgcgggccaccgcgagccgcatcccccggcgggccgcaccatctgcgatgcgttgatggcactgatgcccggtgagatgacgttcgcgatcaacagcaagctgctcgcgcgtggcgtcactgcatcggacaaggaagtcggtgctgccgttgcgttcgcctatcgcgagctcaagctggtcgtcgagcccggcggtgccgtcggccttgccgcgctgctcgccggacgtctcgacgtctcaggcaagaacgtcgtcatcgtgctctccggcggcaatgtcgacgccgatctgttcgccgagctggtggcctagtcgtcgcccggacttgtgaaggatccgggcctgcgcctgtcggcgcttcccggactgaaggcgtgtaagggctgatatgagaaaggggcagagcgtcaccgctctgcccttcgtttgttggttcgaactatccgcttgcttggtgcgacctctcccgcttgcgggagaggtcggcacgcagcgccgggagagggcttttcctcttggggttgtcccgttgcggaaagaccctctccccaactctcccccgcaagcgggggagggagcgcaccttcttcatcgcagcaatcagcgcatgaagccgccgcggcggttgctgccgccactcatgctcggcgcctggttcatcgactggcggaagttgttgttgctgctgaccatgcggctcggcatcgtgttgagctgcggacggttgttcagcacctgcaccttgctcaccggattgttgttgggcttcacgatgccggtgttgccattgttgatgcggatcgggtggttctgcgtccgaacgggcctcacatcgatcttcgtgccacccttgccgccatgcaccggcatggtcgcgatcttgcccggcgagccgttcgtcgtgccgttggcattgccggttttgttgccgccgtgcggattgttggtcgcgggcagcgtcaagatcttaccaatgccgaccttgccgttggtcgtgttggtcggtgcagggagcgtgacgatcttgcctggggtctgcgtcggcgcgccgttgtgctggttgggctggttgttgcccgagggcagcccgacgatcgggccgccattgccgggcttggcgatgacgctgccgtcgaccggcttctgcaccagcggcaggttgccacccatctgcgcgccgccattgccctgctgcatcagcggcatgtatttgggctggcccagattgccgatcttgaaggtcggggcaatgctctggggagccaggaacttggtcgcctgcatcagggggatctgcttcggctgcgcctgcagcttcagcgcgatctgtgcataggggctgttgccatagctgtcatagaagctcttataggcgaccggcgaattggcgagcaccgccttgtgccaggcctgcgagatcaggatattgttgagcagccagcggacgtggtcgcacagcgggtcgtgcgggtacatcctgatgaactcctgataatattccggccggccttcggacacgacgtagtcataggcctggcgggtcgagcggctcggcagattggacgccatctgcaccaccggcgccttcaccggcgcacgattggcggcaacggcggtgtcgccgaagaaggtgaagtcggaggtcagcgacgaactctcccacgggatctgcgcaccgctggtcgtctggttcacctgcagccgcacacgcttgaacagctgctcaatcggcacgttgggctcgcgtgcgacgttcaggaacgcctgcgtgtacgggctgtggccgcccgtgccgtcgagcgcttctgcgcccggggcagtcgagtagccgacgatcgagccgttcggcgcatcgacgatggccaggccgcggccggcatcgttgacctcagggaagggattgttgcggcatgcatcgagaatgacgatgcgcatccggctcgggatcgtctccagcgtcgacatcacgtcgacgaggcgcaccgaattgttgacgagatcggtggggttggacactttcgcgtccacggggacgaggtaattctcgccggcgagctgcacgccgtgaccggcgtaatagaccatcgccaccgtgttcggacctcgcgatgcgaccttggcggagaaatcctggacgacgcgcagcatgtcgttctgggtcaggtcggtcgctgcgaccacttcgaagccggccgagttcaggaactgggccatcgattgggcgtcgtcgtcggggttcgcaagctgcggcgcgttctggtagttcgcattgccgatgaccaaggcgacccgctgctccgggccctgcaccgcggtgggagccggctggaccggggcgacttgcgcggaaacaggcccccaggcgaagccgaacaggctccccatcaggctaaccgtcgtcaggaaaagctttaggcggaacatggcgtgctcctttggcactcatctcgatgcgagattggttgcgagcaagcctggctgcgttcgagtctatcgtccgtgatccctatcaccatgctggcatgcgtgatctaaatcacgccgggaacctgctatggtgaacgaccgattgggaggtgagttcgtcacatgctgaaatcgatcgatccggtcctcacgcccgacctcctttggctgctcgccgccatgggccacggcgacgatctcgcggtcgtcgacgccaaccatcctgcggcccgcatcgcgcagagcacatcgtcgcagcgcctgatccagttgccgggcctgcagatggagacggctgtccgggccatcatgacactctttccgctcgacgatttcgatcccgatccggtccgcgtgatgatgccagtcgatgaccccgagcgcgtgcccgaggtgcagcgcgcggtgctggccgagatcgaacgtggggccggacgcgccgtcgcgcccggcaagctctcacgcacggatttctatcgcgcggcggctgcggccttcggcgtggtgcaggtgggagacagcaggggctacggctgcttcctgatcaggaagggagtcatcagctagcgcggcgcatcagctccgaaggccagccgattcggaccaataggccgtcagggccgttgatgcccacttcgtacatgccccattcgcggtggcgcagcacgccgcccggacggatgatcagatcttcgacgcgtgcggcgatcgcctcgacgtctggcgtgcgaatgaaaatgccgaaaggattatgctgcggcactcgccatgggccgtcgccagcttgcgtgagatgcacctcgcatccccagccgctcatgatgacatagccggcgtcgccgccggtgcgtgcgaagccaaggcgctcccagaacggaatcgccgcgggaagatcgttgttcggaatgatcgcgaaggcgccgacgcgcgggagctcagacatgggttcattccacttgcagacgtcctcacagctcgtgctgtgccttgccagcctatcgagacaggtccttgagcagaagcggcgaaaggcctcgcactcgaatttgggtggccttctctcaaccgcctgtctattctcgatccatgtctcgccctttgtgtctattcgttgctgtcatcctgtcgttgctgccggccgttgcgcccgcggagcccgcgcaaaagcgccccaagccggtctggaagggctacggcttcctgccgggctatcgccagccgctgagcaacagcattccgctctacaaacagaaggacgcgatgcggcgcatgtcgcgcgccgaccggcgtcactggtacatcgacccggttccgcaatattaccgatggaacggcgagtggcattatttcggccggccaggcttcaacggcggacgctacaatggcggcagtttcggtccgtgctggacgcgaacgccgattggaccgatctggaattgcggatgatcgggtagcgcgctgcggcggatccgtcgagagcggacgtccgttacgagaagaacgcgatcttctcggcctgggtcatgcggcggatcggggcgagcgggtcgttggctggcgcgcggggtttttgcagaatgccgctggcgaggatggtggcgccgagcgacggttcgggcaaagacgctggcagcggcgagggcatcggcagcgtcgcggtcggtgctgcggcgaatgacgccgccgccgccatggccggggccggctgctccatctcggccgcggcctccgcaatggcgtcggtcaggcgcgcgagcgatttcatcgcgatcggcgcgtccgcgggctcctccgcggctgctgcgacgactggctctggcgcgatcggctccggcagtgcggcggcaacgggtgttgcaacctccgccgcaatcggttccggcgttggcgcgaccatctcgaccggttcgatgatctcgtcgaagtcaggatcgggcgcggccatctccagcgcgatggcgtcgaggatggcttcgtcctcggcttccgctgccgcgtcgaatgcgaccgcgtcgattgcctccgtcaagacggccggcggttcaatcgccggctcttcaagcgaggcgtcctcaagcgcggcaccgtcgggagcgacgttgtccatagcggctcttgcaagaccgagctggctttcggcgacgatctccggcgcgacggccgcgtccgttgcctgatcggcaacggcggcagtttccgcgacgccagctgcttcgacgtcgggagctgctgcgatctcctcctgcatctccgtaaaagccacgggagcttcgctggccatcgccacaggggccgtctcgacaggcgcgctttctgcgatggatgacggcggctcctgctccggagcccgcgcagaagatgcggcctgcggcgtagcgtcgccgccaagctgctcgacccgatccctcagcagatcgaaggccgccttgagctcgaggcggggatcgatggtcgacagctggccgcaggcagcctcgatcgaggcgagctgcgaatcaatgagatcgcagatccgcccgtcggcgccgatctcgcgccagcgccaggagatctccttgatgatgcgcacgccgcgcggtatcggcgcgaggctggcctcgatcgccgcgggattggacgccgcgatcgcgatcgtctcagcctcgccgatcgcgcggcgtatctcgaccagcgcctcgggcaggcggtcctcgacgacgggttggcgctgtgccgccagggtttcctcgatcttcgcgaccgcatcgagcaccatgcgcgtgtcggcattgcggttgcgcttggcatattcgccaaggaaccagcggccgcgcgcggtctccatgaaggcttcgcggatcgcgtcgtaatcctgctcgttcggctcggccgcgcgggcagacatgggcgagagggcgaatgcttcgttggccatgacaatctcgtcgcgcaaatcaccgcgcgttactgtaacgatcaccacgatatcgaccgaatcgcaattggtttgatgcagtccgaatcacaaatccccatcgcggcagtgcagaagcggcgattcgccgtgagcctcgcggtgttctattcggccttctttgcggttctcggcacgcatatgccgttctttccggtatggctgaaggcgatcggcatcgacgcggcctggatcggactcatcaacgcgctgccggcgatcacgcgcttcaccacgctgccgcaggtcacggccttcgccgaaaagcgacatgccatccgcgccggcatcatggtgtcggtgctggcgacggcggtcgggttttcggtcgtaggcctgcagcagcagccgctggcgctgttcctgatctacgcgctgacctgcatgatgtggacgccgacgatgccgctgaccgatgcctatgcgttgcgcggtgttgcgcgctacgggctcgactacggacccctgcggctatggggctcggcggcgttcgcggcgggatcgctcgcctgcggctatcttgtcgacctcatcgcaccgcgcgacctgatctgggtcatcgtcgcctgggccgtcgtcgcggttctcgccagcctgttgcttcagccgctcgacgatcccgggcggcgggcgccggagaggcacgccggcaaggcgctgctgcgcgatgccgccttctgggccgtgatcgcatcggcggcgttgatccagagcagccacatcgccttctacaccttctcggcgatcaactggcagcttcagggtctcagcggactgaccatcgcgaccctgtggacgctgggcgtgttggccgagatcgtcgtgttcgcgctgtcgccgcgcttctcgctgcagccgtccacgctgatggcggtcggcggtttgagcgccgttgtgcgctggatcgtcaccgccagcgagccgccgctcgcgctgctcgcgatcgcccaactcggccacggcttcagcttcggcatgaccatcctcggcaccatgagtctcctggtgcagcgtgtaccctcgcatcagatcgcacgcgggcagggctattacgccgcgtgcaacgggctgctcggagcggcgacctcgatcgcgtcaggcgcgatctacgcgcacatcggcgacagcgtctattacgtcatggccgcgatggccgcagccggggcgcttctgatctggtcggcgcggcaccggctcaaggctcagccccacagcgaggcatccggcgggtagaccaggctgccgtcataacgcagcccgtgatcgcggtcgcgcgccagcagcaggggaccgtcgagatcgacgaagcgcgcatgcggcgtcaccagcatcgcaggcgccatcgacaacgaggtcgcaaccatgcagccgatcatgatctcgaagccgagcgcgcgcgccgcatcggccatggccagcgcctcggtgaggccgccggtcttgtcgagcttgatgttcacggcgtcatagcgctcgcgcaacggcgccagcgaagagcggtcatgcacgctctcgtcggcgcagaccgcgagcgggcgcttgatccgcgccagtgcctcgtccttgccggatggcagcggctgctccaccagggtcactccggcttcggcgcaggcggcgaggttgcgctccagattggtctcgctccaggcctcgttggcatcgacaatcagctccgattcgggggcggccttgcgcaccgccgcgattcgctcaggatcgccgtcgccgccgagcttgatcttgagcagcggccgatgcgccgcttgggcggtcgcggcggccatggcctcgggggtgcccaacgagatcgtgtaggcggtggtgcgctcgcggggctccgggcggccgagcaggttccaggctcgcaggccggccgacttggcttcaaggtcgatcagggcgcaatccaatgcgttgcgggccgctccggcgggcatggcagcctggagggcctcccgcgtcagcccgcccgcgaccgcctgctgcatggcctggatggcggccagcgtcgcctcgggcgtctcgccgtagcggggatagggcacacactcgccgcggcccgtcaggcggtcctggctcacctccgccaccaccgtcacggcttcggttttggcgccccggctgatggtgaagctgcccgcgatcgggaagcgctcgattcgcaccgccagaccatgaaatttcgtggaagtcattttgaactctggcgaaatctgaacctgctagttacctgtagcaactaacattaaccacttggggataccttctctgggtaagggcgcgtgcgcaaccatctgatttcctccgccccggtacgggagcggacattttgagcagcgatccgaagctggaacggattgccaagggcaacgcactggcactttgcgcgaccggaacctggacggcgagcttcgcgcccgtcctggagcgcatggtggcggacgccgagaagctcgcaggcaccccgcaaagcattttcatcgacgtctcggaggtcgccaagctcgacaccttcggcgcctggctgatcgagcggctgcgccgcagcctgacccaaggtgccgtcgaggcgcagattgccggcctctcggccaattattccagcctcgtcgacgaagtgcggcgcgtccgggcgacccccgtggtcgacagcagcccgatcaccatcagcggcatgctggagcagatcggccggacggtggccggcatcgccgggaccgtggcgggcctggtcgacatgctcggcgcggtgctcgcggcgggctttcgcgtcctggtccaccctcgctcgttccgtctgacctcgaccgtgcaccacatggagcaggtttgctggcgcgcggtgccgatcatcgtgctgatcaccttcctgatcggctgcatcatcgcgcaacaaggcattttccatttccgccgcttcggcgcagacatcttcgtcgtcgacatgctcggtgtgctggtgttgcgcgagatcggcgtgctcctcgtcgccatcatggtcgccggacgctcgggcagcgcctacaccgccgagctcggctcgatgaagatgcgggaggagatcgatgcactgcgcaccatgggcttcgatccgatcgaggtcctggtgctgccgcgcatgatggccctcgtgctggcgctgccgatcctcgccttcctcggcgcgatggccgcgctctatggcggcggtctggtggcctggctctatggcggcgtccagccggaagccttcctgctgcgcctgcgcgatgccatctcgatcgaccatttcatcgtcggcatcgtcaaggcgccggtcatggctgccgtgatcggcatcgtcgcctgcgtcgaagggctcgccgtgcagggcagcgcggaatcgctcggtcagcacacgacggcgtcggttgtgaaaggcatcttcttcgtcatcgtcatggacggcatcttcgccattttcttcgcctcgatcgggatgtgaccatggtcggggaaatccaggatcccatcatccgcgtccgcggcatcaccgtgcagttcggcgaaacgcgcgtgctcgacgggctcaatctcgacgtcaagcgcggcgagatattgggcttcgtcggcccctccggtgcgggcaagtcggtgctgacgcgcaccatcatcggcctcgtgccgaaggtcgcaggctccatcgaggtgttcggcgtcgacctcgattcctccagcacatcgcagcgccgcaacgtcgagcggcgctggggcgtgctgtttcagcagggcgcgctgttctcctcgctgacgnnnnnnnnnnaggcagaacatccagtttccgatgcgcgaatatttgcgcgtctcgcagcggctgatggacgagatcaccatggccaagctcgccatggtcggtctcaagcctgaagtcgccgagcgtttcccctcggaactttccggcggcatgatcaagcgcgtcgcgctggcgcgcgcgctgtcgctcgatccggatctcgtcttcctggacgagccgacctcgggcctcgatccgatcggcgccggcgatttcgacgagctggtccggaccctccagcgcactttggggctgacggttttcatggtaacgcacgatctcgacagcctttacacagcatgtgatcgcatcgccgttttagggaacggtaagatcattgcggcagggtcgatcgccgacatgcaggcctcgcagcatccctggctgaggcagtatttccatggcaagcgcgcccgcgcggtcatgagttgagtagccggagcacctgatggaaacgcgggcgaattacatcttgatcgggtcgttcacgctggcggtgatcgccgcggcgatcggcttcgtgctgtggttccagtcgctgcacaccaccaagcagcgcagtccgctgcgcgtcgtgttcgaggggcccgcggccggcctgcgcaacggcggaagcgtcaatttcaatggtatcagggtcggcgaggtggtctcggtgaagctggacaacccgcggcgggttgtcgcactcgccatgatcgagaacaacgccccgatccgcaaggacacgctggtcggcctcgaattccagggcctgacaggcgtcgccgcgatctcgctcaagggcggcgacgaggccgcgcccccaccgccgctcgatcaggacggcatcccgatgctcaccgccgatcccaacaagcttcaggacgtcaccgaggcgatccgcggcacgctgcagaacatcaacaagatcgtcgccgacaaccaggagtcggtgaagaactcgctgaagaatctcgagaccttcaccaactcgctcgcccgcaactccgagaagatcgacggcgtgatggccaaggtcgacggcgtgatgctcaaggccgacaacctcatgctcggcctcaacacgctggccggcggcaaggacggcggcgagctgttccaggccgtgaaatcgatccgcgaactcgccgaagatttcgacaagcgctcgggcgcgctgatggccgacggccgccgcaccctcggcgacatcagccgggccgtgaacaatttcgaccgtaacccgacccgagtcctgttcggcgccagcaactcgtcgcagccggctccgccgcccgagccgccgaagcccgtgccgaggcggtagtggttcggcgaatggtgagtagcgaataggttgctctcacgacaatccccaaacgaaaacggaggccgagcggcctccgttccactggttgctcgcgctcggtgctaccccagccgtccggccgcatgcgcaagcagcgtgtacaccagccccgtctccgagatcaggtgagtgcgcagctcctgcggaccgcggccgtcgcgggcgacttcatcgagcagccgctcgaactcgaccacgtagcggtcgaccgtgcccttgaagttgcggtcggcgcggtacttgcgggcgacctcgtcgaaggccttctggccggcgggcgtgtacaggcgcttggtgaaggccttgttctcgccgcgctggtagcgatcccacatctcggcggcgaggttgcggtccatcagccggccgatgtcgagcgacagcgattccagcggattgccgccaccctgcggtgcctgcggctgcggtgcgggtgcagcgcggccgcgcggggcctcacgtccggccggggcgccctggtgggcgtccgtacggttgagcaggtccgatagccagccgtcgcggccctgatcgttgctggcgggcgccaccggcggcgcttcggtgcggcggggcgccggcatgccgaggtccggcggcggcagcgtcgaggcgctgccggtgtcgcgcgtgcgggtctcgggcggccggccgccgacagcggccagcaccggctcctcctggcgatggacgccggcacggccagcggtggtgacgtcgaggccgcggccgtgctgagccacgatgcggttgagctcggcgagcgcctcgatctggtcgacgatcaccttgcgcatctgcgccgtgctctcggcggcctcctgcggcatctcgagcacgccgcggcgcagctcattgcgggtggcttcgagctcgttgtgcatctcgagggccatctgcttcatgctggcgaccagattggtgaacttctcggtcgactgcttgaacatcgcatccgcctcgtccgtggtctggcggtagatgtcgtgcatggtctcgatggtctgccggtgctcctcctcggacgccgcgcgcaccgcctcgaactggcgggtgatcgcggcagagcctgcgccggccgtctccgcgacgacgcgggcgatgtcgcgggcgcgctcttcggccgccgccagcgattcatcgagcaggccggtgaagcgcgacagccgctggtcgaggtcggccgttcgcaggtcgatggtggtgacgagcgattccagcgcctgcttgcgttcggcgagcgaggcggtggtgttcttgttgctctgctcgacgacctgggcggcctcgaccagcgcctggccgtgcttgtcgaactgggtcgacagctcgccgagatcctgcagcgccttcgtggtcttgctgttgaagacgttgagctgctcttccaggttctgcgtcgcagcgccattgcgcgaggtgacgtcgttcatcgccgagacgaagtcggcgacgcgcgtcaccagcgcccgctcgagcgagttgaggttgtcgtgcgcaccggtcagcacctcctggagcaggatgttgccttcgcgcaggcgctcgaacagggccaccgtgtcggtgcgcaagatcttgctggtctcctgcatctccgtgacggccgcgatcgaaacctggcgcgactggtcgatcgcggaccgcgaggcctgctcgaggtccttgagcgacttgccgaccgcggtcgtggcgatctcgctcgccgcattgatggtgcgggcgacttccgagccgttgcccatcatggtctgcgagaaggcctggccgcgcgtctcgatcgacttcagcgcgtcggaggtgacgcggtcgatgtcgagcgtgagctggctggccttcgagccgatcgcgtccaccagcgcgccgcgcttggcgtcgatcatgttcgacaggcgatcggcctgctgcgtcacataggtgacgatctcgtcggtcttgccggtcatggcctggccgaagctggagctggcggcgagcaccgaccgctcgacgtcggccgagctcgacttgacgcgcgagctcgcctcgttggaggcggagatcagcgcgttctgggcgttgagcgcgctggtctggatgtcgttggtcgcgttggcggtggccgcgctcagcgtgcgctcgatctcggtcgagatcgaacggatctggctcgcggcgtcggccgaggtcgaggtcagcgagatctgcgcctcgcgcgcgctgttgaggatggtcgaggcggtgtcggcgccgaccgcggtcaacgtgcgctcgatgtccgtcgtcagcgacttgatctgggtcgccgcatcggtcgaggcggagacgagcgaggtttgggcctcgcgaacgccgctggtgagcgcctcgatggtggcgccgccggcggttgccagcgcgcgctgcatctcggccgcgagcgaacggacctggttggtctgttcggccgagaccgcgagcagggtgctctgggcgtcgcgggcgctgctggtgatcgtctcggcggtcgactgaccgacttgcgagagcgaacgatgcacctcggccgccagcgacttgacctggctcgccgcgtccgacgacgccgtgaccagcgtgctctgggcttcgcgggcgccgctcatgatggtctcggccgtcgaggtgcccgccatcgtgagcgagcgctgcacgtccgaggacagcgccttgatctggttggcagtctcggtcgaagccgcgatcaaggcgctctgcgcatcgcgggcccctgcggtgatcgattccgccgtagcggtgccggccatcgacagcgaacgctgcacgtcggcggtgagcgtcttcacctggttggccgcatccgacgacgccgtgacgagggtggtctgcacctcgcgggcgccggccaggatcgaggccgcggtggcggagccagccgccgacagcgtgcgttcgacgtcggccgcgagtcccttgatctggctggaggcctcgcccgatgccgcgaccagcgtcgactgcgcttcgcgggcgctggtcaggatcgagttcgccgcgcctgtgcccaccgcagtcagcgcctgctcgacctcggccgaggtcatcttgagctgggcgttgacgtcggaggagactgtcagcagcgactgctgggcggtgcgcgcgccggtctggatcgtctcgctggtgttgacgacgaggttggtgagcgagcgctcggcgtcctcgacatgcgagcggatcgcggtcgagatcatctcggcgcgggacatcatgtcctcgctggcctggcgtccgctgctctcgatgcggccggcgacggcctcgacgcgcgagccgagcaggtcctcgaactgcgccacgcgcacgtcgatgtcgctggcgaccgagccgaccttggtctcgatggcctgctggatctcctggaagcgcgcggtgaccgtgtcggtcagatgcatgctgcggccgtcgatgatctcggtgacgccggtgatgcggcggtcgaccgcctcgatcgcctgcgcggtgccgtcggtgagggtcgaggtgaggagggtcagacgcgtgtcgatcgactgtacggcctgcgaggcgccgttcgtgaccgcggtggtcaggtaggtgaggcgggagtcgatcgattcgagcgcctgggtcgcgccgccggtgagcgtcgtcgtgagatgcgtcaggcgggtatcgatcgactggatggtctgcgacgcaccgtcggtgagcgagctcgtgaggaggttgaggcgcgcatcgatggtttcgatggcctgcgatgcgccgccggtgagcgtcgtcgtcaggtgggtcaggcgggagtcgatcgactggatcgcctgtgcggcaccgtcggtcaacgatgtcgccagagtgttgatgcgcccgtcgatggtttcggtcatggacttcgcgcgggtgtcgaacgagtgctcgatcgcggcgacgcggccgacgagttgctcgtcgaaggtcctgatgtggccttcgatcgtgccgtcgaggctggcgatcttgccgttcagcgaggcgtcgaggttgctgacgcgttcgccgatcgtggtctcgaactgcacgaggcgctggtcgagcaccgcggttatctcgccgccgttggaggtgaagcggctgtcgaaattgtcgacataggtcttgagcgtctcggcgatgtcctgcgtgcgctggcccatgcgctcgacgatctcgccgccgaaggtcttcacggtgcggtcgaactcggagatgtggcgcgtgatcagcgcgcccagcgtgccggagtcgcgggcgaacttctcgaccagctcggtgccctggttccgcaccagctcgtcaaaggcactcatctgcagcgacagcgaatcgtgggctgtctctgtctggctgacgaccttggcgaccagagcgttgacggtggcgtcgagcgcttcgctggccttgtcgccgctcgtcatgatctggccggcgaggcggttgccggcatcgtcgatcttggccgagatgtcgttggaacgcagctcgagctccagcagcagcgagtccgacgagttcttcagggaatcgtgcacctgctcggtgcgctcggagatgccgtcgacgatagcggcggaacgctgctcgaattcgccggtgatgcggtcgatgcgctcgttcagcatctcatggacgcggtcggcgagatcgacgaactcgtcgtggacgtgaccggttttgaagttgaggctggtggtcagccgctcgctcgcatcgagtacggcgcgcgtggtctcgttgctggcttcctccaggcggtcgagcaggtcgccgccgcgttcgccgagagccaggatcatgttgtcgccggcattgctcagcgcctgcgtgatgtgggcaccgcgctcttccagtgcgccggtgatggacttggcgacctcgtcgacgcgcgaggcgatcgcgtccgagattagcgcgatgtcgtggcgcaggtcgatctggacgccggagatggcgctgcggacctgctcggcctggccgaccaggttgtcgcgctgatgggcgatgtcctgaagcctgtcgcgaatgcgcacctcgttgtcggaataggcgcgttcgagcgcggcgacctcgttggcaaccagcgtctcgagctcgcctgcgcgcgcaatcgcgcgctcgatgccgtcacccatcgcggcgacctcgcggcggatggcctggccgacggtgaccatggaatcggaggccgagccttccggctcggagaagcggatcgcgacctgcgccatcgcctgcgcgatcatgcgcatttcctgtccgcgccagacgaggctggcgaggaagtagaacagcatgatcggcgcgagcaccatcgcaatcaggccggcaatgacgaggaccccgccgctctggcccatggcggtctggatcgacggcaggaagccgatggtcagcgcggcgcaggcggcgagccagacgccggcgaagatggtggcgaaggtgtagacactgcgggcaggacggcccttctgaagcgcctggagcagctggccgatggtctcgcggtcgtcattcgcggggcggcgcgatgagagcggctcctcgactgcatcgaacacggtcgaccgctcgttggcggccggtcgcggctcgaagctcggttcatcgaaaaccggaggcacgggcggtacagcaggcgccgcttcgttgcgcatggtggcgttgcggctggtatcggcagccgtgtcactgatgttcagggcttcctggatcgcagaaagcgcaacttctgtggggtctttgacctttttcggagtgttcgccatgttcagtccgagccctcgttacttgtacgcgtccccccgcgagccctgcgcgccgcgcaagcccacagaccggatcatgccgcttacgcggatctccgagccgtccccacccggacggcttgtccgccaatttccgcaacatcctattggcagagcgtcgcgaatgaaatgcctgcgattaagacaatcttaatcatcgttaacaggagcgctgcgtaacgccttagcaataaatgaaattctccaccgaactcgattgattgcggcaacttttcgtcaataaccgggcggatgtgcgtcaagcagcccaaacacttcattaaccattttcatgcttgggtcaggggaacctgaccgccggaccggcgggtgcgcaacgccggggcccgcgatgactcctgaactgcaacggatggattggatgccgtcgcccccgcttgcaccgatcgaaagcccgcttgacctcgatcacctctcccggatgacgctcggggacaccgagctggaacaggaagtgctggcgatgttcgccgagcaggcggttcgtctgctcgcggcgatgacgtcggtgccggccgagaccggcgcgctcgcgcacaagctgaagggttcggcgcgagggatcggcgccttcgcggtggccgatgccgcagccagcctggagaccgcggtccgcaccgggcacgggcggccccatgccctcgccgccctgaaagaggcggtgacggaggctcgcgccgccatcgaggcgatcctgaagccgtaagccgatacggtcagcgccgggttctagtcttttgttttgacgggggttcttcccgcaaagcgggattgatttcggatcaaaacgctatggcgccgggcttatcgacccgttataggacagccggaccctccttcattcccagtaccgctgcagcacgagcacacatggccaagattcactttgtcgaccacaagggcgaaacccgcacggtggaaatcgagaacggcgcaaccgtgatggaagccgcgatccgcaacagcattcccggcatcgaggccgaatgcggcggcgcctgtgcctgcgcgacctgccatgtgtatgtcgacgaagcctggcgcgagaaggtcggcagccccacgccgatggaagaggacatgctcgatttcggcttcgacgtgcgtccgaattctcgcctgtcctgccagatcaaggtctccgacgaactcgacgggctcgtggtcgcgacgccggaacggcaggcctgatcgtccctatttgcgctagatgctcggcggcgcgacctcgatgccgcgcttgtgccacggtctgagcttctcgatcacctctgccgtcagcggcgtcggccgccgcgtcgcttcgtcgatcatgacgccgaccgatgtcgccgatgcgatgcattttccttccgagaacacgacctgctcgaaggtgactgatgtccttccgagcttcaccacgccgaggccaagctcgatcgtgttgggccaatgcagctcggcgcggaaatggatgtcgaggcgcaccatgatccacgcgaggcccggcggggtcaggccgtattcagggagcttcatcagcgtgacgcgcccggtctcgaaataggttgcgtagaccgcgttgttgacgtgctggttgggatcgagatcgccgaagcggacgttgtcgctgaggcggtagggatagtcctccaggcgcggcgtcgtatcgaggcggcttggtgcgttcaccgattgatctccgtcatatcgcatcccgttacagctcagttatcctgcgccggcaagtgggggtggctgcggggcgctcccgcttttatgccttccctgatccacccccgttggctagacaggcagggtcacctctgcccggcgggcgccgtccaaccgataacgacagacaaagagacgacatgagcgacgcgatcaaaaccgatgtgctgattattggtgccggcccctgcggtctgttcgccgccttcgagctcggccttctcgacatgaaggcgcatttcgtcgacatcctcgacaaggtcggcggccagtgtgccgagctctatccggaaaagccgatctacgacatccccggcattccgcaggtttcgggccagggcctcaccgacgcgctgatggagcagatcaagccgtttcacccgaccttccatctcggcgagatggtcgagaccgtggagaagatcggcgatcctgcgttccgctgcaccaccgatgccggcaaggtgttcgaatgcaaggtcgtggtgatcgcggccggcggcggctccttccagcccaagcgtccgccggtgccgggcatcgaggcctatgagggcacgtcggtgcactacgcggtgcgcaagatggagacgttccgcgacaagaacgtgctgatcgtcggcggtggcgattccgcgctggactggactctcaatctgcatccgattgccaagcgcatcacgctgctgcatcgtcgcgacgagtttcgcgccgcaccccacagcgtcgagcagatgcgagcgctggtcgccggcggaaagatggatctgcggctcggccaggtcaccgcgctctcgggcgctgacggcaagctcaccggcgcgaccgtcaaggggaacgacaacagcatcaccgagattgcctgcgataccatgctgccgttcttcgggctgaccatgaagctcggcccggtcgcgaactggggcattgcgctggagaacaatctggtgccggtcgaaacatccgccttcgagaccaacgtgccaggcatcttcgcgatcggcgacatcaatacctaccccggcaagatcaagttgatcctgtgcggcttccacgagggcgcgctgatgtcgcaaaaagcccatcgctacgtctatccggagaagcggctcgtgttccaatacacgacgtcgtcctccagcctccaaaagaagcttggtgtcaactgacggaacggaccggggcggcgatgccccatgtttctggtgctggaaccgttcgcgaaatcgccgtagtctgcggccattccaattgtaggctcggccagctttttggctcggcaaagtcttggctcagcaaagtcttggctctgcgaagtcttggcccggcaaggtgattggctcagcaaggtgatgacaatgcggacactcgttttcagctttcggctgctctccttcctcgcgctcgcatttccgctcgcggcggtgacaccgtccgcagcgcagacggccgagcccaccgcggcgggcctgtggcagaaggtcgaagacggcaagactgtcggatggttcctcttcgtcgaccgtaacggcgtcttcgaaggcgtgatcgcgaagaccttcccgcggccaaccgacgatccgaacgaggtctgctccaagtgcaccgacgatcgcaagaatgcgccagtgctgggcatctccttcgtccgcaacatgaagcgtgaaggattgaagtacgaaggcggcaacgtgctcaatccgcgcgacggccagatctggaaggccaacatgaaggtcagccccgacggccagaccctgaccctgcgcggctatctcggcatttcgctgctcggcaaggacgagacctggacgcgcctgccggatgcctacatcgcgcaggtggatcctgccatcgtcgcaaaatatcttccggcgcaggcggcggctgcaaagcaaccgtcccccgcgcccaagaagggcggcgcgatgatggcgccggcgcccaagcagtaaacgacacctttcgcggtccctcatcagatccaaaccctgggcgatgagtttgtatcgtcgaaaacgaacaggcgccgcagggcagggaagcacggtgtcgacggccgtccgcgtgtgcagcttgacgccggccagcatggtgtagacgtgcgtcggtccgagtggcgcggagggcctaacccggaccgagaggacgaggctcagcgagccttgctgtcagaacctgcgctcgcaagccgcttcgcgcgcggcgacagcaccgcgacctgcgctggagaggcaggcatgccggcgacgatcatcgtgggacttgccgactgctcctccacgccggcgccgccgagcacctgcacctgggtcgccgtgatcggaaacgaggtcacttcgtaagagggaagctcggtcgcgaaggcgccggccgagctcgcaatcatggcgccggcgacggcaatcatcgagagaacacgcattggaaatctccgtggacaatgtcaatccgaggtttggtcgcctcgatgccggaacaggttcgctcgtgcgcgaacattcctgtgtccgtgagcgaacctatttgattgcgtgatgggaccggacgaaacgatgacgaagttctccgcgtcaatgtttccggacggtttcgcgaagactcaggtcaccggcgccggattgaacagcgtgagatcgttgtggatgccccagcgatccgaccacggcttggtgcggccggaggcgacatcgaggatcaggcggaacaggtcccagccgcattcctcgatggtcttctcgccggtggcaatgctaaagcgatcatgacccaggccgaggcgcggctgaaggtgctcaacgcccgcaagcgcgagacctgccccgcttccgatctcgtcatcgggctgcaatgtggcggcagcgacgcgttttccggcgtgactgcaaaccccgccgtcggcttcgccgcggatctcctggtgcgagccggtttgacgcattgcaccgaggaggagatgccgaggatgttcttggtgccgaccgagccgtccggattgcgataaccctcgaaggtgaagccttccaacggcggcagcggcgcagggacggcggtcgagatttcgagcttgtcgagggcaggggcctccggcatgcggatgcgcgcttcatcgacccattcgccggccaggatcggcgacagcgcgtaaccgatgatttcgccatagcggacgatcggcgcgccttccgcaatatcgaccaaagcagccttgtgcccctgcggcacgaaggcgcgcagcgtcagcccgcacgcaaagcgcgagccggcgggaagcccgaaatcgttgaccacgatcgcgacattgtcgcgctcgttcagcctgatgtagcggggctgctctttcgctgcgacgtcctggtccatctgcgcttgtctcaagaacggaagaagccgtgttttcgtttacctctccccggaggggatcggtcgcgccggaggcgcgggtgaggggcagcggcttgcaggagagggcgtaacccgatcgatgtgcgatccgacctctcccagagggagaggtcggcacctccgccgctgcgtgaagatcgctcgtcagcccggaaacgtataagccgtcttcaccgtggtatagaactcgcgggcgtaggagccctgctcgcgggcgccgtagctcgaacccttccggccgccgaacggcacgtgataatcgacgccggcggtcggcaggttgaccatcaccatgcctgactcgctgttgcgcttgtagtgcgaggcgtatttcaggctggtggtgcagatgccggaggcgaggccgaactcggtgtcgttggagatcgcgagcgcctcctcgtagttcttggcacggatgacggccgcgaccgggccaaagatctcctcgcgcgcgatgcgcatgttgttgttggcctcggtgaacagggccggctggaggtagtggccggggttgtcgcgcttgagcagctcgccgccgaaggcgagcctggcgccctcgtcctggccgatcttgatgtagcggaggtcctggtcgagctggttctggtccaccacggggccgatatgcacgccggccttgagcgcgtcgtcgaccgacaggctgttgaggcgctcggcgaccgccgcgacgaagcggtcgtggatgccttcggtgacgatgaggcgcgaggaggcggtgcagcgctggccggtggagaaataggcgccgttgacggcgacctcgacggcggtcttgaggtcggcgtcgtcgagcacgaccagcggattcttgccgcccatctcgagctgaaatttcttcatggggttcgagagcacgcaggcctgcgcgatcttgcgcccggtttgcaccgagccggtgaaggagatcgcggcgacgtccggatgctcgagcaaggtctggccgaccaccgagccggagccgacgacgaggttgaacacgccggctggaatgccggagcgggtgatgatctcggacaaagcatgtgccgagccgggcaccagctcggccggcttgaacacgacggtgttgccgtagcagagcgccggcgcgatcttccaggcggggatcgcgatcgggaaattccagggtgtgatcatgccgacgacgccaaccggctcgcgggtgagctcaacgtcgatgccgggacgaaccgaggcgcccttctcgccgatcagccgcagcgcctcgccggcgaagaacgcaaagatctggccggcgcgaccgacctcgccgataccttccggcaaggtcttgccttcctctcgggcgaggagccggccgagctcttccttgcgcgagaggatctcgattgagatcttgttcagcgcgtcatagcgctcctgcggcgtggaacgcgaccaggcgggaaaggcggccttggcggcggctatcgccttctcggtctgcgccttgtccgccttggcatattccccgacgagatcgttggtgttggagggattgatgttcctggtgatgccggaaccgtcgacccattcgccgccgatgaagttcttcaggatcgctgtcatcttctttcctccttgttcaaggggcatgatcgtatcggaaaaccggtgtccgcgctccgggatcgcgcctgaagttttctaacgcacgaggcccggacgtttgatcgggtcctgtatggccatagccccatcccggacgcgaagtccatgcttcttgtggaattcgtgcgcggcctcgatggctgcgcgtcgacattgatgccgagccgtgattcaggggcgcctatcggccggatgaagttcttccgccgtcatggacaggggagcgctcgatgcacgtccaggccaaagccccatgtcagccgaggcgagtggagcatcgagatcacccccgatgcaaagacggcgactggtgagccgccgttgagttgcctggccgagctagcgccggagccttcaggaggaatgttggagcgtcatgattttctcaatcgagtcctaggggcgggcgccgcgaactgtccaggttcaaggaagcatcgatcgatgtcgctcttggattgatcgcaccgacggtatggcgcgagcccgcgctcgaccctattgctgcgtgcccggcagcagctgcggcaggaatccgcgcgtcacgcttggcggcaccgcgtccagcccgagcaccgcgctcgcggccggcagcgcggcatccgccattgcagcatgtccttcggcgctcggatgcacggcgccgccatagacggcggagagcacgccccaggtcgcgtcgtgaatgtcggtcggctggctcgctgccggcaagccctgcggataggtcattgcggcaaaataactgtcgttcgcatcgcggatccagcgcgcgcgcggcaggtaggcgcggtattccgaggcgccgcgcccgcaaagcatcggctggctcgccgcgctcacgatatcgggattgaagctctggccgttctcggcaaagcaggtccggtcgaattcgggatcattgcccgaatgggcgcagaagccgtgatcggcgaacgcggcctggtgcgcatcgacgaaggtcatgcggtcggcttcgggatcgcggcagagcgcgccccggctgcaggtggcgagccccttcagctgcggcaggaattccgtatcgacgaaggtcgagacacgggcgagccgctgcggatcggcattgaacgatggatgaatgtcgaagccggcacggccgccgcggcagggcacgccgccgtcggcgagcgcaggattggcgtaggagacatagaccacgcgcgagaggtcgccgccgacgagcggcttgagcgcctcgcgcagcctggcgaatttctgcggcagttcgcgcaccagcgcatcgcgggaatcatcgacggtcgccatcacgccggagcggcggaacagcgcgcgctccgtcgcggtatcgacgatgacgtcggcgacgaggccggagaagtagacgtcgttggcgccgaccgacagcagcacgagatcgagcgtgcggtcgggctggcgtttctttgccgcggcgagcgcttcgcgcagctcggcgacctgggcgttcacgctggtgttgcacacgccggtcttgccgggcgcgcattcgcgggcgcgctgcgagcccagcagcccatcgctgatgctggcgccggtgcaggcgagtggcaggaaggtcaccgcgatgtgcgtatagcgcagggcgagcgccagcgcggtgcgcgcctggtagctgtagagcgagcggtggcaaggcgcgttgaaccagagcgcgctgtagcgttgccagttggccagcgtatccggcgcctcgcaggcgcggccgcccttgaagccctggcggctcggccggtaatactgcgcgccggcggtgccgagataggagcggaagcagaagccttcgtccgccagcgccagtggccggtctgggttgccttctccggaggcgatgctgtccccgaggccggcgatgaagatgtcgcggacctgaatctcggtctggatgcgctgggtcggatcggagcccgaggagacgtcgaccgtcgcgacggtctgcttgccgtagcggacgcgcagattgatcggctcggcgcagtcgaaggtcgattgttgcggcccgtcgccgtcgtcgaacgaccatgcacaggtggcgccgaccggcaccgcacccgtgaggcgcacggtgaccggatgatcgatcggtgtgatgtagttctctttgacgttgtcgcgggtgcaaggctggttgacccggccctggaggtcgatgcagaggcggttgaccgcgttgcgggcccagccgcggccttcgctctgcagctccagcgattgctcggcggcgagaatgctgcggtcacgcgcgttctcgacgtggagcaggaagtcgcgctcctcgcggaacagccggaagcggttgcgcacctcccaattgatctgcatggcaccggcgtcctgcgcggcggcgcgaccgggcggcaaacacgtcagaattccagaaagcagcagggcgcctgcggagaaagtgcgaagggatacagggatcatggcccgggtcttcaacggcaaagttgaggcggaaataagagaggattgctccgccgcctgcaacctttgtctgacgggcccaggaaaaggggcctatcgcttgccggcccgccgcagcgtccgctcgcgctccatcgcggccacctgcttgggcagattggcctgggcgcaggcctccgccaggcgccgccgctcctgccagggggcgaccacgttcatccagagctcgcgcgtgcccatgatcgagatggcgaggccgaacgggacgacgaaatagaggatgcggaacaccaggagcgtcgccagaagctcctctcgaccgaattggggcagcgccaccagcatggccgcatcgaagacgccgatcgagccgggcgcatggctggcaaagccgatcagggtcgccagaatgaacacgaccgcaagcgacatgaagtcgatcggcggattggccggcatcaacaggtacatggccatggcgcagaagccgagatcgaccacgccgatcaggatctgcaccaatgtcagcgatgccgacggcagcaccaccttccagcccttctggccgagttcgcggcgcttctcgcccatgcacagccagaccagataggcgccgatcgaggcgaggccaccgagcgcgatcaggcggttgatcgaggcggggagctgatccatcgaggaggcggcatccggatggatggccatgccgatcgagagcacgaagatgttaccgagccagaaggtcaggcccgacagaaagcagattttcgcgacgtcgatcgcgttcagcccgtagtccgaatagatccggaaacggatcgcgccgccggtgaataccgtggcgccgatgttgtggccgatcgaataggacgtgaagctggagagcgccgcgatgcgatagggcacatgcttcttgccgatcgttcgcaaggcgaaatagtcgtagaaggtcagcgtgcagaatgcgaagaagacgcagatcgccgccagcccgatattgccgcggggaatctcggtcaacgccgtcaggatgaccgcggtatcgatgcccttgagggttcgcaccagcgtggtgatcgcgaaggcgatgatcaggatgctcgcggcaatgccgagccgtcgccagccaatccatctcttgaagccgcgttgcagcgcggtcagcagtccgtgcattcatcctcccggcgggggcaaagaccgaccggaccaggtattggccaatcgggttcgatcacggccaaaggcaggcatcgatcgctaggcatgatccagctcatttaaggcaaaaacagcagcttgtgcagcccttgacagcaacaggttctgcgttcgagcggccacttttgtcatatgcggttcatatccgacccgcgttaagcatatgagtcgcgaaacattcgctgccctcgcgcatccggtgtgccgacacgatttcaaatcctcgcgccgtccgccttgttccagcgcaagcgctgccggcgttttttggaacgtcgatgctccgtactcgttgggctcgatcagcaatcgaacatggcgaaataagcggctttctcctgcaagcccgcgccgtcgtgttcccgaaacccgagaggatcggaacgatgggactgttcacaaaagacatcaagaccatgaacgacctgttcgtgcatcagctccaggacatctattacgccgagcagcagctcaccaaggcgctgccaaagatggcaagcaaggccaccgatccgcagctgaaacagggctttttgacgcaccttgaagaaaccaggcagcacgtcgcgcgcctcgaggaagtgttcaagatgcacggcgtcgcggcgaaggcggtcgactgcccggccattgacggcatcatcgaggaagcggacgagaccgccggcgaagttgcggacaaggcggtgctcgatgcagcgctgatcaatgcagctcaggccgccgaacactacgagatcgtccgctacggcagcctgatcgcctgggccaagcagctcggccgcagcgactgcgcagcagtgcttgccaagacgctcgaggaggaaaaggcgaccgacaagaagctgacgactctcgccgagagcaaggtcaatttgcgcgcggcgagctagctaccaaggtatgtcgccgaccgacgccgcgcgcacgcgcggcgtcttcttttgatgcgcgtcactcggctgggatcagcgtggccgcatgggtcggcgcagcccgtcagcgcgtcgcaacgcgaagtgcgcgccgcagaaagccatcacggcgccgaggcacagcgcagcaagcccggcgagcacccctgagacggtcgggatcgggctcggcgccgaagcggcctggccggcgcccgcgagcagcagcacgccgacggcgatcaggaattgccgcatccgttgcgggatctgtccggagaccgcgctctgcatcaatgacgccgtgaaatagccgccggaaatgccgaccgtggcgatcagccaccaggcgatcgccgcgcctgcgggtatgaactctcgtgtgtcgccgcgccagaggccgccgagatcgagcccatagcgtgcgcccagcatgtggaccgcgagcgcgagcaacactccggagatcattgcggcaccgagaatcaggcggcgcgggaaaaaggtcgtctcagccatgcctcgcttgtaggatgggcgagggcgaccgcgcaaggcgatcgcggacgggactgatgccagatgctgggttctgaggccgcgccggccacgagctacgcctacaaggcgtcgctgatcggctcggcgcaccgcttcgaactgactgaggagggactgtcctggcacatcgccgggcgccagggcttgtggcgctacgacgagatctctgcgattcggctgtcgttccgcccggtctcaatgcagcagcaccgttttcgcgccgatgtcacccacgccagcggccgccgcatcgcgatcctgtcgacgagttggcagactgcggcgctgatgtcgacgcaggacagcggatttcgcgcattcatcgtcgaattgcatgcgcggatggcgaaagcgggcagccgcgcggttctgaccgccggccttggccgcatcacccatgcggcggtgctggcatgcctcgcggtgctgactgttgcgatggcgggcctgttgatccgcgccctcgtgatcggcgagttcgccggcgcgctgttcattctcggctttgccgcgctgttcgcctggcaggtcggcggcttcgtccggcgcaaccagccgcgctcctataccctggcgaggttgccgcaggcgctgctgccgtagatatgcaatcggccgcaatcaaacgtgagttcgccttcctgcgcccctgtcgcatcgtgcagccatgccttccatggatcccaccacccgcccgcttgctgcggacgagatcgccgaaatcaatcgcaggcacctgatcgagacgccgctggtgccggccgacctgctgttcgtgttcggtacccgggaggacgacatgttgcgggccgacactgcggcgcgcctgtggcgagagggctatttccgctggtcgattgttagcggcggggtgacgccgggctcggagcaatccgaatgtacgctgatcaagacggcgatggtcaacgcaggcgttccggcggaacttgtcctcgaagagcatcgcgcgatgaacaccggagagaacgtgatcttctcgctcccgatcatcgatgcggcgctcggccttgccaacattcgcaacgtgatctgcctcggcaacacctggaccgcgcggcgctaccctatgacgttgcaccggcactggccggaggtggagaaaatgctgctcaccgttgacagctttgcgacccctcgcgccctctggcacaccgatgcggaatttcgccgccgcatgctgcacgaatgggacaagatcgagccgtacaaggcgaaaggcttcatcgcggaatggccggaggcgtgaccggcgcgagggtccgcgagctactccgtcgagtcgaaatcctcttccttggtgccgagcagcgaggcgatggtgcgcaggccggaatcgagctgctcgggcgagggcggggcaagggcgagccgcaccgcgttgggtgcatggccatgcgcgatcgcgaaagtggaggacggcgtcagcgcgatgccgcgccgtgctgctgcggcgacgaaggtctgggagcgccaatgcggtggcagcgtcagccacaaatggtatgagcgcgtgtcggcggcgagctgatagccggcgagcagcctggaggcagtctgctggcgccgcgcggcgtcgatgcgtttcagccgcgtcagctcggcaacggtgccgtcggccatcagccgctgtccggccgccagagcgtggccggaggcgatccagcccccggtgcggattgcgctcatcacgctttcgcgcaagtgagccggcgcgaccaggatgccgagggcaagcccgggcgcgaccttcttggacaggctgtcgatcacgatgcagcgctcggggtcgagggcagccaaaggcgtgtcgtcggccaggaagccgtagacggcgtcctcgatgatggtgagatcgagcttctcggcgacgcgcatgatgtcggcgcgccgcgtcgcattcatggtgacgccgagcgggttctggatgatgggctggagatacagcgccgacagatgtgcctcgcgatgcgccttctggatggcgtcgggacgcgcgccgaagccgtccatcggaatcggcaccagcgtcacgccgagacgcgcggcgatgctcttgacgtagggataggtcagcgcctcgacgccgcagcggccgccggtgggaacgagcgccgcaagcgcggctgcgagcgattgcttgccgttggcggtgaagaagacctgctcgggctgaggcgtgaaatccttgcgcgcgagataggcggcggcggcagtgcgtgcgctcctggtgccggtgctggtcgacacgcgcagcgcggattcgagcgcatcgacgcgctcgagccccgcaagacttttggcgatcatcgcccattgctgcggcaatagcggataattgacctcgaaattgatgcgcgcctcggccggctcgctcatcgtgccgacttcgcgcctgatgtcgccggagatgaatgtaccgcgcccgacctcgccgacaacgagcccgcggcggagcaattccgtataaacccggctcgcggtcgacaccgcgatgccacggtcataggcaaaatcgcgctgcggcggcagccggtcgccgggccttaacgtgccgttagtgatatcggccgcaatggcatcggcaagcttcacgtactcgaacttggacatattgcaccgagagcaatgttttacttgctccgagaagtgtactggagcatttaggttccatcaagttccgcggttggccgaggagagcgagagcaatccgacggcagatgaggtgcaggcgccgacagcgtccgcgccaacggcgcagcttcgccgcgcgggacgacaggccggagaagaaagatgaccacgatttcgcaaactgccgggcggagtttacgcccatcctcgtcgggcggatttcttggtgcgctcgcccatggtgtctctgcgctgttcgaccgcctggagcgccgctccgccgtcaagacgctgaatgaactcgacgaccgcgcgctgcgcgatatcggcatcacgcgcagtcagatcgaggacgcggtgtacggacagttcaaggacgagctgtcgcggtatttgtgacgcctctcccgcgtgtcccgaagcaatccagaatctctccgcggagggattccggacgtcgtggcagcggcagcaaccctcagtgcctcaccaccagcaccgagcacttggcgtagcgcaccacgtgccctgcgttggagccgaggaaataagtgcgcatcgccggccggtgcgaggtcatgacgatcaggtcggccttcatctgcgcggcttcctccaggatctcgtggtagatgccgccctggcgtaccaccgtggagatccgcgccgggtcgatgccggattcgcgcgcgacgatggcgagggcctcctccgacgtctcgcgctgctgctcgtcgaaatcggccgggacgtattcggcgagcatcaccggcgtcatcggcagcacgttgagcaggcgcaccgtgccgctccaggtctgagacaacgtcgccgcggttgcgatcgccggcttggccagatcggtatcggcgaggtcgatgggcacgaggatggacttgaacatctgcgcctccaaatctttcggtcagtacgtcctggcgatacgtcgcgcgatcatcccgatcgaagcagcttggggctgacgaacagcaccagcctgccgcggcggtaggccacatcagcccaatccttgacgtcaaagtcgaagatcgcaagccccgcggtgggcagattgtcgccgagcgccttggcgccatcaggatcgccgccgcctgtgagcatcagggcgatctcgtgcatgccgggattgtggccgatcagcagcaactgcttcgggtcggccggcgcggttgcagtgcgaatggtgtccaggatctccgcaggatcggcgccatagagttccggcaggatctcgacctgcggcgccgggacgcggtccttcatcgcctcccaggcgatgtcccaggtctgccgggctcgcacggcatgcgacaccagcacggtctcgggaaagggtggatgggtggcgatccaggcgccgatccgtgcggcatccttgtggccgcgttcgtccaggcggcggtcctggtcacggccgctcggcgcgtcggtctcggtcttggcgtgacgcagcagcatcaaacggcgcatggcattctcgaatcgttccccgtccgggataatctacaggcgcgcgttgaggacaaggtgacaggcgcccagttggtatcttaagtaacgacatgagcgagactttcacaagcgtgccccaggaaggcgccggccttcgcgatcgcgagcggctgtcattcgatctcgacaccgacatctgcgtcgtcggtgcgggccttgccgggttgtccatcgcgctggaagcggcccggctcggggccagcgtcgcggtgctcgagggccgtcaggtcggttggaacgcctccggcaaccagctcgggacggtgatgccgggctttgcattgccgctcaccgacctgatcgagcgcattggcttcgaggatgcgcgcgaattgtggatgctgtcgaaggagggtgccgagttcgtccgggccaatgccacggaagaaaacatgccggggatcggccccagcgacggcgtgctggaggtgtccaacattgatgcgggcgaccggctgatcagccgcttgcaaatgctgaacgaggacttcgacaccgaggtcgagggctggcaggccgagcgcgtccgcgacgtgctcaagaccgatcgctacttccacggcgtatattatcccaaagcgttccaggtcgacggccgcaaatatgtgcacggccttgcggcgctggcgcggcgggcgggcgcccgcatcttcgaggacactccggtcgtcagcatcgatcattccggcatccgcaagcgcatcgtcacgccctcggcgcggctgcgcgcgagccacatcgtgctcgccggcaacgtccatctcggtgcgccgttgaagcgcctgtcggagacgctgctgccggtctggcgctatgccggcatcaccgcgccgctcggcgagcgcctgcatgaggtcatcgccttcaaaggatccgtgatggattctgacggcatcgaccatttccgaatcgtcgaaggcgaccggctgctgtgggagagcccggagacgacctgggcggcaagccccgagcgcttcgccggcgccgtgaggcggcgaatccgcacgatttttcccgagctcggcaacgtcgagatcacccagatgttcggcggcgccaccggccagaccgttcacggaatgccgcagatcggtcagctgcgcaaaggcctttgggtggtgagcgggttcggccgccaaggcatgaacacctccgccatggccgggcagatgatcgcgcgcagcattctatggggcgacgagcgctggaaattgttctcgccattcgagctggtctgggcgggcggtgcaaccgggcgcgtcgcgggccaattggtcgggatgtggggcagggcgagttccgccgcgacaggctcgctcgcccgctaccgcgagcgagcgcgagccagggacagggaccgcgaggcgcggctcgcccaagccaaccgcgccgccggcaccggcccgcgccgcccgccacccggtgttgagccgcggccgacctcgcggttgacgcctgctgcccacgatgcagaacaggcgatggaaccggtctcccacgacgccggcgtctcacgataagcctgcgaaaaatcccgccggaggtgtaacttcgggccttgaggcccgtatctcagggcgtggactgcccgcgcacggagaatgagatgtttgaccgccgcatcctgctaacgactgccgccggcttgctcggcctttcggccttccgctggctgagagcgtcccccgccgaggctggcgagaaggccgcgcaaaagttcgagatcacaaagacggaggccgagtggcgcgcccagctcacaccgcagcaatatgagatacttcgcaatcacggcaccgagcgacccggctccagcccgcttttgaaggagcaccgcaagggcatcttcgcctgcgccggctgcgacctgccgctgttttcgtccgagaccaagttcgagagcggcacgggatggccgagcttctatgcgccgatcgaaggcaatgtcggcaagaccgtggatcgtacctacggcatggtccgcaccgaggtgcattgccggcgctgcggcggccatctcggccacgtgttcgatgacggcccgaagccgaccggcttgcgctactgcatcgatggtttcgggctggtcttccatccggccgcggcgtcggcgacgtaggttttgcctggatcgttgcggagcaatgcgccggcaccgagtcgagattctcaggcgcgcaagtgcgcacctgagctcggtccttcggaccgcccggaatgacatcacgccccggcaattgttgccggcccggcaattgtgccccggtcatccgaccggggcatgtctatctaagtcattgattttttgaagatacccgcattggcataggccttgcgacgtctctcccgattgcggccatggtcgaccggccgccgagatcggatttggagacaaagttatgggtatcttcgatgcaatgaacacctcggtgggtggcctgcaggcgcagtccttcgcgctgcagaacatttcaggcaacatcgcgaactcatccaccaccggttacaagggcatcggtaccagcttcgtcgacctcattcccgactcgtcggtcccaagcaagcaggtcgcaggcggcgtgcaggccaacgcgaaggccaccatcaccacgcagggcacgatctcgtcctccaccgtcgccaccaacatggcgatcactggcgacggtttcttctcgatccagaaggcgagcggcgtcgtcgacaacgtgcccgtgttcaccggggtgacctactacacgaggcgcggcgacttccagctcaatgccaacggcaatctggtcaacggcgccggctattatctgatgggcgtcacggtcgatccgaagaccggcaacccgaccggcagcgtggcgaacgtcctgcaattccagaacaacttcattccggcgcaggcgaccacctccatccagtacgcggcgaacctgccgacgcagccgaacacggtggcgaaaaccacggcgtcgaccggcacgttgctggcggccggcgggctcaacccgtccgatttcgccgcgaacccgctgccggtcggcacgcctccggcgccctatgccaacgcgacggtgtcaggcgcggcagcaaccggcaacatccgctcggcctattcgtcgacgacggcgacgggcacggttgcgctccagaacaattcgtcggcggtcgcttcgacaaccacttcccttgacaatgccgccggcacgcatctcgcatccagcattctgaccgcattgagcggccagacgctgaccatcaacggcaacaccatcacgttcgacggcggcaccacggtctcgaccgtcggcagcaacaccacgatcggtctcggtgcaggcacgaccgcgaccgtcgccgacatcctgaatgcgatccagactgccggcggcgccggcgtcaccgcttcgctctcggtcagcggcaatatccagatctcgagcggcaccggcactgacgtcgcaatcggcagcggcacggccgccaccgcgctcggcatcagcagcgtgacacgcggcggcaacgtgctgtcctcgccagcgatctcgggcgcgactgtgctgagcggcaccgcgaccgccggcggcgcacaggtgctcacatccggcttctccgcgggcgataccatcaccgtcaacggtcagacgctgaccttcatgaactcgggtgcctcgggaccgaaccagatcaacgtcacggacaacgtcacgaccctgctcggcaagatcgacgcgctctccggcgcgtcgggatcgtcggtcagcagcggcggcgtgattaccctcaacaccggcaccgtctcgaacctgacggtctccagctccaacagcgccgccttctcggcacttggcttcacctcgacgatcacccggaatcgcgacggtggcggcacggccggcaccggcggggtgatcggcaacgacatcgccactttcaccaaggaatcgatcagtggcggcgcggtgaccgcctacaacgccgccggtacgccggtgaacctgcaattgcgctgggccaagaccgacagcgcttcgctcggcgcgggtcattcggatagctggaacctgttctaccagaccgacccgaacgcaaccggtacgaccgtcggttgggtcaacaccgggcagaccttcacatttgccgccgacggctcgctcacgtcgccgagcggctcgggcatcaccatcaacaacgtcaccgtcagcggccagtcgctcggctcggtcgccttcaacatctcctccggcgggctgacgcaatatgccagcaccagcggcgcggtgaccatcaacaccatcacccagaatggctatgccgccggtcagcttcgctcggtcgccgtcaacaacaatggcgtcgtggtcggcactttctccaacggccagaacctcaaccttgcccaggtgcagctctcgcacttcaacggcaccaactatctgaaggcgatggacggcggcgcctatgccgcgaccgaacagtcgggagacgccatcgacggcgcctcggggaccatcagcggctcgtccctggaggggtccaacaccgacatcgccgacgaattcaccaagctgatcgtgacccagcaggcctattcggccaacaccaaggtgatcacgaccgcgaattcgatggtgcaggatctcttgaacgtgttgcgctgatcggcgcgtgacataaccaaaggcgggtcagtgatatgggtttgagttcagccctcgccagtgcgatgagcggtctgcgtgccaaccaggccgcgctctcgatcgtctcctccaacgtcgcgaactcgcagacgccgggttacgtcgtccagacgccgaaccagatcgaggtcacgaccggcgagttcggcgcgacggcgatgacgaccggtgtcagccgccagctcgacacctacgtgctgaaccagcttcggaccgagatcggcggtagcggttacgccgaccagatggccaacatcctgaagcagcttcaggatgtctatggcacgcccggcaatgccggcacgctcgaaagcgcgctgaacaagttcacaacggcgcttcaggcgctgtcgaccagttcgggcgcatcgtcggcgcagacggtggcgctcggcgcggcgcaggccctggcgcagcagctcaacgtcaccaccaagggcatccaatcgctgcgctccaacgtcgagcaggacctcggcaactcggcgcaagccgccaacgcggccatgaagcagatcgccgacatcaacaccaggctccagggcctgtctgcaaacgatccctcggccgccgtgctgatggaccagcgcgaccaggccatcaacacgctgtcgaaatacgtcgacgtccgcgtcaccaccgacggctcgaaccaggnnnnnnnnnncacgaccggcattcagctcgttggcgccgggctcgcctcggaattctcctttgcctccgccggcgcgctgtcggcaacctcgctctacaacatcgatcccgccaagtccggcgtcggtgcgttcaatatcaagctgcccaacggctcgcaggtcgacgttgtcgccaacaacgtggtctcttccggccagatcgcggccgacctgaagctgcgcgaccagatcctggtgcaggcgcagaaccagatcgacgagctcgccgccacgatggcgagcgcgctatccgacaagaccacggccggcagcacggtgtccggtccgcctacggggttcgatctcgagctcgccggagcgctgccgggcaacacggtcaacatcacctatacggacacggcgaccaatacccagcgtcagatcacgctggtcaacgtgaccgacccggccgcactgccgcttcagaacccgaccaatgcgaacccgatgcggatcggcgtcaatttctccggcggcatgggcgcgatcgcctccgcgctcaacaccgcgttgtcaggcacgcacctgtcgttctccgccgccccgtccccggcgacagccacgacgctgcggctgaccgacgacaataccggccttgccaaggtgagttcggcctcgaccacaaagacgatctcgtcgctgacctcgggcaatccgcagctgccgctgttcaccgacggcggccaggcgctctataccggcgctttcacggcatcgggctcgcagatgacagggcttgccggacgcatcgccgtgaacacgcagctggtatccgatccgacccggatgtcggtctacagcacctcgccggtgacgcccgcaggcgacaccacgcgttcggactatctctactcgcagctcaccaatgcggtgttttcctattcgccacagagcggcctcggctcggcgagccagcccttcaccggcagcgtttcgaattttctccagcagttcctcagcgtacaggcgaacgccgcgacgcagtcgacccagctccaggagggccagagcgtcgtggtctcgacgctgcaggccaagttcgactcgacctccagcgtgaacctggacgcggagatgtcgaacctgatccagcttcagaatgcctatgccgccaacgcccacgtcatgtcggtggtgcagagcatgatgaacacgttgctccaggcgcaagtgtaaccagtacagggctctgacagatgtcgatcagcagcatcaactactcttcgtcggttctcggcgcgcagattcgcaacatcaatcagcagctcaccgatctgtcgacgcagctttcgaccggcaagctgtcgcagaactatgctggcatgggcaccaacgaaggcttcgcaatcgccggtcgcgcgcagctctccaacatcgccgcctacaccgacacgatcaccaacgtcaacgtcagcatcaatctagcgaacactgcgctgcaatcgctgaccaagattcgcagtacggtgcaaacgggctcggcctctaccgcgcaggatctcaatgtcaacggccagacgatcgcgcagaacaccgccgccgcccagttcggctcgatggtcggcgtcctcaacacgcagaccggcagccgctatctgttttccggaacggccgtgaatacgcagtcggtcgcggatgccggcgacatcatcaatggcaccacgacgcaggccggcttcaagaccgtcatggcggagcgccaagccgccgatctgggggcgaacggcatggggcggctggtgcagacgcagccgacgccgagctcggtgcaggtgtcggaagacgtggccggatcgccgttcggcctcaagatcaaggcggtgtcctccacgctgacgggcgcgaccgtcaccggcccgagcggctcgccggtgtccttctcggtcgatctcaacggcgtcaatccgaacaatggcgacaagctgagcattcagttcacgctgccggacggcacgacggagcagatcgacctcaccgcgtccagcgcgacgccgacccctctcggcagtttcgcgatcgatgcgagcacccccgtcaacccgaacaacaccgccgcgaatctcaacacggcactgaacaccgcaatcgccaaactcgccaacacctcgctggttgcggcatcggcgatcgtcgccggcgacaatttcttcaacaccgcgagctcggcgatcggcacgcccgtcaacaaccaggccgcgccgccggcccccatcgccggggcgacggcgctatcgggcccgagcccctcggactcgatctctccgggcttcgttgcgggcgacaccatcaccgtcaacggcaccacgctgactttcgtcagctcgggcgcgaccggcaaccagctcaacgtcaccgacaacgtccagaccatgctcagcaagatcgaccagatcacggggacgtcgaaaccctcgacggttcatggcggttcgatcacgatcaacaccgacgatgcggcgagcctcagtatcacgacctcgaatacgggggcgctgaacgcgctcggcttcggctcgaccccggtgacggccacgcaaccgccgctgcgcgtcggctcctcgcccgcgaactcggcaaccacgctggtgaacggctcggccaacacggtgaaatggtacctgggcaatgacggacccggctcgcctcgctcgacggcgatagcgcgggtcgacgatgccgtgacggtgcagtatggcgcccaggccaatgaggatgcgatccgccggcaattgcaggcgatcgcggtgttcgggaccttctcgacctcaccgacgggacaatattcgggcggacaggtggcggcgctgagcctgcgggtgacgcaggcgttgacccagcagccggggcagcagcgcatcgaggacatccagaccgacatcgcgatggcccagaacacgatgaacgacgcgaccacgcgccagacccaggccaaggcgcagctgcagaccatcatcgaccaggcggaatcggcctcaccggaccaggtcgcgagcgagattctggcactccagaacgcactccaggcgtcctatcaggtgacctccaacctggcgcagctctcgctggtcaagttcctgtaagggatgcgttaaggcgtcgttaaccatgcctctttacctcttggtgaggattggagcggggcggggctgacgatgtcggacaggatgcaattggtggtggccacgccgtgcttcggcgggcaggtgtcgagcatctatgcgagctccatcttcgcgctacagcgcgccgtgcacggcatgtccaatctcgagctcaaggtgcatttgcgcgacggcgatgcgctgatcacgcgtgcccgagccaacctggtcgcactgttcctggacgatcccagggcaacgcatttcctgttcatcgatgccgatatcggcttcaagccggagcaggtgttccgcctgatcgaatgcggtgcggacgtcgtcgccggctgctatcccatcaagcgggtcaactgggacaaggccagacgtgcgatggccgctggccgcaccgacgtgccggcagcctcgctcgactacgtgctcgagatcgaggatcccgatcgcatcgtcgtcgtcaacggctttacccgcgtgcgttatgccgggaccggctttctgatgatccgccgccacgtgctggaagcgatgtgccgccatccggcctacgctggcttgcaattcttccgggagcattcgcacgatgcactggcagcgagccagaaccggttcgcgctgttcgaatgcatgatcgatccggcaaccggcacctatctttccgaagacttcgctttctgcaagcgctggaccgatatcggcggcgagatctgggccgacattcagagctcgctcgatcacgtcgggccgtccgtgtttcacggcgatatcgcttcgcaattcgcagccgtgcccgcagcggcggcggccgatgcggcgtgagcctgccgggatgagcggcggcgcatcccgcttgtcggaggcggagcgcgcttccgacggcggctcgcgctatcgcctgcgtgatctcttcacccccctcgatatgctgctcgtctccggcggcgacccgcggctcgcgctcgatcccaaggactcgacgaacgcttatggttgcgcggtctcgccggacccggatgtctgggaattcgcctcctcgaccgcatcgacgatctcgcaagcggcctatgaccgcgccgcgctggcgcgggacgagctgatgcacaagtgcctgttcgacgaggtcgaggtcgctttcgatgcgcgttgcgaggagatgcgcgacgagctgcgcggccatctggagctttcgccgcgcgtcgatgtggtgttctcgccatccggcacggactcccagctccatgccctgttcctggcgcgcgcgatactcggcgcgcgtccggtgaccatcgtggtcggcgccgagcagactggaagcgggacgacccataccgcccgcggtcatcatttcagctccatgacggcgagtggcgttgcggtccgcaaggacggcgccgttgccggactcgccggcgccagcatagcgttgccactgcgcgaggccgcctccgggatcgcgatgcgcgcggacgctgacgccgcggtgctgcaagcgatcgaggctacgatcgcgcaaggtgcaccagtgctgctccagatcatggattgctcgaagctcggctggcgcgcaccgagtgcggcctgcctcgacgagatcgcccggcgctggccgcgcaaggtccagatcgtggtcgacgcatgtcaggcccggctcggccgccgccggctgcgcgcctatctcgaccgcggctacatggtgctgatcaccggctcgaagttcttcggggggccggccttcagcggtgcgctgctggtgccgaaagaccctgcgagatcgctcgaccgggtcgaggggatcgcgccaggcttcctggactacgccggccgttgcgattggccgatcgcctgggcggagctgcgttcgcggttcgagcgccgcccgaacttcggccaatggttgcgctgggaggctgcgctggccgagatcggcagctactacaccgtgcccggggctttccgcgccgcgatgctcgccgaactcgctgcgggcatcggcagcatgatcaggttgtcaccgtcgttccgagccgtgccgaccgcggccgcgacggccggcatggaggacgaggagttcgcccatgccacgatctttccattcacattgctgcgcaacggtcagccggtctcgacggccgagatggcttccgttcatcacgcgttggcgtgtgacgtgatcgcggcgatcggcggcagcgcggcggaccgggaggtcgccgcgcagcgctgcctgatcggccggccggtccggctggagcggcaggacgaggcgccgcaggcagtgctgcgcctctgcgtcggcgcacgcttcgtcaccgaggcctggtcgcccgatgcgcgggagtcgcaacgcaacgtgcagcgccttctcgaccggatcgcgcacgtcctggtgaagatcgagctgctgctcgaccgcggcggagtcgcggccgtgccggccgcgcccgcgttcgaggtgtgagatgcagcatccagtttccgctccgatcggcttgactgcggcgaactatgccgaccgcatcggctttgcgcagctgacacgccgggccttcgaaggtgtcgatctgcatcccttgcgcgaccagctcgtggcgcggatcgcggcggggacggcgctggcaggcgaagcgctggatctgtcgttgatcagccagcttctgggcgacaaggatcaggggcttgcgattcagtctgaagtgctggccttccatcaattgttccgcacgcccagcgcggcgccgaagcccggcttgcgcgtgctcgcgctcgcagccgacatcgacatggggggcaatacgccgatcgatttcctgctcgaagactccgacatcgagctgctgacgctttacgtggtcaagggcgtcggtctgccggaaaccttgcccgagcacgatgtcgccatcgtggtcgcctcggattccgaggaatgccgcgaggcgctcgctctgatcgaaaaggccgcgccgcaatggccgcggccgatgctcaatcgccccgatcgcatcggcaatctcgatcgcgacaagctgtatcggctgctggccggtgtgccaagtctcgatattcctgcgaccattcacgcgacgcgcgcgcaattgtcggatctcgcacgaggcgcaatcgcgtgcgaggacatcgcgagcgacttgcactttcccatgatcgcacggccacgcggctcgcatgccggcgtcggcctcgccaagctcgacgaggcggcggcgcttgcggcctacctcgccgaacggaaagagcaggacttcttcgtcgcacgtttcgtcgactatgtcagcgccgacgggctctaccgcaagtatcgcctcgcgatggtcgacggcaagccctacgcctgccacatggcgatcgccgaccgctgggacatctggtatctcaacgcctatatggcgttcagcgaggagaagcgggccgaggaagccgtcttcatgcgcgacttcgacaacgccttcgccgcgcggcatggcagcgcgctcgacgagatgagccggcgcgtcggtctggattatttcatcatcgattgcgccgagaaccagaagggcgagcttctggtgttcgaggcggacaacaccgccgtcgtgcacaacatggattcgccggtcgtgttcccctacaagccgccgcagatgcgcaagatcttcgccgcgttcactgcgatgctgtcgcggcatgcaaagacgggcaaggagagcgcagcatgaacgagatcatccgcaatacgcaaagctccgtcacgagcacctcgctcgatccgcaggactggagcgaatttcgcgcgctggcccatcgcatgctggacgagacgatcgacggcatcgccaacgttcgggcgcgcccggtctggcggccgatccccgatgatgtccgtgcggcattcagagccgacgtgccgcgcgaggcgagcgaccttgccgacgtctaccgcgagttcgccgagcatgtcgcgccctatgcgacaggcaacgtgcatcccgggttcatggggtgggtgcatgggggcggcaccgcggtcggcatgctcgccgacatgctcgcggcggggctcaatgccaatctcggcggacgcgaccacatgccgatcgaggtcgagcggcagatcgtcgagtggatgcgccgcctgttcgcatttcccgatagcgcgagcggtgtgttcgtcacgggcacgtcgatggccaatctgatggcggtgctggtggcgcgcacggcggcgctcggcacgctggcgcgccagcacggcatcggcaatgacggcgcgctgcttacggcttacacgtcgcaggccgcgcatggatgtgtctccagagcgatggacgttgccgggttcggcaccgatgcgctgcgcaggatcgctgtcgatgccgatcatcgcatcgatgtcgccgcgctacgcgcacagatcgcagttgatcgcgaggtcggcttcaggccgttcctggtggtcgcgtccgccgggacggtcgatgtcggcgcgatcgacgatctccgggcgattgcggagctttgccgcgagcaaggtatctggtttcacgtcgatggcgctttcggtgcgctcgcgatcctgtcgcccgagctcgcgccgatgctcggcggcatcgagcttgcggattcaatcgcactcgattttcacaaatggggccaggtgccttacgatgcaggtttcctgttggtgcgcgacggcgagcagcatcggcaggcctttgcacagccggcggcctatctgcgccgcgaggcgagggggcttgcagcgggggcggtctggccctgcgatctcggccccgatctgtcgcgcggctttcgtgcgctgaagacatggttcacgctgaagacgttcggcaccgatcggctgggtgcggcgatcgcacgaagctgcgcgctggccagatatctcgaggcacgcgtgctggccgaatctcggctggagctgctggcgccggtcaatctcaatatcgtctgcttccgctaccgtgccgatgatgcggtcaatcgcgagatcgttgccgacatccaggaaagcggcaccgcggcgccctcgagcacgacgctggacggcaggcttgcgatccgcgctgcaatcgtgaatcaccgcacagaggagaccgacatcgatgcgctgatcgccgcggtgctggagttcggggaacgacggtgcagcggcccgctgatcgaggtcgaagcgccgcctctcgcggcgcagtagcattgacgtgcgccagaaaagacaacggccccggaggcgatccggggccgttgtcgtttgcgcggcttggtcgtcgcgcggctagggcggggcgcgatcaggcggccgagctcacgtcggccttgtccgcttccggcttcggatgtgtggccacatattgatcccgcagcttctcttcgtaggcaatcagcttgcgggcgtccttcagcgcccggtaaaggtcgccgttcaggatgttgttgttgatggcctcgatgatcggccaggaactcggcaccgcggtgacgatgtcgcgcaccaggttgaagtaggtgccgtgctgggtctgcggatccggtgagatgtacatgagctggaccgcgagatagacgagcttggcgggcgtatcggcggtctccggcgtgaggatgtcgcgctcgcgcaggatcggcacgttgtcgccgtcgatcaggaggcgcgcccgctggtcggtgttggtaatcacgcagttaccgacgatgatgcgttcgtgcggtctgagctcgaccttgagggccatgcctgttctccatcaacgctttcgtaaccgagcgttcgttgcggctcatcaaggcccaattctcgcttggaataagttaacgagttgtaaattccgcggatttgcggagaaaaactcaatcgtttcaatgccgcgcttgggggccgatgcggcgatgcgggcagcgtccgcggccgaatcaggcgcaacccgacaaaagcacgggtttcatttcatgtttcgttagaggtcttggcgccacggtccgccggtcgctgggtcaatcgatccaagcagacgcgtaacagtagcgtcgtttaccagaaaggtaacagagtcatgtccggtatcgttctctccgcatcggttcgtcagaacctgctctctctccag

SEQ ID NO: 258 - DNA, 5028 bp, Bradyrhizobium colbertium
tcagagccaatattgcaagccgaatgacagtcagaatggctgaccgcaaagctaatcgaactggggctgccggccgtcagtttggaatcccgccaggttaaggcggcacttgcggccatgccggttaagaccgatcggaatgacgcccgtggcatcgcgcaggtggtgagaacgggatggttcaagcctgttcacgtcaagagcatcggcagccaaagggcacggacgctggctgcggctcgcaagcatatcattcgctccatcgcggccgcagagcaagtcatccgcggacttctgcgtccgctcggtctcaaagtcggaatcgtctcgcggagtctgttcgcgacgagagttcgtgagctggtcggcgacgacgccttgctagaggcgatcatggatccgctgcttgctggacgcgaagcgctgatgcgggagtacgcccgcttacatcgtctggttctgaaggccgtgcgcagtgacccggcttgtcggctcttgatgacgatgccggggatcggcccggtctctgcgttgaccttccgctccactgtggacgatcccgggcgattcctgcattcccaatccgtcggcgcctatctcgggttgacgccccggcgataccaatccggtgaggttgatcgggtgggacggatcataaaagtcggagatggtgagacgcgcacagccctgttcgagctgccaacgtcgttctcaggctatcaacccgatggtctccgatgaaggcctgggcggtgcgtgttgctcaccggcaaggaagtaagcgcgcgaaggtcgcgctggccagaaagaaggctgtcgtccttcaccgaatgtgggtcgatggaaccgaattccgatggacggcggtggcgtaaagacatcatcgccatttccagagacgcccgtcgcggggcgtgggaatggtcgagttcgtatgatctgtcgtggcatccgccctccaggtcgggtgactacgccgaagagcttgaaccgaccattcaaccgaatcccatcgtgtggcggctttgccgaccacgaacagaagcaaggtacccgcggcacgcgcccttaagggattgacagaggcagaccgaatacagaagcagccagtgtttgagccggcgcacattcatgggaccgtgcattggaacgctgccgattcgctcgatttgcgaggctgtatcaaccaggcgaacgacacagtccaaagacagagcatcgcaatcggaaccatgtagtaaggcgtgaagatagggtgactcagaaagaagccaaggttgatcatgagattccccgcgacgaggaaagcgatctgatgcgcagaacggaggccacttcgcagcaaccacaacgtccagccggcagcgaggcatatcaaaagggactgcgggtcacgaagatattcgccgagaactacaatattgaatgcaggcgcgacagcgtcgctggcgccatatgtcgttgcaagcgggctgccggcgttgatggcctgggcaatcagcgttggcattattccgagagccacgccagcgacgaagccgacgctatccaggaagcttgccaaggtgcgcgaccgcaggaatgcaacgccgagaaacaaaccatagccggacgcgagcaagatattgggcagccttaaattgactgccgcgccgaggaggaggccaatgagcgcgatcagccacgagctgccacatgccctgttcacccagagggccgtgaggagacctataatgctgcagagagcaaccgtaggcgcaactgagtagctcgcttttgctgggttgatcatgccatagacggctagcgcaccaaagagcccggcaccgatcacgaaagacagtgtcctggccatccagatgccaagcagcgcaacgcagcaaacgactatactcgcgctgatgtagagcggcgcaacttggaagccttgtggaaaggccgcaagcaagaagccggtgccgggtggatattgcagaatgactttgccacttggtttccgaacgtggcatggccaccgatcgaggttttcaggatctggcaacgcaatttccttcaacctgcctacaaagtagcggtcatcgtccatcgttgcatcggtgttgagcccgacaacgccaaagcgctggaagagatgagcttgcctgagataacagacatcgtcgtagacgccgcgcgcctcgctccagcgccacatcgtgagggtgtggctggtgaggatcgccaagcagaggaaaccaaaaaaggctttgacacccgtcgacggcatgcccgtcgtgttgcatgtaattctatccattttcgtagcccccgcacgacgatattccgagcggtgcagcaactgcaagtattccaatcgagcgactagcacccgccggacgcttcggacagactcctcatacctggcaagcgcgccagtatgttatgggagcgcgaggccctttcagaaggtgctcaggtggcaatcatcattagcgaagtgggagaggcaaatgcgaagattttcggtgctgctgactatcattcaggctttcctcgccctacggcccgtttcggctggactgatagatgagcccttgggcgccctgaggtcgaccgcctggagggtctgcctcccgcaatcgcggccctgaatctagagcaaccgtagttgggcagatgaatgacgagcggtgaagccagatcccgccccggaaccgtcggggcggtcggcagttatttggctggaggaagaatgatgaaatcatcgctgttcgcggcaacaatgatcatcgcagctaccctgtccgcctgcacagcattggcgcagataaggccgcaatgggcctatgatggatcagccgtctgcccggaaggtcatgatttttctcggggcgcctgctggccacgcggaggttaccgccaaagttatgggcggggtgggagccaagctgttcgtccccgatggacacgtagcggttcggcagtgtgccccgagggcttcgattactatggtggcctgtgtcgatcgcgctactgaccttcgaaagcctggtcgcgatcctggctgaagcttccaagtggcggaatatggccattgcttcgcggccaatgactattcttcattgcccccatgccgcagctctaaagtatggcgtcagttttttaaagatctcagtacgaaaacggctgatctcccaggtcaacgcattcgttaaagcccgatgcgttctgatgtatcgcctcacggtcagcaacgacatttttcggcgcccatcaaggataatccacccgatcaggagcttcgcatcccactcgatttgtgcgtccgatcgacaggcaaaacgacctccattagttggccgacgaatagcacttcaccaaatgagttgctatatcgggcgtgcaacccctcagcacgagatctcgtcgctcgcagaaatcttcagagcgtccccctagcgttcgctgacagcatgctcgattgccttggcggccagtattgcagacctctcatccatgtgcatgccgtccggccatcgcagctcgctctttgcaagcttcaagtgcagccaatcctgcaaattgccaaaccggcctgacgcgaagcgccgcgtatcgctagctagctgcgtatgctctaattgatccgcatacggcagttcaacaagtaacacccggaccccctgacttcgagccaccgatgcaagccgggcaagctcatcgacgttgctttgcagagcggcagtcagatcctggtcaaaacctttggctgcccgatcgaggtacatttggttgttgtactctcgtgcggcctcagtcagaagccgattggctgccacaaccgactcgtgacgattgcgcggggcgtgttgccagttctcgtaaaccgcgacagccatgcggacaggacggaaaaatgtatcgtgcttgttactggaataattctcaataatcttctcatcagcgcctttagagagcaggttcgtctctaccaagattgtctgaggaagcttttcgcggttcagtagcaagaagcgaaaaccggtcagagcagagcctccgccgatcgcgagattccggacgttcaaaccgtcaaagtaatcttccctaatccgcgccatcagcgagcttcctaaaagaacaaccgccgggaccggctcgctcagatatctgtttaaagctacaagagttccgtctcgggcggttgttgcgggggcttgcatcccagttggaagcacaggcttcgtcacagcgcagatcagtagaaccagcgccgccgtcaatcccgattttataagccatctcaggccatcattatccatgcgatggaccaaatagcacccaaaccctttatcagcaatttcgccggggccccaattcacgcctccgacggggccaccggcgcgaataaagcagacgctctcgccggcagcaaagccctgcaaagaagctcacgcaagaagttgcggtcctcgattcgatgactcactacggcactccgtcattctcgcgcgcagagtgcatgaactcgcgttcttgagattgggcgtgagtctctgaattgctgggagtgcagagctctgctggtcggctgaacacgaccaaggcggacatcggacgcgggcccatttcttgcataacaacgcatacgcgaatgcggccaagtcgattcacttgcggcccaaaggcttaggcagcattggcctcggattcgccccatcatccgataggccaggcgtgtcagccgcctgcgctccgcttcgaactctgtggttcggtgatcgtacatcgcctctacccaccccatttcctcgcagatcatatccgctttcccgtcgctcgcgcatcccgaacccgaggataagacgatcggacgtgcctggatgtgacatcggccgcttcgagtggaaatgctgagtggcatgtcacaccctgaccgcttggcccgtcatggctccgagcgtcgatctccggcgttccgaacatagagacacgtcatgcgcgaaaacgaacggctggtctagcagtctgctgaaaaaccggcaaatt

SEQ ID NO: 259 - DNA, 10078 bp, Bradyrhizobium colbertium
cctaaccaggggccgtcaccggacgcgtaccacgatcaaagggcttaggctgatcgtcgttagccttggcccatacgttcgagggaggatcgatatgagcttgaagcgaattctgctgaccgccgcgcttctggctggatttgcggcaccggcactggcgcagccgtttccacgtccggtgctccaatacgccggccagttcgtttttggaccaacgctcattgtcgggctgacggtcgtcaactggaatgactactcgccagcgctgtttgcggcgtcgccgaagctgccgccgtgcgggctcaacgccgctgcatctcgcacgtgggtcgacatctacaatgtcaggaacacgagactctacggattctgcgacctcggcgagccgtttagcctgacgcagctctggttctcgcttccgtccgcccggcgcccgaggtcggtctacatcacgcttaccgaccggttgcggctccgaagagtggtgtcgaacagggtggctattccgtgagccggacagttgaagcggccgctttggtcttagctggaggacagtcaaccagcacggcgctcctgatatacttcgttctctggcggtcgctgacgtggcggccgaactgagggctgaaattgaggtcgtaacggcaccctgcgcgcatcgcctgatagattggtcctcgctcgatcacatagcttccttgagggagcgtcttgaggcggacgtgcgcggccgtctgttcctgaccgtggtccgcacccagataggtgacgcggtcggtcgacccgatcgaccagacaatcgcgaccgcgcacatcagcgatccaacgagggcagcgaccatcccgagttgcggtcgctcaacggttgtcaggaacgagttcatgccgttttgtctcgttccgggcttaccggttcatagtgcccgcccctcacatctcgcaaaaagaaagcggcgccccccgagaggagcgccgcaggttcttcctagctgcgtctgggctcagtagccgcaggacgcgcagttcatctgcaccggggcgtagtaggaatagccgggcgagaccatttcgacgcgctggcgcgtggcgtattgcggcgggatgcgctcgtactggacgctgggcggcgccaccatcacggtctgcggcaccatcacggggcggtactgcgccggcgtgcggtgtgcgacgactgagcccggcgacaccatcacggtctcgtcgacagtgcggtattgcgggggcacatattgctgctggtaacaggtcgtgcagggcggcggcgcatagcaattgtagcagccagcggaggctgcgcccgtcatggaaatcgcggcgacggccgttgagaagacgacagcaagagtacgagacattgcggtggtgccccagttgcccgaaatggatttgcgaaggtcgcgccagtatacgccgcaaaatcctgggctgccgaacttcgtgggggcatccttaatgcgaacggccggcgatagccggccgttcagaacttgttgaccatgcgcgtgaggcgaacggcgcgggcttacttcacgcgtcgcttcacctcccgcaccgcgccacgcgcggcactggttgtgagcgcagcgtatgcctggagcgcggtcgagacgttgcgcttgcggccttgcgcctgccaggcggaatcgcccttggcctcctccgctgcgcggcgcctggcgagctcctcgtcggagacttcgaggttgatgctgcggttcgggatgtcgatggcgatgatatcgcccgtgcgcacgagaccgatattgccgccctcggccgcttccggcgagagatggccgatcgacaggccggacgaaccgcccgagaagcggccgtcggtgacgagcgcgcaggctttgccgaggcccatcgatttcagatagctcgtggggtagagcatctcctgcatgccggggccgccgcgcgggccttcgtagatgatgaccacgacctcgccggcgacgaccttgccgcccaggatgccctcgacggcggcatcctggctttcgaacacgcgcgcgggaccggagaatttcaggatcgaggcatcgacgccggcggtcttcacgatgcagccgtcctgcgccaggttgccgtagagcacggcaagaccgccgtccttgctgaaggcgtggtcgagatcgcgcacgacgcccttctcgcggtcggcgtcgagttcgtcgtagcggcgctcctggctgaaggcgacctgggtcgggatcccgcccggcgacgcgcggtagaaggtccgcaccgcctcgctcttggtgcgcttgatgtcccagcgttccagcgcctcgttcatggtcggcgcgtgcacggtcgacaccgaggtgtcgatcaggccggcgcgatcgagctcgccgagaatgcccatgatgccgccggcacgatgcacgtcctcgacgtgtacgtccgcaaccgacggggcgaccttgcagagcacgggcacgcggcgcgacagccggtcgatgtccttcatggtgaaagccacctgcccttcatgggcggcggcgagcagatgcagcacggtgttggtcgacccgcccatggcgatgtccagcgtcatcgcgttctcgaatgccttgaagttcgcgatgttgcgcggcagcacgctggcatcgtcctgctcgtagtagcggcggacgagatcgacgatggtgtggccggcctcgacgaacaggcgcctgcggtcggcatgggttgccaccaccgaaccgttgccgggcagcgcgaggccgagcgcctcggtcaggcagttcatggaattggcggtgaacatgcccgagcaggagccgcaggtcggacaggccgagcgctcgatcaccttgacgtcctcgtcactgaccttggagtcggcggccgccaccatggcgtcgatgaggtcgacggctttggtcttgccctgcagcttgaccttgccggcctccatcggcccgcccgagacgaacacggcggggatgttgagccgcagcgcggccatcagcatgccgggcgtgatcttgtcgcaattggagatgcagacgaggccgtcggcgcaatgggcgttggccatgtactcgacgctgtcggcgatgagctcgcgcgacggcaggctgtagagcatgccgtcatggcccatggctatgccgtcatcgacggcgatggtgttgaattcctttgcgactccgccggcttgctcgatctcgcgtgccacgagctggccgaggtccttgaggtggacgtggcccggcacgaactgggtgaaggagttgacgaccgcgatgatcggcttgccgaaatcggcatccttcatgcccgtcgcgcgccagaggccgcgggcgcccgccatgttgcggccgtgtgtggtggtgcgggagcgataggctggcatggcggtttccgtcctcgggtttgcagccgggcgggaaaatgtggagccgcctcaggcctttccggccggatagcgcacggaccgtgcgggcgcaacgggaacttggcccggacagggctcccctgctcccggcgcggaccctcctggcccgcgtgcctattgcagggttggatcgagccggtcgcgcagccagtcgcctatcacggagacggccagcgtggtcaccacgatggtggtcgccggtgccagcatgatccagggcgcacgggtcagatattcccggccgtagccgaccatgttgccgaggctggtcatcggcggctgcaccccgaggccgaggaacgacaggccggattccatcaggatcacctcgggaaacaccagcgtggtcgagacgatcagcgtcgaggcgatattgggcaggatgtgccgaagatagatccgcgacggcgtcgcaccgagctggcgcaccgcggccgcataaccttgcgcattggccgagatggcaagaccacgcgcgatgcgggcatagcgctcccagccgaacaggcccatcaggccgaccagaagcggcagcgagttgccgaagaaggcgagcaccgcaagcgccatgatgaggaacggcatgctggcctggaagtcggacagcatcagcacgagctgctctacagccccgcggaaatgcgcggcgaggaagccgagcgtggtgccgacgatggccgagatggcggtggcgccgaacgcgatcagcagcgagatgcggatggagacgagaagacgcgacagcacgtcccggccgagctcgtcggtgccgagccaatgcgcagcattgccgggcgccgccagccggttgcgcaggtcgagctgggtatagccgtacggcgcgatcttctcggcgaaggccgcgatcagcagcatcgcgacgatccaggccaccgccagcgccaccgagacgggaatggccggcaggttgatgtggcggcggacagacgtatccttcagcgtggcatcggtcatgcgtgcgctcctttggtgcgcaggcgcgggtcgagaaagccgtagaggaaatcgacgatcaaattggacgtcaccatggtcatcgcgaccagcaacaggatgcactgcacgacggcgagatcgcggttggcgacggcgacgacgagaagccgccctactcccggccaggcaaagacgctctcgaccacgaccgcgcccgcgatcagcgtgccgaccatgaagccgagaatggtcacggtcgggatcgctgcgttcggcagcgcgtgcgacgtcaccaccttgcgccacggcacgcccttggcggaagccgtgcgaatgtagggctggcccagcacctccagcatcgcgctccgggtgaagcgtgccagcaccgcggcgccgccgaggctcagcgtcgtgatcggcaggatggcgtgacgccagctgtcctgcccgcctgacggcagccagccgagctgcacggcgaagacgaggaccaagagcagcgccagcacgaagctcggcaccgtgaagccggccactgccgtcatcatcacggcgcgatcaattcccgagccgcgatgcagcgcagcgtagatgccggcgggaatgccgagcgcgaccttgaagaagaaggccggcaaggtcagcgccagcgttgccggaatccgctccagcaccagctcgatcgcaggccggccgtcgcgcatcgagcggcctagctcgcctttggcgatggcgccgaaatagtcgaaatactgagcccagatgggatcatcgaggccccaggccttgcggaacgctgcgagcacctccggcggcgcctcgggtcccaaaatcatcagcgcgggatccccggagagtcgcagcacgatgaaggcgaaggtgacgacgaggacgatcgtgagcgcggcgcgtccgatccgaatggcgagatagcgtcccatcaggcggcgtcccgtgtctcggcgcccgtgacgagatggcaggccacctggcggttgccgccgacagccaggagcgccggcacctcgctggcacagcgcgggacggcgcgcggacagcgcggatggaaggcgcagccgttcggccgcgcggccgggttcggcggatcgcctgacagaacgatacggcccgcgctgcggcggccaggcgcgggcgaggccgagaccagcgcctgggtgtagggatgctcgggccgcgcaaacagatcgtcggcgctgccgatctcgacgatgcggccgagatacatcacggccacgacgttgctgatctgcctgacgacgcgcagatcgtggctgatgaacagcagcgtcagcgatagttgtgcctgcaggtcgcaaagcaggttcacgacctgcgcctggatcgagacgtcgagcgcgctgactggctcgtcgcaaacaaggaaatcgggtttcgtggccagtgctcgcgccagcacgacgcgttggcgctggccgccggagagcgcgccaggatagcgcgcgccgtgggccggtgtcagctcgaccgcgcgcagcagctcccggacgcgatcttcgcgctcggcgggcgtgccgaggccgtgaatgtcgagcggctctcggatttgaaccgcgacgggcaagcgccggtccagcgcccccagcgggtcctggaagatcatctgcatccgcgcccgctgcgcccgccacgcggccgttcccggcgcagccatgggcctgccctcgaaccgcacatcgccgctgtcgggcggctcgaggccgagcacgatgcggcccgtggtcgacttgcccgagccggactcgccgacgaggccgagcgtctctcccttggcaatcgtgagcgacacgccgtcgacggcatgaacggccgtcgcgcgtccgaacatacccgagcgcatggcatagctgcgcgagatcgcggacacttcgacgagcggaggcctcattccgcagccatcccgagcaccgcgcggcgcgaagcctcggcgcggacacaggcgacgctgcggtcatcggcgatcggcgccagggtcggcgcagcaaggccacacgattcgccggcaagcgcgcagcgcggcgcataggcgcagccgctcggcatgtgcgccggatcaggcaccgttccaggaatggcagtgaggcgccgacgcggcccgtcgagcggcggcaatgcgccgatcaggccctgcgcatagggatgcacgggatcggcgaaaagctggttgctcggcgccgcttcgacgatgcgcccggcatacatcaccgcgacgcgatcgcaattctcggcaacgacgccaagatcgtggctgatcaggaccatcgccatgcccatctcgcggcggaccagcgagagcagctccaggatctgggcctggatagtggcatccagcgccgtggtcggctcgtccgcgatcagcagatcgggatttccggcgagtgccatcgcgatcatgacgcgctggacctggccgccggagaactcgtgcggataggcggacagccgccgcgtcgcgtcggggatgccgacgaggtcgagcagccgtcgcgcttccgccttcaccgcctcgcccgagagatcgcgatgcagcgccagcgcttcgcaaagctgcttgcggatggtgagcaccgggttgagcgcgctggcaggatcctggaagatcatggcgatccgcccgccccggacgtgatcgagttctgcggacggcgcgccgaggatctctcgtccgtccagccgcaccgaacctgcgacctgcgcatgccgcggcaggaggccgagcgcagccagccacgtcaccgacttgccggagccggactcgccgacgaggccgagcgcctcgcccttttgcagagcgagatcgacgccgcgcagcaccggcacgccgctgaaggcgacgctcaggcctgcaatggcgatcagctgcgtcacctcaggcctcgaaattgccggcgcggaaatccatcgcgaaggcaggcgaggccttccacttgatcgatttcggcttggcggtgaaggtcgcgttctggtgcagcacggtgtaggcggggtcctcgcgctcggcgatctccagcatgcggcggaacgccttcttgcgcgcggcgcggtcggtcgaggtctccaggaactccgagagcttgttcagttcggcgttggtccattcgccgatctgctgctgctggccgttcgggccgtgctgggcgaccagcgaggacaccggatcgttgaacgcagccgagttcgaccagtcgcgcacggcgcgtgccggtccgcgctccatgatctgcgaccagttttccttggtctcgatctgaacgttgaggccgaccgacttccacatctcgaccaggatctgcgcggtcgcgacctggttggtgtagtaattgttgagcaggcgataggggatcgcatcgcccttgtaattggcctgcttgagcagatcctgcgcgagcttcggatcataggcgggcacgttccagtcggcgttgaacatgtcgccgtagaactcccattgcagccccttcggcacgcgggtgcggccggcccacaggctgtcgacgatggcctggcggtcgatcgcatgggtgaaggcgcgccgaaccaagggattggcgagcacggcgtggttcttgtcgaacacggtgaggcggggattgaggatggtgccgccctgcacttcgaaggcggagttcttctcgatgccggcgatctgatccggcgggatgtcgcaggcgaactggtattcgcccgacaacaggccgttgatgcggctcgcgacctcgggcacttcgaggaaacggatgcgcttgagcggcgggcggccgccccaatattcgtcatgcgcttcgagggtcaacgacacgtcgggcttgagctcgacgaccttgtacggaccggtggtgacgggcttgcgcgcccagtcgagatagctcgccgattcgtcccaggcgcggcggttcatgatgtcggagccgtagcgcgacaaccgcccctcgatggtgacgtcgggcgtcgcgttgtagaagcgaaccgtgtacttgtcgacggcatcgacgcgcacgaggtccggccagatgcgccgggcgacggccggcacgtcgggcggcagctccttgcccggccgcggcgtcgggatcttctcgaaggccctgatggtggagcggttcttggcctcggtctcgccgaacatgcgctcgcggctgaaggtgaagacgacgtcttccgccgtgagctcgtcgccattgtggaacttgacgccctggcgcagcttcacttcgacggtctgatcgtcgatgcggcgccattcggtggcaaggccgggcacggcttcgagattgccgcgccagttcttggagatcaggccttcccagatcgaggagaagaacacgcgctctccgacattggactgctcgcggagcacgtcgagcacgttcgaattggtcaccttctgcacggcgatcgtcaccgacggacggttgtcgccttgcgcgatcgcaaagcgcggcagcagcagcgtgctcgcggcagcgccgccggatttcaggatggtacgacgggtgagtttgctcatatgggacccctgcccttgtgatgtcggttattcggcgagcccgagcgcggcgagatgggctgcgccggcgcggacgtcgtcgtgattgcggagctcgaggatcaaccgcgggttcgacgtgagccgtcccagcgcccggaatacggcgacccacgggatgttgccttcgcccggcgcccagtgccggtcggcaaatccgtcggtgtcctgcagatgcacatgtgtcagcatgtcgcccgcagtttcgacgtaatagtcgacgggcggcgctccggtggagatatgcgcgtaattggcgtggccggtgtcgagcgagacgcgaaccttgctgctttcgagcgccttggcgaggcgcacgcggtcacgaggatccttgtcttcgatgttctcgatcacgatctcgcagccaatcgtctcggcccgcgcgatcacctcggcgagcgttgctttgacgcgttcgaccagattgccgcgattgtcaggatagagatcgagattgttgtggtcccaggtcgtgaacggggaatggatcaccatctgcgtcgcgccgaggaattcggcggcgtcgaggccctgcagcaagcgcttggtcaccgcctggcggatcatgggatcgtggctgtcgatcttgaatccccagaacgggccgtgaatgccgaggcgcccggtatggcctgcgagcatctgcttgatctcgcccgcggtgctccgccaatcgctgtcgagcagatcggcccggaagaaatcctgtatttcgaggtcacgctgccgttcgagaagccagtcgcgatgcgcggggatcgatttgatggacaatgcggcgcccagcaccggcttcgacatggcttgctcctcggtcgtcagcaatgacggagagcagcgctagaccagttcaatgacaggcccatgaatgccgatgcgccgtaacgaaggagggtgtggacatcttgccggccaccccgagcagatcaggcacggacgcgcgtgaccgatgtagaacgaacacatggcaagcgagatctgtgtccgtagtgatccggaatggaatcctatccagcgttcacgtacatcgcgggacatcgatcggcggccacttccacgggcatcacctactgatcgcgcagcatggggttggg

SEQ ID NO: 260 - DNA, 172955 bp, Bradyrhizobium colbertium
  misc_feature (13425)..(13434): n is a, c, g, or t
  misc_feature (13998)..(14007): n is a, c, g, or t
  misc_feature (18154)..(18163): n is a, c, g, or t
  misc_feature (52682)..(52691): n is a, c, g, or t
  misc_feature (78193)..(78202): n is a, c, g, or t
  misc_feature (98032)..(98043): n is a, c, g, or t
  misc_feature (163226)..(163235): n is a, c, g, or t
ccccggacgtgggagctcataccggttaccgactatcccgggttcggttatagcgggacacctgatgacctcgattacagcttcgacggctatgcggcgtggctggaccagttcgtgacgcagctgaagctcgagcgattcgtgatctaccttcatgatttcggctcaccgatcggggccaggctggcgatcatgcggcctgagagggtggtggcccagatcatccagaacggtgacataccttacgaagatgcgcttggtccgaaatacgcggacatcgagaaatcctggtcgctgcccgatcaagagttgcgtgcggcgatgagggaggctgttaccgaaggaaactttcgcgacgaattcctgaatgatgtgcgtgcagaattggcgggactcatcccgccggatctttggcaattgcactggtcgttggtgaccgaacggaggaaagacgcgatctcagaccttctgtttgacctcaaggcgaaccgtcaatggtttcccgagcatcgccgttatctccaacagcacaagccgcccacattgatcctgtgggggccgcaagatcattacatgcccgaagagtccggccgcgcctatttgcgcgacctgcctgatgccgaattgcatctcctggacggggggcattggctgctggaaaccaacctcgatgaagttgtctcgttgatgaggtcgttcctcgagcggattcaacctgactggtagcgacagctatctgcctttgtccccaaagctgcctgtccgcttccaacccacatcggagtgaatttcctcgtccttctccaaagccgcatggcgaagagcgggctctaacagtgacggcgagtgcgcccggcgccggcaccgaggcgagctcccccagtcaccccggggcgttcgacttcgccaagatcttccctatatcgtgggcaatgatcggtgatgcagcggacagcttcgatggccaggagacgcacgacagatacggacgccgacgacctgccgcgctatttcgtctgggtccgcggcctcgagggccctgagccgcagaaatggatggcgatggattttggcgtcggcgactggaagcggcccctcgtgctcgcctatctggagctgccggcggacgaacgacagctgtcattgtcgatgcttgcccggcgatatccgccgccacgtgtcgatcttccctagcagaatcggcggcggctcgaccacccgtcgagtctccccgcaacatcagcccgggacatggcagtcccatgtcatccccgcccccatgattatgggtgtcaccgcatccacgctgcggatagacttgcctcgcgccgcgggggacacgcgggtcgcgggacgatgatcatgaccgaacagggcgagacgggtgaggccatcaccatcctcctcgtcgaggacgatgcgccgacctgctggcggctccaggatgcgctggtcaaggccggttacgaggtgcggagcgccggcacgctcgcggaggcgcggcaggccttgggcggcggcgcaccgcgcgtgctgctgaccgacctgcggctgcccgacggccacggcatcgaactgatccgcgagatgaggcagcgctttcccgacagcgagatcatggtgatctccgcgctgggcgacgaggagagcgtgatttccgcgatcacggtcggcgccaccggctatctgctcaaggatgcctttcctaccgacatcgccactaccgtgcgcgacctggtcgcgggacattcgccgatctcggcttcgatcgcccggttcatcgtgcggagaacacagggcgccgcacagaactcggcagagcaaccgcccggacctgcgctcaacacggcgaggctgaccccgcgcgagatcgacatcctgtggggcatcgcgaagggcttcagctatgccgagatcgcgagccatctcggcctgtccaagcagaccgtgcccggccacatcaagaacatctatcgcaagctcgaggtgcacacgcgcagcgaagcggtgttcgaggcggtgcagcagggcctgatcaagctgtgagcgagctcgccgccaaggcacccatgaaggcaccggccaagtccgcacggcgccggcttttggcctcgcgactcgtgccctatctgctgttccaggcgctgatcgtggtcgccaccgttatgggcttgcgcctgctgcagccgagcgaccccgaggattctgcgctcagcggattctcgctgagggaggacggcttgatccgccccgtgacgctgccgcatttcacatcctcgcgctattccgtggcggacccgccattctacgccagcacctttacctaccgaagcgccgatgcggctgcgggctggtcggtgtacctgccgcgcttcagcaacgcggtggaggtcgccgtcaacggcgtcgtcgtgctcgactcccggcgcgacgccaacgccaaccggcccgaccgcaacacgccgcagatcgcagcgatcccggcttcgctgctgcacgaaggcgcaaacgagatcacggtgcggctgttcgtgtggggaccgctgaagggctttctcgacactgtctatgtcggcccggacgccgctttgcgcccggccttcgagacccgcacgctgctgttcgtcacgctcccggtggtattctccgcctggcaggcgatcctggccgtcatcctcgcgatcatgtggctgatgcggcgccacgagccggtctatggcgtgctggctgcagcgatggtgcttggcgtggtgcaggcgttcgcgccgccgccggtgccgcccgtcaccgtctcccggctggccgcggtgctgctggcgtcggcaccgatcgagagtgcgctgatcgtcatgttcgccgtgctgttcttcggctggcgctggccgcgctacggcacgctgctgttcgtgcccggcatcctggtgttcgcggtcgggctgctggggggcccgccgctgccgcgcattctcttcctggtgctcgggattcccacggtcgggctctgcctgttcctgatggcctgcatcacggcaaccgcggtggtgcggcggcaggatgctgcgagcttcacgatcggctgcgccgtgaccatcgtgctggtctgctggatccaggacatactcacggtgcttgagatcgcgaccaacgatcgcatcttcgtctcgcgtttgtcctattcggcgatgctggtcgcgatcggcgcggggctgacctggcgctttgcccgcgcgttgaaccaggtcgacagctttgccggccagctcgtgacacgcgtgcgcgaagccgaggagcggctgaaggcgagctttgcccgcgaggaggagcgcgcccgcgctgcggcgctcgccaacgagcgcacccgtctgatgcgagacctgcacgacggcctcggcggccagctggtgagcatcgtcgcgctgtccgagcgcggcaatgagggcgcgaccatcgcggacgccgcccgcgcggcactgaaggacctgcgcctcgtcatcgattccatggacgacattggcggcgacctgatgctcgcgctcggctcctggcgcgagcgcgcgacagcccagttgcgaccgcacgacatcgcgctagactggcgcgtggcgacgccgcagggcctgccgctgcatcccgaactcaggccgtggcatgtcatccagatcatccgtatcctcgacgaggctgtgaccaacgcggtcaagcacgcgcaggcccgccacgtcgcggtcaccatcgagacacgtgacggcagcgacagaccttatggcgtgatcagcgtggcggacgacggccgcggcttcgcgctggccggcaatagcacggccgcgggcaccggccagaccgcgcgcggcctgcgcaacatgagaagccgcgcggcgcgctgcggcgcaatgctcgatctgagctcggatgcctcaggcacgcgcgtgcaactgcaattgccgcagcgctttcccgacagcgacatggctgcgggctgaaaagccccctccccgaacgtgtggggcgcacggagagaggggacgggccgggtgatttgcctgcggaggacaggggtgttcggccgcaggtcccgttggcccgaaacaatgcaatcaaatcgatcgaatgaagatatcagcgccggccgacgcgattgaccgggccgccgcgattcatcggcgtacctgcgcgcacgccgacgccgggcgcaccgacgccgggggtcgcgaccgcagcccgcgcaaccggagctcccggcgcgaccaccaccgccgcagtcggccgcaccacgcagcccttgggcaccccaacggtcttgcaataaaccaccgcctgcgccgggctcgtgcccagcgagaccatcgccgcgcccgccagggccatgatcgtcagcccggcgctcagcgctccagctctcttcgacattcagctctcctgctcccgttcggcgtcccggtgcaatcaccgggtctcgcagccgaggtatagcctgaatggcaaaagacggcgcgaggatacatgccatgaagatgggggtgccgcggccgggaggccgagccgacgccatgaacatggcatggacccgcgccggagcttcgcgagatggtccggcccgattgatcccggtcgggaccaacgacgattccaaagaggtgcttcatgaagatttcggttcttgccgcgctgctgctcactgccaccgccctgcccgctgctgcgcaatccggtccatcggcccaggagcaaatggcctgccgcggtgacgccagcaaattctgcgccgagcacatcggcaagccgccgcagatgaacgcctgcctccgcgagaacaagtcgaagctctcggattcctgccgcaaggtcgttgaagcgcgcggaggctagtccttcatcacaccgttggagaaggcggcgagggcggcgccccgccgccctcgcgagagcaagcccaggcccgagcttcggcctgggctacgggatgggccccgcagactgcttgttggatcggcggtgagggccacctcatgctccgccgctattcctgcaccatctcgccgctgccgccgaattcggctgggaaatccttcagcttcggcaggccgtcgtgcatcggcagcacggtctcggaatagttgacgtggacgccgggcgtgaatgcgagcgtcgggatggttgcggcgaagacgtcgaccagaccgagcggcggatggttggtcatgagatggccgccgcacttcctgcaatatttgcgttggctgagcggcgtcttgacgaaggtctcgacattctgagcaccctcggtgatgcgcaccgcctccggcttccagaggctgaaggcgttgaccgggccgcccgaccaggagcggcaggaacggcagtggcaatagcccatcgcctccggcgcgcccgcgacttcgaccgtgaccgcgccgcagaagcagtttccgacatgtttcatcgggccgtctccgtctctcgaacgaaagttgtcgcgcgtcctcctttcggcggacgcgcagaacgaggcgaggctatactgaccggcgccacggaataagcatggagacccgctgcctgtactgccggtactcgtcaccgaagagagcgacgagatcattctcctccagcgcgatgccgacgaaaatgtagagcgtggtcacggccgcgaacagcagatgccccgcggtcatggtcggcgccgcccagaacgcaacgataaagccgagatagatcggatggcggacgaacttgtagagcagcggcgtcttgaaacgcggcggtgccgtctccttgccgacgagttggttggtcacctgatgcaagccgaacagttcaaagtggttgatcatgaaggtcgaggtgaacaccagcacccagccgccgagggacagcgtgaccagtgtcacggcaagatccggatcttcgacgttccatacgacggacggcagcgggcgccactgccagaacaggaggagcagtgacaggctcgcgaacagcacgtacgtgcttcgctcgaccggcttggggacgaactgcgtccaccaagccttgaactgctggcgcgccatcaggctatgttgaaccgcgaacagcgacatcagcagcaggttgacgatgaccgcgcgaacgacaggcgcttcggctccgctgtcgatcgtcttgggcaccatcacccccatgacgaagccgatggcgtagagaatggtgacgaaaaacacgagataggccgcaattccgtacagaaaggcgaggaacttgaaaatgcgagagcccgcaacatccgggccgatggaatgaacctggtgatcaatttgggtcatgaaacgctccgttgtgccgagacatcgacacgatttggtcttcgcaccatgcccgatcgtccgtccccagactttcgcagacggtttattttcgcctgaggcgactttgatttttgcttgagacgactgaaacgtgcgatttcactttgaaaacaacgttcttgacggcgatctgcgggagctcacccgcgatggagcagccgtgccgctgcagccgcaggtgttcgatctgttgctctacctcgtcacggagcgcgaccgcgtcgtcagcaaggatgacctaatcggtcggatctggagcgaccgcatcgtctcggattcagcgctgaacagccggatcaacgcagcgcgaaaggcgctgggcgacgacggctcgacccagcggctgatcaagaccattgcgcgcaagggattccggttcgtcggcgaggtccgggaagaagcggcggcatcctgtgcgcaggcggaagccgagggaacgcccccgcgcgtggtcgaccgcccggccgtcgcggtactcgccttcgagaacctgagcggcgatcccgcgcaggactatttcggtgacgggatcagcgaggacatcctcaccgcgctgtcgaaacagcgctggttcatggtgatcgcccggaactcgtccttcacctacaaggggcgcgcggtcgacatcaggcagatcgccgaggaactcggcgtccgctacgtcgtcgaaggcagcgtacgcaaggcggacaatcgggtgcgcatcacagcgcaactcaacgacgccgtatcgggacgccatctctgggccgagcgctacgaccgcgagctcgtcgatgtattcgccgtgcaggacgagatcaccaatgcgatcgccgcggccatcgagccgcagatccacgcggcggagaatgttcggagccgtcgcaagccgcctttgagtttggacgcctgggacctcttgatgcgcgcgttgtcgcattactggcgcgtgacccggcaagatcacgacgccgcacgggcactgctcgagcgcgcgctgacgatcgatccgaactatggccaggcgctgtcgctgctcgccgttaacgacatgttcggcgtgcatctcggctgggttgagctggccgtggtcgccccggccgcggaagctgccgcgctcgcggcgctgcgctgcgatcatgaggattcctgggcgcatgcgctcggcagcgtctgcttctcgacccgcaggcttgcggatgcgctgtcggagttcgagcaggcgctggcgctcaatccgaacttctcgctggcggagggctactacgcgctggcgctgtgctatgctggacgaccgaaggattcgttcgaggccgcgcaacgggcgatccggctgtcgccgcgcgatccgtccttggcggtctatcacggcatcgccgcctatgcgcgtttcaccgaacgtcgctatgaggaggccatcgcgctggcccgcgaggcgatccgccaccgcggcgatctcaccggcgcctaccgcgtgctcgctgtctgcgcgggaatgacgagtgacggagcgcttgcggagatggcactgggcgagctccgccgtactcagcccggtatctcgctgcactggatctctacacagctgccgtgggccaacgacgcggatcgcgagcactatctggagggatttcgccgggccggattgcggtgagcgccgcagtgctcttacctcccccggaggaccggcgctatgtacgcttccggcgcaaatggacaataacgtcgagccgcgcgatctcgtggccgggaagcgcctcgggcagcttggtgaaggcgaggccgtcggcaacgtcgaccagcacatcctcgccttcgagatagaagtgcggatggacggacgtgtcggtgtcgaagaacgacttgagaccgtcggccgcgatgcggcggagcaggccggcttcggtaaactggttcagcgtgttatagacagtggcgagcgacaggtacgtattcgccgccatcgcctcctcgtagagactctcggccgtgacgtggcgatggccgcccaggaacagcaactggccgagcgccaggcgctggcgcgtcgggcgcagaccggcattgcccagcaattgcaggcagtgttgcaggcccgcctttgccgtcacatcgaggccagcgatatcaggtccgtgatcgtcatcggctgggatagtcgtggcctgaatgtccatcgatcgtctcgcggctcaaggaagggcgcgcgcagcagcgcgcaccagttgccactcgatcgcaaaagcagtggctgggctttgatccggatcaaatcgggaggggagccgtctctgacctagcgcaaggcgatccgtcccattcccggccagaagggtccgatatcaatgaggctcacatgtccaagccgattcccgacaaggcagagatcgcgctcgaataccctgacaagttctatgtcggcaccttcgagcattcgtcccgcttcgaggcacggctcgacggcagcggcgtcacagtggtgcttcagcatccgggcgcgacggacgaacgcaaatcggtgcatctccacatcaatttcggcctgctcgccggcatcctgcgtgacctcgcaggcagcgtcgctggcatacccaaggacgacatcgcgcaccgcgagcagctggccgaggcgctcgatgagctgcggcgggcgctcggcaccaattagcgacctgatgcttttggtcgcaggcgcaggcttgtgcaccgcctcgccttgctctcaacgcgactgaacctgtccgatcgctcgaaatgggccgatccgacgtggccgagtgcgcacgggtaaacaggacgcgctgtacattttttgtgctgatgctgtcgagactttcatcttgcggcgccgaacgagactgtgggagcctcaatcccggatggggactgggatgggccggccgtagctttcgcgcgcgagaacgcctgcgggagcgttcgaggttggcctcgcttgagaaagatacgacatgccgaaaagagtgttgcttggtcttctcctggcttgcggcctcacggccccgacactggcgcaggagcccaaagcggggggcgtcatcaatgccgtgatccagcccgaaccgcctggcctgatgcttgcgatgatccagaacggtccgacccagatggtgtcgggcaacattttcgaggggctgctgcgctacagtcccaagctcgagccgcagccggagctcgcggaaagctggagcgtcagcgaggacgccaagacctacaccttcaagctcaagaagggcgtgacctggcatgacggcaagcccttcaccgccgccgacgtattgttttcgatggagatgctgaagcagacgcatgcgcgggcccgcaccaacctcgcgcaggtcgacagggtcgaggcgcctgatgactacaccgtcgtgttcacgctgaagcagccgttcggccccttcctcggcatcttcgaggtcggctcgatgccgatcgtgcccaagcatctctatgagggcaccgacttcaagaccaacgcatacaacaatgcgcccgtcggcaccggtccgttcatgttcaaggagtggcagaagggctcgttcatacgcctcgtcaagaacccgaactaccacgagaagggcaaaccctatctcgacgagatctattggcagatcattcccgacgccgcggcgcgctcggtggcgttcgaaacgggcaaggtggacgtgctgcccggcgggtcggtcgagaatttcgacgtgccgcggctgtccaagctgaaggacacctgcgtcaccggggccggctgggaattcttctcgccgttggcctggctgtggctgaacaaccgccagggtccgctcgcggacaagcgggtccgccaggcgatcatgtacgcgatcgaccgcgacttcgccaaggacgtgatctggaacgggctcggcaaggtcgcgaccggcccgtccgcctcgaccatcaagtactacaccgacgacgtgaagaagtatccctacgatccagccaaggccaaggcgctgctgaaggaagccggctacaagggcgagaagatccgcctcatgccgctcgcctatggcgaaacctggcagcgctggggtgaagcggtgaagcagaacctccaggacgtcggcatgaacatcgagacgatcgccaccgacgttgcgggcggcaaccagaagatcggcgactgggattacgacatcgccttcacctatctctaccagtacggcgatcccgcgctcggcgttggccgcaactacatttccagcaacatcgccaagggccaggtcttcaataatgtcgagggctactccaacccggagatcgacaagctgttcgccgagggcgccgtcgccaccccggattcgaagcgcaaggagatctacgagaaggcgcagaagatcctggtcgaggacgtgccggtggcctggatgctcgagctgcaattccccacgattacgcggtgcaaggtcaagaacctgatcaccacgggaattggagtcaatgacggcttcaaggacgcatggctcgacaagtgagggcggtgcccacctctcccgcaaggagaggcgtcggccgctatcggcggccgttctcatcgccagatgcgatacgggcgagagtttacgctctctcgtggaacctgatccccctcaaccgcgccttcggcgcgacctctccccgttggggagaggtatggcgtgcggcacggccgcctcaaccgactagcttgcgaacctaaatgcttaccttcgttgctcagcgtgtcgtcaagggcgtgatcgtcctgctcgcgatcgtcgttctcaattttttcctgatccggctggcgcccggcgatcccgcggtcgtgatggcgggcgaggccggcgccagcgatcaggtcttcgtcaaacagctcagggagaagttcggcctcgacaagccgctgcccgagcagctcttcatctacgtcaagggcgtcgtgtccctggacctcggcttctccttccgccagcaggcaccggttgcaaagctgatcggcgaacggctgcccgcgacgctgctgctgacgctgaccgcattcgcgatttcgctcatgctcggcatcctgttcggcactttcgccgcacgctttgccgggaccttcctcgacacggccatcaccgtgttcgccctgatcttctacgccatgccgatcttctgggtggcgctgatgggcatcctgttgttctcggtcacgttcgattggctgccgagcttcggctacgacacggtcggcgggaattatacgggtcttgcccatgtggtcgacgtcgcaagacacctggtcatgccgggcatgacgctgggcctgttcttcatggcgacctacacccgcatgacgcgcgcctcgatgctggaggtgaaacgcctcgacttcgtcaagacggcgcgtgccaagggtctcgccgactccgtgatccagcgccgccacgtgctgcggaacgcgctgcttcccgtcgtgacgctcgccggcgtgcattccggcacgctgatcggaggcgcggttatcaccgagaccgtattcgcctggccgggcatcgggcggctgatgtacgacgccctgctgcagcgcgactacaacctgctgctcggagtcttcgtgatctgctccgccatggtcctgatcttcaacctcatcaccgacctggtctatcgactggtcgatccacgcatcgaattcgcctcatgaaacagttctggaaatcgatactgaagagtccgagtggcgtcatcgggctcgtcatcctgctgttggcgatctcggtcgcggtgttcgggccgatgttgttcccgaactcgccctggcgcatggtgcagcggcccttcctgccgccgttcacgctctcgacggtgccgagcggcaccgacgcgctcggccgtgacgtgttcgcgggcatgatcttcggcgcacgggtatcgctgctggtcgggctcgtctcgacgctggtcgcactggtcgtcggcgtgccgatcggcgccatggccggctatttcggcggcaaggtcgatgacgccttgatgcgcttcaccgaattcttccagaccattccgagcttcgcgctcgcgatcgtgctcgtcgcgatcctgcagccctcgatctactcgatcgttgcctcgatcgccctggtgagctggccgccggtcgcccggctcgtcaggggcgaggtgctgtcgctgcgcacccgcgaatatgtccaggccgctgtggtgaccggccagagcaacagctggatcatcctccgcgaaatcctgccgaacgcgttgtcgcccgtgatcgtgctggcttcgctgatggtggcgaccgcgatcctcctggaatcctccctgtcgttcctcggcctcggcgatcccaacttgatttcctggggttacatggtcggcgccggccgcaccgtgatccgtcaggcctggtggatcacggtgtttcccggcgtcgccatcctgatctcggtgctcgggctcaatctgatcggtgaaggcctcaacgatgcgctgaatccccgcctgtcccgggagggccgctgatgacgaccgccccacccgccgtctccatcaagaacctgcggatcgcgctgcccaaaggcgccgagcgccccttcgccgtcgacggtgtctcgctggatctccggccaggcaagatcgtctgtgtggtcggcgagtccggatccggcaagtcgatgtgcgcgcatgcgctgatgggcctgttgccggacacggtgtcggtcacctccggcgagatccattttgaaggccgcgacctgctcaagctcgacgatgacggctggcgcgacctgcgcggccgccgcctggcgatgattttccaggagccgatgactgcgctcaatccgttgatgcgcatcggcgaccagatggcggagatgttcgaggcgcatggcctgctgacacccagggaaaggcgagccaaggccctgtcgctggcgcgcgaggtcggcctgcccgatcctgagagaatcgtgcgcgcctatccgcaccagctctcgggcggccagcgccagcgcgccatgatcgcgatggcgctcgcgctggagcccgcggtgctggtcgcggacgagccgaccaccgcgctcgacgnnnnnnnnnnacaggctcagattctcaagctgattcgaaatctccagcgcaatcgcaacatggcggtgatgttcatcacacacgatttcggcgtggtcgccgacatcgccgaccaggtcgtggtgctccgccacggcaaggtcgtcgaggaaggtcccgcctctgccgtcttcgaggagccgcagcatgactacaccaaggcgctgctcgccgccgtcccgtcgatagatccgcccgttcgcagccccctggacgaaatggccaaggccgttgaagtgatcgggctagacaagacctatgtcacctcgggcggctggtttcgggaagaccgccgcgtcgatgccgcgcgcgctgtcaatttcaacattctcaagggcgagacgctcggcctggtcggcgaatccggctccggcaagtcgtcggtggcgcgcctcgtgatgcggcttatcgaggccgaccgcggcacggtgcggatcggcgacaccgatctcacctctctctccggcaaggcgctccgggccgagcgccatcgcatccagatgatcttccaggacccgttcgcctcgctcaatcnnnnnnnnnnaatcggcattgcgcgcgcactcgcactcgaacccgaggtcatcgtggccgacgaagccgtctccgcgctcgacgtgtcagtgcaggcgcaggtattgaagctgctcgaagatctcaaggcgcgcctcggcctctcgatgctgttcatcacccacgatctgcgcgtcgcagcccagatctgcgaccgcatcgcggtgatgcaacgcggcgccatcgtcgagctgaagccgaccgcgcagttgttcgccgcgcccgagcacgcctacacgcgcgagctgcttgcggcggtaccgggtcggaagcaagcgtccgccgcctgagcccggctcgccatctaaggagcaaacacatccgcgttacgcctgctacggacatgaggtggtgagcagctttgcagcccagcgcgcgaggccgaacgaccggccggatggcgctgcatgatcggtcaatagaccgtccgaggcgtctgaacggaggacaccggactatcgcgtggtgttgctccatgtggggaccgagttggtcacgccgaccgatggccaattgtatgatccgaacgagggcgccgtgactgtgccgaccgtctgtccggacgacccgtaggacgacctcggctgcgcgaccggcgctccggcaccgctataggtcggcgcccccacgccagtggtgtaagtccggctcggccgggccttcttcgcttcagccgcgaacggcgcgacaagcagcccggacgtaacgagcgccgcaatggcgaggttgatggctttcattgttgatcctttcgcccggctggcatccgtcaatcacaactgtttaggtacggggaaatttccataggcctccattcataactccgtgtccggacgaaggtgcccatggatagccggccgccttcggatggacccgaatcagcgctagtggattgcgttcagtgacctcctggacgtaagcaacatgaccggcgccgaactgaagcagcttcgcaacgatctctccgacgccctggagcgaaagctcactgcggccgacatggccaagctttgcggattgcctgagagaggcggcgccgacacgatccgacgctgggaggtcagcggcccaacacccgaggcgacaaagatattgcgcgtcctcgcgatggcgagcgagcgctatccgatcctggagaagttcgacgtcttcgatcgtcatgacgtgcgcgaggaagaccggccggcgaagcgcgccgcgttccgcgagcagatgcgcgatgaggcgcggcggcggcttggttaacaagagtcgcgcacaagttacctgaggtgcgcgaggttaagccttccttcaccgcttcttagggtgacgttaagcacgaaactcatttacagcccaataagttaggttgggtgccgctgtgccacgcatgtgacagcattttcgtcaaaagcgagctatctgcaaaaccagtgacggcgcggaaagcgcgcctgccgggacctgacgtgttggagttcaagaccatgaagaagattctgtttgcgaccgtagcgctgctcgcggtgggcgcggctgcgcctgccgtcggcgccgatctcggcaaccgcaactactacaagacgcccgcgccggcctacgctgcgccgatctacaattggacgggtttctacatcggtgcgcatctcggcggcgcgttctccagcgacaacaatttcaacggcctctccactggaaacaacggcaacggccgcttcctcggcggcgtgcaggtgggcgcggactggcagctcaacccgtacttcgtggtcggcctcgaaggccagtattcctggctgtccggcagcgtcggcgcagtgttccccggcggcgtcgcctataccaacgaccagcgcggcctcggctcgatcaccggccgcgtcggctacacatggggtccgggcctgctctacgtgaagggcggctacgcctattcggacaacaacgagaaggtgaccgtcggcggcgtgcccaccgccttcgtcatcacgggcgatcaccgcaacggctataccgtcggcgccggcctcgaatacatgttcgcccagaactggtcggccaaggccgagtaccagtactacaatttcggcgacgcgagcttcaccggcggtccgctcgcgggcaccggcagcttcaccaccgacgaccataccttcaaggcgggcgtcaactaccgcttcaattgggcaagcccggcggtcgcgcgctactgatcggttaccaagatcttaccgcgatgaagggccggcgccgttgccggcccttcttttttcgccatgcggaacacaaggcagccagttgcgccaattccgattctttaaccggtcgtactgatactgccgccacaaccagaagaacattgggggaattttcgatggcgatccgtctgggccttggccgcttccttggccgtttccgtactcgtttcaaaatgccgagatggggcgtgcgtggcagcctgttcgcggcgttcgcggtaatcgcgggcatgggtctcgtgatcgcagccggcgccggcctggcgctgcagaatctcggcggacgcatgacggaacttagcgggcgggacattccgcgtcttgccgccagcctgcaattgtcggcactgagcgcgagccttgcggcgcagggaccggcgctgcttgctgcgcagaacgacgaggccctgaatgaacgcaccaagaaactcagggaattgcaggagcagacgcaacagaagctcaacgagatcatcgagctcggcggagacaagagcgttgtttccgggctcagcgaaacgatgaagagcatcaacgatgctgcccagagcctggcgaaggccgctcgcgagcgcctcgacatcgccgccctccatgagaagcaatatgacgcgcttcgctccgcgcagggcgctttcgtcggcgcggcaaacccggcgatgctggacgcgcagactcgggtcaacgccattctcggctctgcggacctgtccgccgccgacgcaaccgatgccgcgcagacggtcggtcagctcggcaacgtcgtcgccagcggcaaccttgccgccgcgaacatgagcgcggcgctgtcggcgagcacgagcgacaagctcgacgacatccagaaggaattcaagacggcacagggacgcctgcgctccaacctcgatctgctgcccgacaatcagggcaacaagatgctgcgcgagacggcggaaaagctgctcgcgctcggcaccggcaagaccggcgtgttcaatctgcgcgagaaggaactcgactccatcgactatggccagaccatcctggacgagacgcgcaagctcaatgtcggcctcggcatcagcgtgcagcagctcgtcgacggcgtgcagaaggagaccaacacctcgacctcacaggcgcggcaggagatctcgctcgcgacgtcagtcatgctggcgctgggcgcgctgatgctggtcggctcggcgctgttcgtctggctctatgtcggccgcaacatcctgcgccggatcggcgcattgcagcactcgatgcagctgctcgcgaacggcgatctcgaaaccgagatctacagctcgaagaaccacaatgacgaaatctcggcgatggcgaacacgctgcaagtgttccgggagagcatgatcgaggctcgtgcactgacgagcgagcaagacaaggaccggatcgccaaggccgagcgggccgcgcgcatggaagcgaagatcgcggaattcgaaagcacggtgcgctccgccctcgacaatctggcgcagtcggccaattcgatgcaatcgaccgcacagagcatgtcgagcaccgccgaccagtccaacgcgctggtgaacgcggtcgcctccgctgcggaggaaacgtcggtcaacgtgcagaccgtgtcggccggcaccgagcagctgtcctcctcgatccaggagatcagccgccaggtcgtgacctccgccgagatcgccaagaaggccgtcgatgaagcgggagcgaccgacgccacggtgcagagcctcgcggacagcgcgagccgcatcagcgtcgtcgtcgacctgatccagaccatcgcctcacagacgaacctgctggcgctcaacgctacgatcgaggctgcgcgcgcaggcgaggccggccgcggcttcgccgtgnnnnnnnnnncgcctccgaagtgaagagcctggcgagccagactgcgaaggcgacggacgagatccgcacgcagatcgccagcatgcaggaggtcaccacctccgcggtcggcgccatccagggtatcggccggatcatcggcgagatcaacgacgtcaccacgacgatcgcggccgctgtcgaggagcagggcgccgccacgcgcgagatcgcccgcaacatccagcatgcggccggcggcaccagcgaggtctccagcaacatcgtcggcgtatccaccgcctccgccgaggcgggcgccgcggctggcgaagtgctgagcgcctcggacgcgctccggcgcgaggccgatatgctgcgcggggagatcgacgcgttcctcaacgacatccgggcggcctgatcgtcattcgggggcacctcgaagaggcgaacccggagtctcggaccacaatcccgggattctcgggtgcgcaaccgcccaccatggttcgcgctttggagcgtcccggaatgactgcctttttggcgcttcaaccgagacgcggaaaaacactgccggtatgacggccatgcggcgcccgccagccatcctttttcggctggcgccccgctcgcgctgggtttaagcgaataggatgagttcaaaaaccgacaccgcacaatcctcggccgaggccctgcgctacccctgggaacagcaccccggccccgaacagatcgtggagatcaggcccggcgtgttgtgggcgcggctgaagctgccgttccgcctcaaccacgtgaacatatacctgctcgccgacggcgacggctatgcgatgatcgacgccggcttcggcaacgaggaaacgatcgaagcctggacgaagctgtttgatggtccgttgaagggcgtcgacatcacgcggttgattgtcacccactcccaccccgaccacgtcggcctcgcgggatggatcgtcgagcgtttcaactgcccgctggtgatgtcgcaggtcgaatatctgcagtcggtctatcaccagaaccgcggcaccgacgagcggcgcgaggcccagcggctgttcttccgccgccatggcatggacgagtcgctcaccgaaaagctgctcggtcgcggccaggactatctcaagcgggtctccgtgctgccgccatcctaccgacgcatctcccacggcgaggatgtcgtgatcggcacgcgccgcttcagggtaatcaccggcggcggccacgcgctcgaccaggtgatgctgtattgcgccgacgacaagctgttcctctctgccgaccaggtgctgagcaagatctcgccgaatgtcagcgtctgggcggtggagcccgagcagaactcgctcggcgagtatctggcctcgctcgccagcctcacgacgacgcttccctacgacgtgctggtgctgcccggccacggcgtgccgttctacggcttgaagacccgcatcaagcagctcgccgaccatcacgaggagcgctgccggctgatcgccgaagcctgccgcgagatgccgcagacctcgcgcgcgctggtgcctgtggtgttcaacaagcacgtgctggacgagcaccagatgggctttgccgccggcgagctcgtcgcccacgtcaactacatgatcgtcgagggccggctgacggccgagatgcaagacggcgtgctgcgatttcggacgacgtaagcttgctttcgccgttcaacccgagggccggcctgggctgagccgctaagggtcttccgccttgagcgagaccctccgtctgctttactctctcttgtaccttacatacagcccggtacaaatcctcgcgcgacgagcgcagccggatcttgacggaggtctcgcatggacatggtgacgccggccgggcaggccgaccaattgctcggcgccctgcgcgacagacttggtgcggccgcggtactgatgggcagtgaagtgcccgcccgcaattgcaacgattggagcgcgagcctgccgcagacgccgctggcggtgatccgcccgctcgatgcgcaaggtgtggcggatgcgatcgcggcctgccggcaggcgcgccttcccttcgtgccccagggcggactgaccgggctgtgccgcggcgcttcccccgaggcgggctgggttgcgatctcgctggagcgcatgaccggcatcgaggagatcgatcgcgcgtcgatgacgatgacggtgaaggcaggcacgccgctggagacgatccagaaggctgccgacgaggccggcttcttctttccgctcgacctgggctcgcgcggctcctgcgcgatcggcggcaatctctccaccaatgccggcggcaaccgcgtgatccgctacggcatgacgcgcgagctggtgctcggtctcgaagtggtgctgccggacggcaccatcatcactggcctcaacaagctgatgaagaacaatgccggctatgacctgaaacatctgttcatcggctcggaaggcacgctcggcatcatcacccgcgtggtgctcaggctgtttccgaagccacgctcgaccatggccgcgctctgtgcactgacggactatgcggcggtgatcgcgctgctcgacgccgcgcgcagcgggctcggcccgctgctctcggctttcgaggtgatgtggccggactattgggacgtgatcacgaatcgcgcgggggtgaagccgccggtcgcggcgggccacggcctctacgtgctggtcgaggcgcaaggcaccgatgagagcgtcgatgcgccgcgcttccaggcctggctcgaagagctgatggagcgcgggctgctggcggatgccgccgtcgcgcaatcgctggcgcaaacgcaggccttctggcgcgtgcgcgacatctgcgccgaatttggccaggtgctggggccgcacatcgcctacgacatcggccttgcagtggcgcgcatggacgagttcgtcacgcgctgcaaggcggcgcttgcctccggcatcaagggttgcgagagcgtctattacggtcacatcggcgacggcaatctgcatctcgtctcctgggtcggcggcctctcggtcgcgcagcagccgaaggaggagatggacgcgatcatctacggtctcgtccgcgacatgggcggcagcgtctccgccgagcacggcatcggcaccttgaagaagcagtggctgggccacgccaggagcgaggccgagatcgcgctgatgcggacgctgaaggcggcgctcgatcccgaccacctgctcaatccaggcaaggtgatctaggaaagcacatgccctcgctcaggctcgatccgccgaagtcgctggttcaggcgtggtctatgcgagagcgctgaagatggattgagcgccgtcaccgctcatccttcgctcccggtccgtccagaaagtccagcgcggtgttgatctgctcgagctggcgctcgatcttgtcgcgatcctcaaccgatggcgccttttcgagctgttccacgagcttctgcttccgtaacagcaagttctctatgaccgtgctcacagctccccccatcgccagaggcgacatcacggacgccgaaacggaggcgcgcgcaacccgggcccgcctcgaaccctcgaccagaatgttcgcggacgcggttggttcctgtggccgatatcgatctgcgccggtgcgcggacggaaccctgaaatcgacgccggcacaccgatcggttgaattcggccgcccggagtcctatgcgtagcatcatggacacccagatgatcaccgccgcaaagccgctgatggctcacgcgcgcccgcccaagccggcaccgttcctccccatgagccgcgccgagatggatgcgctcggctgggacgcttgcgacatcgtgctggtgaccggggatgcctatgtcgatcatccaagcttcggcatggcgatcatcggccggctgctggaagcgcaggggttccgggtcggcatcatcgcgcagccggactggcactcggccgagccgttcagggcgctcggcaagccaagagtgttcttcggcgtcaccggcggcaacatggactcgatggtgaaccgctacaccgcggaccgccgcatccgcagcgacgatgcctacacggccggcggcgaaggcggcaagcggccggaccgctgcaccatcgtctacgcgcagcgctgccgcgaggcgttcaaggacgtgccgatcgtgctgggcggcatcgaggcctcgctgcgccggatcgcgcattacgattactggtccgacaaggtgcgccgctcggtgctggccgacgccaaggcggacctcctgctctacggcaatgccgagcgcgccgtcgtcgaagtggcgcagcggctcgctgccggcgaggcaccgcgcgaactcgacgacatcaggggtgtcgcgctgttccgcaaggtcccgcccgattacaccgagctgcacgccgacgatctcgattccgccgacgaaggcgcgtcgcgccaacgcgggccgaccgtgatccgcctgccgtcactggagcaggtcgagcaggaccgcgaggcctatgcgcgcgcgtcacgcgtgctgcaccgggagagcaatcccggcaatgcgcggccgctggtgcagcgccatggcgaccgcgatctctggctcaacccgccgccgatccccctcaccaccgaggagatggatgcggtctacgatctgccgtacgcgcgcgggccgcatccgtcctacggcgatgcacgcatccccgcctgggagatgatccgcttctcggtgacgatcatgcgcggctgcttcggcggctgcaccttctgctcgatcaccgagcacgagggccgcatcatccagaaccgctcggagggctcgatcctgcgcgagatcgagaagatccgcgacaagacgccgggcttcaccggcgtcatctccgacatcggcggccccaccgccaacatgtaccggatggcctgcaaggacccgaaggtcgaggccgcgtgccggcggccgtcctgcgtcttccccgagatctgcccgaatctcaacacctcgcatgacgatttgatccggctctatcgcaaggtgcgcgagaccaagggcatcaagaaggtgatggtcgcctcgggcgtgcgctacgacctcgcggtggagagtcccgaatacatcaaggagctcgtcacccatcacgtcggcggctatctcaagatcgcgcccgagcataccgagcgcgggccgctcgacaagatgatgaagccgggcatcggcgcctacgacaagttcaagcggatgttcgacgaggcggctgagcgcgccggcaagaaatattacctcatcccctatttcatcgcggcgcatccgggcacgaccgacgaggacatgatgaacctcgcgctctggctgaagaagaaccgctatcgcgccgaccaggtgcagaccttcctgccctcgccgatggcgaccgcgaccgcgatgtaccacaccggagtcaatccgctgcgcggcgtgcgccacggcggcagcgacaaggtcgaagcgatcaagggcctgcgccagcgccgcctccacaaggcgttcctgcgctatcacgaccccgacaattggccggtgctgcgcgaggccctgatcgagatgggccgccgcgacctgatcggctcgcagccgcaccagttggtccccgcgcaccagccgcccggcaccggcaaggccgcgggcaccaagcgtccgctacgatcaggcggcaggacgcagcggttcacgaccaagggcctgcgggtgatgaagtagcgggcgctgcgcctgctacagcgcgagcacgacctcgcctgacaccgcatcagtcacgccgcgtccgttgccctggtcctcgagcaccgacctgaaactgtccagggtcctgatcatcgccgatcgggcggcgaccagcgcatcctgactggcccaggtgccgacgagacagaaggttcgatcgccggtcctgatgatgacgccgtgctccaggcccggccatttcgccttcccgtctcggtgcgcatcgaggaaagtggcttctgcgccggacttcaccttgaacttgaccacattgtaaacctgcatggtggcctccgaaaaatggacgaatgaaacgggcgtggcgcgaggtcaggggcaagaagtccacgccgatcgccccggcggattgtcgtccccgcgcgcggcgacgtcaccgtgacaaatcggcttggcgaggcaggtctttcgggccggcaagagccaggagttcgaaaacaaccccatgcacagtagccggctctagcggaatcaacggcttatcgccatcgctcacacgttcggcccgtcgggcagaaatggcgttgctccgtcgggcaaaacaggcgcatgatgccatcgttgcaggacgcgtgaagagggcatgcctcttcttccgtaagccctcgcgctccacaccgcgtccggtgcaagttgtttgctcgccagttcgggggctgcaggagatggcgagccagatcgcccgttcgtccgccagaccagcgcggtgggattcgccacggcctgtttgctttgccggtcccgcgcccagatcaggcgaatgcagaggcccgtcgctgcaatgcgctcacatcgccttagcgagcgcgaacagccggaaatcctccagcgccgcatgccgatgaggggcggcttcgcgccggtaagtctcggtgtcgacgatcgagcggaaggtggtgaaatcgccgtattcattgatcgccgcttcgtcccagcgttcgctcggcgagccgacgaggctcgtgaggaccggcccggaaaacatccgcacgagcggcttgccggccgcgagacgccggaatgccggcctatagcgttcatgataggcttcgcggcccgagcagggcgcggcgtcgaatccctcctcgtatcgagcatacgcgcggtagcgcagcagattgagcatatagacaggctggcccggggagatcgcgcgctcggcagcgtcaagggcttgcagggtgatttcgacgaggttcatgggacttcccgcgtttccagcgccgcagtatgcgcgctgacgatcccggtttagccgttcgggaccggctcttgtagtgactgtgcagccatgattatgtggaccgcatgtccacaacgaccttacctcccgacgtctcgcgtctcctcgccttcgtccgcgtcgtcgaggcaggctcgttcgccgaggccgcgcggcgggcggggacgaccacctcggcaatgtccaaggcggtcgcccgcttcgagaagtctcgcgggttgcggctcttgcatcgctccacccactcgttggcgctgaccgaagagggcgacaggctgatggcggcgggacgtgcgttggtcgaaagtctcgcccgtgtccaatccgtgctcggcgaagtcgcgcgcgacgatggcgggcgggtgcgtgtgactgctccggcctcgttcgcgcgggcctgcatcctgccgcgactgcccgcgttcctgcgggaacggccggaaatcgagatcgaggtcaaattccgcaacgagattctcgatctcgcggcggaaggcgtcgacgtcgcgatccgctcggggcccctcgaccgtgcgcccggccatcaggcgcggcggctttgcacgttctcctggatcgcttgcgcctcgcctgcctatctgaacgcgcgcggcgcgccggcgactccatacgagctttccgctcacgaccatgtcggcttccggaatcccgcgagcggtcagatcctcacctggcgcttcgccgacccgcgcggcaaaggccccattcgagtcacgcccaagcccaagcacatttgcgacgatgcgcacgcttcgctcgctttgatcgcgaatgggtttgggatcggatgggggccagcgtggctcgtcaacgaagaccttcgcgccggccggctggtcgaagtgctcgcgccctggcgcgcgtctgccgaacccctatggatgctgcgcacctccgaccgccgcccgcccccgcgcacgcagcgcgtcatgtcgttcctcgccacgcttcccgccgcgttcaccgaaaaggcggtgtgaagcatcggtcgtcaccagaattcaggcggcaagaagcttggcgccaggttctgggattggcaggcgaagacccctcctggcccgaatgcgaggtccgagcggcgcccgccgatcgggcagagtttcaccgcgccatttgaccaccgcaccatcctggcgagcgacagctcaggcccggttgactttgccccatcatgtaacatacaaagttacatgaaacgagattcccgcctctccggcgtgctgcacgtgctgctgcacatggcgcagcagccggggccattcacgtccgagaccctggccaaggcgatggacaccaaccccgtggtgatccggcgcatcatggccggtctgcgcgagctgggttacgtgcgctccgagaaggggcatggcggcggctggcggcttgcgtgcgacctctcgaaggtgacgctgcgcgacgtctatgccgcgcttggcagtccctcgctgctggcgatgggcaaccggacggagtcgcccggctgcctcgtcgagcaggccgtcaatgccgcgctcgaccaggcctttcacgatgcggaggcgctgctgctgtcgcgcctcggcgaagtgacgctggcgatgctcggcgaggacctgcgcaagcggctcgggtctcgaaagatccacgacatcagcgcgcaccgcgcgtgaacggctccatcacgggacaacatcatgaccgacattcaagccgcattctcggatccgcaattcgtggctcgctacaccgaagggccgcggcgcttcgtgcccggctatgaagcgatgcagtccatggcggcgattctgctggccgaaagcgtccccagcggtgggcgggtgctcgtcctcggcgccggcgggggcctggagctcaaggcctttgcgcaggcgcatcccggttggagcttcgacggcgtcgacccgtccgcggcgatgctggcgctcgcagagcagaccctgggaggacttgcatcacgcgctcgctttcatcaaggctatatcgacgatgccccgccgggaccgttcgacggggccacctgcctgttgaccctgcacttcgtcgatgtcgccgaacgacgtcgcatcgcctcggaagtccgccgccggctcaagccgcgcgcaccgttcgtgatcgcccatctgagcgcgcccgacggagagaaggaacgtccgctgtggctggcgcggtactccgcattcctggcctcatccggcgtcgagccggaccaggccgcggccgcgaaggatgccgtcagcaaccatctgcagatcctggcgcccgcgcaggacgaggcgatcctgcgcgaggccggtttctccgacccgacgctgttctatacgggtttcgccttccgcggctgggtggcttacgcctgaggcggcagggcttgaccgaaaggccggccattcgtgcaaagccggacgggccggatcatgcaggcgtttagcgcacgtcaccaggcgcaccggttctgacctcacaaccggacatcgtcggctcgctgctgcatgccggcaaagggccacaagcggaagtcaacagtcattggcggctgcgagcccttctcttcgacagatttgattccgttcaagaagctgtccgcaacattggcgtcatcgtcggcgaagtaccatgttgtatctcgccgatgatcttgaagccgtggcgtttataaagggagatgtttcgcggattcgaactttcgaggtaggcggcgatgccctcctcgtcgcatcgtcgaagagcgtgcttcatcaacaatgtgccgagaccttggccgatccagttcggatcggaggcaatgaggggcagataccaatggggctcgcggggatgatgttcggccattccctggagcatgtgtccaatatcatcggcgatctccggacgcagggattgcgccatgagtgcgtccatggccatttcgtcgggctcgacgccgggcggcagccacagggcggccgcgcgagccccttctgtgatgtaagctgtgccatgctcgaatgcccgtccgccaaatgccttgacgaactgaggcataatcctgagatattcggatgaatcgggccaaacccaacgcgccatcggatcggctgcaaagccaagtacaatggtgctgatagtgcttgcctgaatgttggcgcccgcagatttgatttccgagtttgcgctcatgatatcgtctccaagtcgtcgatggcgtcggccacattcattctaagatggagcacaggatagtggccgggcgctacggccgcctctcgacgccgtggctcgcgtatagaggatgagtagcatctacgaacaattacagcttctatatccaccaaagcttccccggcgataatatcggaggtgccaagatgaaggtcatgcaggcttgcctgaacgaaatccaccaccttgccgttcgccgcattcgcgctctcgcggtcctcaaatatcatcacggcgacaccgacgccgttgccccatccaggacacaaaggatctgaatccaggcgattccctcaggatctgaccgacgccgcttttagcgcggagagcagcatccgcaaccgaaggaaccttggtgtactttcgaatgaacatgtacatcgggtccacccatgcgtccgaggtctagtccgacgcatcaaagcatatcgggccgctgctggactagggcctactcccgagatggggcaggagcgccatttgcagtttattcgccggatgtctgcttaccctccaatggccgccgaatcgcagcagtttcccgacacgcgctttgggccaaaaggcgacgttcactcgccttcactcccctcagggctgcgcatccaccagcgcgcgcacctcacaaggatcgacttcgctttgaccgtcgatgacctcgaccttctctagtgcgtcaatcctgtccagagcgttgctcaggagattgcccatcaccaccagcgaccagtagagttgttgtgtttccccccgtgatgcagcttcgattgctcgcttgatttccgctctcatcgccatcagtcgtcgtcctcacgcgcgggggggggctcgtcaagtgaacagcacgtttcaactgtcttggtcttcagcgtttcaaagccttcgaaagcgttgccccggtccacttctctcaggggcctgaactggctaggcgccccagcggctcgcggaagcgtcctcctcttggccatgttttaagtagccgttggtgcctcagaaccgcgaaccgtaagcgtcaacgtgaagtgggctaggccggtgtttggggttggatcgtcgttgacgatcatctgccaaggctggtcctgccaaatactccccgctctgctttcgctcaatactgcgccggcaagcctgatcgcttcgagttttgccgcagcaacgtctggcagttgcaaaccgtcccgatcgaagagatcggttccgtccatgatgtggaagtggaaacgaggcaagacactactccctttgggcgggagcgctgtagcgtctctcagtcagaggccggccgtggacaatcctcttgatgcacaccaactagcatggcaaggcccccgttcctaacgaaaagcggagtgcctccagttccgcttcgggtcaaaagcagctgtcggcccattggacaggcgatgtctggtttccctcgaacagtggacgtgacgatggccttcactccattcgcagatcgggggccaacggtcgtctgagccggacctgatcacatctcctctcggacgtaacgtgagcccctagcagtcttgaatccacgaggaagcgccctccgacgttaaccctgccggcaaatgattgccggcgggccggcggccgccggcaaagttgcctcattggcgcgaagaattcctggcggcgctaatttggtggaggcgcgtgatgctgagaatggcgttgttgggcctcgtcatcctgctaagtgtgggcgtgctgtccgccatggagctgaccgctccaccgcgtcgcgcggtcacgatacttcagccgcctgccgagcagagcctgaccatcccggcttcccatagtccgttgccgaaggccgatcgtctcgaggtcgctgtcagcggcgcgatgccgacagaggccgtttcggtcgagaattccgctgctcaggacgtgcttatcagctcactcccgccagcgccgaacgtgcgtcaaagaagtaagccgaagccggtcgcaagcgacgagcgtccgaagccgaaaccgaaggcaagtgttgtcaagcgaaccaccaacgctcagcgtgcgaggattgcgagcgagaccaagtcctgtcgactcaaggcgttcggtggcctgctcaaggcactgaatttgaacggctgtgagatctgaaggcgccgcgaaagccctcaccgatccaccggcacccccgctccgcgatggtaccggctggaaaagaacaccagcggcgtggtgtcgcgatgatcgcaagccgagacttcggcgatgatcagcgtgtggtcgctgacatcgacgtggcgtgtgacctcgcaggcgaaataggcgatgcagccgaacaggcgcggcaggccatccacgatctcgtagtcggggtcagcgcccgcgttcggctggctggcgaaatgccgcgacaggtcgcggccatggtcgggcagaacattcacgcaatagcgcccggtcgccgagatcgcccggtgcatccgccccggcatgaccgagaccagcacggtcggcggcgacaggctgacggtgacgaagctgttggcggtcatgccgcagatgcggccgtgctcgtccagcgcggtcagcaccgcgacgccggtcgcaaagcgcgaggcggcctcgcggaacgaagcaggattggcgcgctgcatctcagtttccgcccgcatcgatcctcacgcgatcgccctgaccggctccggcggcgccgacatgcgttcgatccaggcctggatgcgctgcggcgtcgagatgcggtcccactgccggtcggggtagttgaaattctcggtgaactcgttcgccagcgccggattctggctcatcgcgccgatcagcatgcccagcgcttcgctcggcggctgcagcatcacgttggtccagcgcgaggccgcgagcacacggtcctgccgcttcagatcgatcttctcgcacagtcgcgcatcgagcgcgtccgcattgacgatctcctcgccgaggacgaaggccgcataggaggcgacattggcgccctgacccatcatgggatcgacgaccgcatggacgtcgccgagcgcgatcgcgcatttgccgccgtcgaattccaccaccgtgttgcgcacggtcgggaccacgccgccttgcaggaggtcctgcggctgcgcgagatcgaagcgggccgtgtcgatacggtcataggtcgtcgggtgatgcttctccagcttgcccagcaacaccttcaggaagtgcttcgggtcgtcgtcgtagctgagcgtcgcaagctcctccatgtcgccgcccggcacgttctccatcagcagcgcgctggcaatgccgccgaaggtgacggtcggaatcacgatcatttcaccgtggccgggagagaccgacagcgtgacgttcatcgggtcgggctgccgcacgccggtgtagagcccgacgcagagccgccgctgcggctgcgaatagggcgtgtgctccggacggtaggtgaagagctggcccagcgggcccttgccggtcgagaccaccagcaggtcgaagcgggcgaccagcggacggatgtcgcgctcctcgatgcggcgatattcgatcctgccgccgcgactggtgaagtcctgcatcaaggccggaagatagatccgatagtcgactgcacggctcggcttcgagaaatcgccgcgaaagctcaacggctgcggaaaattgaagacatggtcgtggtaatagtaatggtctttcggatcgggccagtgattgacgccgagataatcctcgcgcgcgagcgtcacgtggtgatgcgcgacggtgttgagcagccggatgttgcgatagtcctcgggcggccggtcggtgatgatggtggcgtccacgccatgtttttgcaggtaaagcgcgagatgcaggccggcgattccggcgccgacgattccgacgttacgtgccacgtggtctcctcccctgtttccttgccctgtgacggcttgttttgaaaaagcctactcgccgcccgtgttgcgcactacggaatatatgggatatgatttattccagatcggaatgaattatggaccgcatcgattgcctgcgcgctttcgttcgcaccctcgaggccggcagcttctcggccgcggcgaaggagctcggcatcggccaacccgccatcagcaagcgcatcgcgatgctggagagcgagttcggcacgcagctgttctcgcgcaccacgcgcacgctcaagccgacggccgaggcacatcgcatctacgatctcgcgcggcagatcctcgacaatttcgacatggcacggtcgagcgtcgaagcggcagcccctcgccccagcggcacgctccggatcggcgtgccatcctcgttcggccgccgcttcatgatgcccgtcatcgccgaatatgtgcggcactatccggaagtgcgggtggacatccgcttcagcgagcggttcgtcaatctggtggaagaaggcatcgaactggcgctgcggattggaaagctggaggcgagcacgctggtcgcccgccggctcggcaccgtgcagcgctacctggtcgcgacgccgacctatctgcacggccgcccgctgccgcggacgccggatgacctcggctcgcaccaatgcatcgtctattcacggctgtcaccggcccagcaatgggccttcgaatccgagcatggccgtcacgtcgcgacgatcaacgggcccatccatgtcgacgatgccgatgcgatgcaggcggcgacgatgcatcatctcggcatcgccatcctgcccgactggaatgcggcagagggccttcgcagcggcgagctcgagcatgtgcttcctgactacacgatcgcggcactgcccctgcatgcagtctatccggagacgagctggatgtcgttgcgggcccgaagcttcctggacctgctggtcgagcgcgccgaacattttacgccggctccatatcatggccgtgccgccgtttccggcggttgacgccgtcctggccgtcattaaatgacgccaatgaagaaaatcgatttcctctccttcggccactggacgccctcgccgcaatcgcagacccgctctgccagcgacacgctgctgcagtccatcgagcttgcagtcgcggccgagctgctcggcgccgacggcgcctatttccgggtgcatcatttcgcgcggcagctcgcctcgccctttccgctgctcgccgcggtcggcgccaggaccagcaggatcgagatcggtacggccgtgatcgacatgcgttacgagaacccgctctacatggtggaggacgcaggcagcgccgacctcatcgccggcggacggctgcagctcggcatcagccgcggctcgcccgagcaggtgatcgacggctggcgctatttcggctatcggccggccgacggccagagcgatgccgacatgggccggcgccatgcggaggtcttcctcgacctcttgcggggcgaaggctttgcggagcccaatccgcagccgatgtttccgaatccgccgggactgctgcgactcgagccgcattcgcaaggcctgcgcgaacgcatctggtggggcgccggctcgaacgccaccgcggtgtgggcggccaggctcggcatgaacctgcagagctcgacgttgaagaatgacgagaccggcgaggcctttcacgtgcagcaggccgcgcagatccgcgcctatcgtgccgcgtggaaagaagccggacacagccgcgagccgcgcgtctcggtcagccgcagcatcttcgcgctgatggacgatcgcgaccgcgcctatttcggctcggagcgcggaggcgaggaccagatcggcttcatcgacccgcggacacgcgcgatcttcggccggagttatgcggcggagccggacgtgctgatcgagcaattgcggcaggacgaagcgatcgccgaggccgacacgctgctgttgacgataccgaaccagctcggcgtggattactgcgcgcacgcgatcgaggcgatcctgacgcaggtggcgccggcgctcggatggcggtagccgcgatcggccgctgtccttgcaagaaatgaccgtcagtcaaacggcttcaccgaagcgtgctttccgctgagcggagccccggtttccaacgttgtcgggaaaccggggctcttcacatcattgcatgtggccgatgagatagatgccaccgccgatgacgaggacggccggcacggcccaaagaatcagtacgggcattttcctctcctccaatgcgcagctcccgtcgagtaaacgggaaaaaatggcaaacgttccgctctcgctcggaacggcgaagccgatggcgagttcatcgcagcgccgcatgccgcggcgagggagaatgcgatgaagaagctcatgctgatttcggccgccgctttgctcgtgtcgacgagcgcgatggcacaaaccaccgtgacgacgacgaccggcgcgggacacggcgccaccgtgcagatcgagccggagtatcgcacccggatccggtcctacgtcaccgagcacaagatccgcccggtcgagacgcgcgagaagatcgtggtcggctcgccggtgccgcgcgacgtcgagctcgcggccgttccgagcgattggggtccctcgctcaccaagtatcgctacgtctactcgggcagccgcgtgatgctggtcgatccccagacccgcatggtcgttcaggaggtggaatgatcctaatgcgcggcgggcctcgagcagcccgccgcgcattcgtcccggcttcatgtcacggtcgtgccgatttccgcgtcgttcacattgtgctgcttgaaggcagtttcgcggtggcgctgccgtgcccaccggatcgctgcttgccgttgcttggcggtcatgccgccggccggttgatcgatcgcaccagcattcgcatccactccgcacggacgttgcctgagaggatcgtcttcgcgcctcctctcgtagatgatggggcgcacatccgcgagctgccggtgccgctgcgcggcaacgcagcacgctcattcattgcgggtgaaccgtggatgaatgaagcagtgcggctcgcgcctcgcggaactgcgtctcgacaatatcgacgcgtcaccgcgtccggcatgaggaacgattgctcgattgccactttatcccgagcctgattggcgcgtttgtttttttggaaacccactggaggaacggatatgaggatactgaagctatctgcggctgcggccgcgctgttggccggcaccgcacttgccgttgcgcaatcgagctcgacggtcggcaccggcggctcgtccgcgggcggcggcaccagcaactcgaccgttggcaccggcggctcctctgccggcggcagcggctccggttctgcttcgacgctcggcaccggcggctcatcggccggcggcggcaccagcagctcgacggtcggtaccggtggttcggcggcgggcaccggctcgggcagcggctcggcttcgacgctcgggaccggcggctcctcggctggcggcggcaagagctcatccagcgtcggcaccggcggctccgcggcgggctcggggtcgaactccgcgtcgacggttggtaccggcggctcgtcagccggtgacggcaagagcggctcgacagtcggcgccgcaggctcctctgccggtcatgccagcgacaagggcatggagaagggcaagggccataacaaggacgagtggaagaaggacaagaactagtccgatcccgggagcggctgcgtgccgctcccttcgtccatgttgaggaggagacgcaatgaacagatcaatcgttgcgatcacggcgctggctctgatgagcggcgccgcatcggcagaagccatggaaaagaccggcaagacggcatccggcgagacctgcaaggtcacggtcgagaagcatgccgacggcagcatcaccgcggccggctcgtcgcgttcgggcacgaccggatccacctcgtcgagcggctcgctgtcgagctcgagctcggccggcggatcgtcggtgaatgtgcaggccggcggcggcagcgtatcgagctcctcgtcgacggcgggcgggcctggctccaccagcgccagcaccatcaccgtcaacggctgcacgatctcgacctcgtcaccttaacttcgtagaggattgaaacatgagaactctgcttacgacatcggcggtcgccgttctgctcgctgccgcttcacccgtggtggcgcagaccagcatcaccggcggaagcggcggatcggcggcagcaggcggcacttcggcctcgacggttggtactggcggcacgtccacgtcaggcaccggccgtaccggctcgtcgatcgcggccggcggaagcgccgctgcagcgagcggcaagacccagaccggcgtcagcatgaacaagggcaatggccccgtgctcaactccaacgcccgcgcacaggctcatgacggcggcaccttcagccgctcgcacacgcgcaccaaggtcaaggccggtgaacaagtcggctcgaccaccaagacgatgtcgcacgtaccgggctcaaagccgaccatgtcgagaacgacgacgaccgcgcgctaggacctcgcgacctgctgcccgagctgctcgggcagcacctttccgcgattcgttctagtcggcacgcaggctgcggctgatccgcgtgacgacggcgtcccagcgccgcttctcggccgcgggataattgatcagcacgcagtgcacatagccccgagaaaagttgcagcggttgtaccagatcttgtcgcgcttgacgctggagaccacgaagaagctcggcgtaatgcgcttgtagataattccggacggcggattcttgccggccaggaatgcggccggcgaaagcctggacctgttggagatggcctgtacggtgagatcggctctgccgtcggacgtgcgaaactgcaggccatagccgtcgggcttgccgacgatgtcggtgaagaccgaagcgggaatgtcgaccgatgttccggtctcggcgatccggtaggttgtccagctttccgcccgcgctccggacaggctggcaagcagcacgatggtcgccgcagccgtggtcttcatggtccgcctcatcagttgcgcggcatcagttgcagctccatcaaggcgatccgttgcaggtcggcgacgttgcgttcgccggcacttgcggtgcgcaggatggattcggcgagggcgttgacgtgcgacgaatgcacgggttccggcaggctcgcgacggcagcttccagggctcgcgtcatgatctcgatcacctcgggagagaattcggcgttggaaaagttcttcatcgcgcaaaaccggtcgccttgtgcgggaccgcaaggtcaacgccgggaaaaactcgacgttcctgcggcccggcgacacaccggtacgctatgtcacgggctggtagccggtgagctgggcaagcgcggcatcctcgacggcaacggtccgcatcctcacatcgctgccgatgacgaggccagcgagcgagagcatcagcccgagcgcgagcggcgcaaacaaggcctcttcctgaaacaatccgttgagcagaacgaccatgacgccgaagccggcgagcccctgcgtcagatatccagacgaggcgtagaggcgccaggccttgagggccaccgtgaaatagaacgcgagcggcacgaaggcggcaatgcccatctggtacaacaggacgccgaccgcactctcgaccgcgccatcgatcgtcccggccgcctgcgcggcactccagtcgatcgagaaatagctctccgagagattgccgccgacgccgagaccccggccgaacggattctccaggaatccgttcaggccgcccatcaggccgatgacgtgatagtcgccgatctgcaggccgatccggatcgcgacgactgcgaatgcgatcaggcccaggaggccgagcaacagcgtcaccacggcgccgagcagacgggtcgatatccagcccgcgactacgaagaccacgacgatgagcgctcccttcacgctgcagaagaccagcaggggcaatgcagcgagggcaaggagcggccggcccaccgagaacaggaacaggccgagaaagccgatcccgtaggcgaagctgatcgggtgcatgttcgggccgtgaatgcgcagcatcttcgacaggccgaatccttcgagcagcggcgtgttcaggaagtcgaagctgaaacggtccttgaggtcgacgggcacgtttccggtggcgcgcatctgggcttcccaaacccccgaatgggtcgccttgagctcgtcgaagccccagaaggtgtagccattggtgatggcgagccagacatcgcggaatgcgagctccacgtaaccgcacagcatgaggatgacggcgagcgtcgccaggaacggcgtgatccgcacctcataggtcgcagccgtgaggagcgacaattgaaacagaaacagcggaagcacgatgttgcgcagatagaccgcggccgcctgtccggtctggccgaagccgatcgcgaagtacagcgacaccaccgccagggtgacgacgccgaagcgcatgatccggttcacttcggccgactgattcctctggccgagcaggtagagggcgaacgtggcgagccacatgacggagcagacgagaaaattgtagcccttgatgaagtcgagatcggacggaagcgggaccagcggcgacaggatcgagacgaacatgttctggaagaacaggacgaagatcgcgatggccggcgcataggtcggcacgctgacgacaatcgcgatgccgacgaggacctcgaccgtgatggcgagggccggattggccaggtgcagaaccggagcaaagccgatcgttgccgtggcgatgcagaaggtcggaaccagctcccgccaggccggcggcgctgtcgcggcctgcacgctccgaccatccggtgagttgcgggcactcatcgatcatcctttgacatcgcgcggggcacgatagcggggcgaagcgtaaggatccgttaacgatagcgccgtgcggcgggagcgcggggcgtgccgagcagcgcccgcatcacgtcgggatcgggcctgcccgtttggctgtcgaccaggccgaagccctgcgccagctcccaatgcgcccagccccagcaatggtcgcgggcataggctgtgacctccgccagccagcgaagccggctctccctgggcgcgccggctttcaacacgccgaactcgttgacgatgatcggccgtgagaattgctgctgccaggcgagggcgggcgcgagccagcgatcggcgcccggcttgtccttggcggcggcaatcgccgtgtcgagcatggcgagcgccttggtcgcattcctgtcctgcaagtcctggcgaagcgcctgcacggccggatcgtcggccctgatcggataaggcaggtcgcggatgtcgtgcagcggatcgtgcgcgtcccaatggccctgatgggtgaacaccatcggatcgtagaaatggatggcgtagacgatgttcgggtcggccagcggacgaaatcggggcagcgaatccgcacgctgccagttgaccgggccgatgatgagcgtggtggccggcagcaatcgccggacgaacgcggcaagcgcctcgacctccctttgccacctgtccgcctcgatatccggctcgttgagcagctcggcgaagatgcgatcgggcggaaaagaccggatgacctgcgccagagcactccaggcctcctgcagctcgtgcaccgccgcgtccggatcatccttgtgcaggcggttgaagcgctctcccggatgaagatcgacggaggtggaatagcccagcgatgtgagctgcttcaacgcgttgtcgagcacgcgcagcgtctcgtcgcggtcggccttcgccgcgaaacgcggcatcacgcgttcggccggcacgggcaagcggacatggcccattcccgccttgcgcagctgctgcagcaaggcgcggctgggcggcgcgccgttgatccagccgtcggcattgaagccgcgagacagcgcggcaagccgctcgggcgcaaccgtcgagggcaagggcacgcaatcgtcggcggagaccggccggctcaatgaaatcgacagcaacaccgccgcgaacagcaggcgaccgcaagatgtcattgtcaaaccgcaagacccaatgcgccgccctcgggctgaggcgccgctgagcccgcagggacgtgattgacgacgatgccggtcggcacgccagcacatttcgacagcgacgcggttaccctgcgcatcgcggccgaaccgagctcgccggcgcgcgcgaccaggacgatgacgtccgcatgggcggccagggcgatggcgtcgggctgcaaggcgagatcgctggcgtgcacgacgatcaggtcgaactccgagcggatgtcgtcctcgggcgccgcatccggctttcggccggcactcagaagctcgtcgatggattgaagtcccgccgtggtcgaaccgtcgtgccattcggtcaccgggggctggctgcctgcgaattccggctggagccggatcagcacgctcatcatgccgcgcttcaccgcggcgcggttgagagagcgggcaacggtattgccgccggcgctcttgccaaccgacagcaccagcgcgaccttgcagccgcgtaccggcaaacggtcgatgcgttcgagcagcggctgcagatgcggggcgagatcgggctcgcccgcggcggcgacaggtcgctgccagaccgtgttggtcccggctgcggacgccagctcgggaatccggacccagaccggaaggctgggcatcgcctcggtctggcgcacggctgcggccggaggatgaacttcctgacctgcgtcctccgcttccacgggagcaggagcctgcacggtcgcgggcttgtcggcggacacgctcgtcatcaccgcaacggcagcggtggacgtcaggagcgagccgatcgccaatgctgcgagcaacaaggcaagcggcgggcgcgtcgaacgcagcggcggaatggcgggcgaggcgatcttggtctgggacgcctgcagctgacgctgctcgttggtggtcttgaagcgcgacaggaactgctcgtagatgttcctgttggcatcggcatcgcgctgcagctcctgcagcttcaccagcgcctggccgtcgaccagcatcttggtctcgaccgccttgagctgcttctccagcgcgttctgctgctcacgctgggcctcatattcggacttggccgtctcgatattcttcttccgctcgatctcgatctgccggttgatgtccgccagctggctgtaggagatcgcgaggtcgggatggcggtcgccatacaccgccttcttctgggcgatctggtcattcagggccgagcgctgcgcgcgcagcatgctgagcagatcctgcttcacaggcccttcgacattggccttgacgtcgcgttgcacctggtcgtagcgcgccttggcctcctcggtgcgcgcacgagcggccgagacctgctgggtcagatcggtcacgcgcaattgctgcgtcgtggattccttgccggcattgacgatgttgtgctcgagccggaaggcggcgaccgcatcttccgatgcccgcaggcgctcgctcagcgtcttcagccggtccttcagccagtcggcggcctcgtccgtcgcctcggtgcgaacgcggccctggctggcaacgaacgcctcggcgatggcgttggcatagtaggcggcccggtccggccgattcgacgtgaaggaaatcgcaatgacgtaggtgagcccgcgccgggtgatctcgaggcggttgcgggaacttttgagcaggcgcgtcatgtcggtatgaccgcccgcgatatcctcatcgtcagcgatcttgagccgttcgatcagggggcggaggaagccgtcggatttggcgatctcgatctggctctgaagcgccgccgcatcctggccgatgcccggcagcacctcctgatccgaggtcacgcgcagctcgcggggatcgagcacgaccagagccgtcgcggcgtagcggaccggaagaatcatcagaacgacgacgccgagggcgaacagcgccgcggccagcgtcaaaatgcgccggccattctcgcgcagaaagacgagtgtgccggagacggtcagcgatcccttgatcagcgccggcccggtgccgcccggcgccggggtcacagcccgcggcgcttcccacgaagccgcttgctccgtcggggcgatgcttcgcggagatgcgcggctaccgaacgccatggggttggactcgaaatcaactgactgtcatagctcaaaggcttgttacaccgtaaatatccatggttaaccggcggttacggccgcagcaggaagctatcatggagcgccgcccggccatgccggtggcggcggcagttcggcggaccggaaggagacggcttgcgcaagccctcgcgcggatcgcatcttgcgtgcgacccagcctctcccgcagggagagctgacaactcagctgatgttcaggagtatccgtcccgacgtgccgctgcgcatcaagtcgagcgcgtcgttgatgtcatcgagcgcgaactcgtgggtgacgatgccgcggtagctcacctttccggcatcgctcaggcgaacaaggcgcgggatatcgcgtgcaggctggcactggccgccttcggagcccttcagcaccttctcgaagtgcaatggcagggtgtagatttcggccttctcgcggggaacgccgaccaggatgcagcggcctttcttggccgtgatctcgtaggcgagctcgatcagattcttgacgccggtggtctcgacgaccttgtcgggtccgtcggcaccagtgatggaccgaacctcggcggccacatccttcgccccttcggagttgatggtgtgggtggcgccgaaatcctttgccatcgccagcttgttgtcgaggcggtcgaccgcaatgaccggatgggcgccgaccatcgcggcgaattgcacgatgttcaagccgacgccgccgacgccgaacacgaccacagcttcgccgatggcgatttgcgcatcgttgttgacgacgccgagcgcggtcgtcacggcgcagccgagcagcggcgcgctggtgcgatcgatcgaggcgggaacgggcgtgacgcggttttccgacaccacggcatattcattgaaggtggtgacccagcccgcgttgagccgcttgccgcgccaggaatagaccggcgtgttggactggatgcccttgcccggccgccaatgcatgacgacggtgtcgccctgcttgcaggagacgacgccgggtccggtttcgacgatcgttgccagcgcctcgtggcccaaaaggtgcggcaggaacttgtcgacgcccttgacggcatcgatctcgttgatctgcgcgccgcatatgctcgacgtgtggacgtgcgcgagcacctggccgtgctcgagcgtctcgggcaaattgaactcgtcgacgatcagcggcttgccggactcgacgagaatggccgccttggcagtcttgatgtccatcgctcgcgcccggtcactcgaaatagatgaattcgtaatcgccggtgtagccgagcttgccgtacagccagatccattccgaggtgtgcaggatcgactccgccgtcaacgcccagcattcgagattgtgcagctcggcgacgttgcggtagccctcgaccatgacgtatttgttcttgccaacccgctcgatttccttgagcgccgcctcgagctcgtagagccggagattgtgcagcgttccgagcgagatgacgagatcgaagctgtcgtcgccgtagggatagatgtcctgggcgcgataattgaagaggtacggcttcacctgctcgtgggcattggcgagaccgtgcttggaaatgtcgaagccgacgaccttcaggcccggcaggatcttctgcatctcgtacagcaagaagcccttgccgcagccgacgtcgagcacactggacccatccttcaggccgtaggtctcgatcagcgccttcgcgaccggggcccagcgcccctcgatgaagcggtagccgccgtagccgaaacggcggtcgccatcccaataatcggcctcgtattcccgcgccttcagcgagcagccgatcttgtcgtcattcatgcgagccatgtagtcgcgcttggtcgcggtatgcagcggcgtcacaatattcagaagtcgtcccatcgagccctcggatttcatcacgcgctgaagttgtcttgactggcctggggagcctcgcacgtgactgcgactcgccctagcatttgtggcggagatgctcattgtttcagatcaatgatgtggaaaccgtgcgacagcgccggcttcgggcggcacaagtcccgtcgccggcgtccactgaagccgcatggaacgggaatgcgcgggacagcgttcggctcgcagggagtcccgccatgccgaccaaaccgaccatcgcccgcatctggcgcggccgcacccgccgcgatctggccgacgcctaccaggcctatctgcaggccgagggcattccgccgctgctcgagaccgcacttggggtgcaacaattgcgcgaggaccgcgacgcggagacctggttcacgaccatctctgattgggcggacatcgccgcgatgacggccttcaccaggggcgagccgaccaaggtccatcatctcccgcgcgacccggaattcctgatcgagctgcctgagcgcatcgagatccaccacattctgatcgacgaacagggcctgcggtgaagggctgatgctcacattgttccacctgcatcttacgaccggtttcattatctgcggacgtctgacgctcgcccggcgccggaggaacggagcgggcgagccgccgttactcatgcatcctcaccaatagggaagcccgacatgaccattcgtagaactttcattgctctcgcggccgctggagcgatgctctcgacggctgcctcacccgggcttgcggcgcctttgccgatcggaaatccgggcgccgaatccggcgtgcagcaggtgcagtaccggcatggacatggctaccggtacgggcaccatcaccgccgtcacggcaccggcgctgccgtcctcggcggcctcgctgcgggcgcgatcatcggcggtgcaatcgccaacagccaggctcagtccaatgccgcctcctactgtgcgcagcgctatcgctcctacgatcccggctcgggaacctacctaggccgcgacggtctccgccatccgtgcccatgacgcacgcatgagcctgcggcagccctcgcgtccgcgagaggctgccgacattcatcacgcggccagcgtgtcttgattccacgctctcttgcgttgtacgttcgggccatgatgttcatcaccacattcttcccgctgatctgaacgacagaacgtcgttccggcgcagctgcgccaatcagatcaaacggctgcgctcaatgcggcggccaaacggagaatgtgcaatgtcgcagaccgaagaggctggcctgacgcctggtcaggtccagaatttcatcgccgacggtttcgtcaagatcgagaacgccttcagcgccgagcttgcaaagcaatgcagggacgcgctgtgggcggatatcggcctgtcgccggaccgtcccgagcagtggacccgccccgtggtccgggtgggatccaaggcgtcacccccattcatcgaagctgcgaatgtggcgtcgctccacagagcctacgatcaactcgtgggcgaagggcgttggcttgcgcccagagggcttggaacgtttccgatccgctttccgtcgacggaatcccccggtgatgacggctggcatgtggacatgagttttggcaccgccgatccggacttcatggaatggcgcgccaatgtcaaaagcagcggccgtgcgctgctgatgctcttcctgctctcggatgtcggcgccgatgatgcgccaacgcggatccggaaaggctcgcatgccacgatcgcgcgggagctgctgccccatggcgacgcaggtgcaaccctccggcagctcgcttccgagaactgggcatcgacgaaagattgcaagatcgagctggcgacgggggcggcaggcagcgtctatctgtgccacccgttccttgtccatgccgcgcaaccgcaccgagggacacggccgcgcttcatggcacaaccgccgctgctgccgaaaggcgagttcgatccggcattgccaccgtcgccggtccagatcgcgatccggcaggcctgcgggctgacggtgtaggtggcggcatcagggacggaacggcgggaggttgacgctgatctgcggcggcggaaatgcgtcagtcagcccgcccccttacagctttccacgtctgtcaccgcccctgatattcggcccagcaatccgccgtttcgtagacccggaccgccgatagctgcggaaggctcggctgcaatcgatcccagatccagaccgcgatgttctcggcggtcgggttctcgagtccttcgacttcgttgaggcagtgatggtccagcgcgcccatgatgtcggcgaagcatttttcgatgtcgaagaagtccgcgacgaagccggtgtgcgggtccaccggaccgtccagctggacctcgacccgataggaatgaccatgcagccggctgcaccggtgtgtctcgggcacgtttggcagccgatgcgccgcctcgaacttgaacgcctgcgatatcctcatccagctccccacacggcgtggccaaccggtctcgggccgggctggcgaccagatgctgccttgtcctgaccttccgccgaagaatggcgcgcccggaacgattcgaacgtccgaccctcagattcgtagtctgatgctctatccagctgagctacgggcgcgtgcttcgcaaacagcgcgggcatggacccgcgacgcatctcccgaggaccgggaggggtgcgaaagagcgctctgactaaccgctcttgtcccgattggcaaggtctggcttgccggtattttggggcatttccgcaactctgttcgtcattccgggcgcgacgagtcgcgagccatggtgcgcaatgcgcatctgagaatccataaccaccagctgggttatggattccggccccgaccctcaggtcgtcgcggaatgacggagggaatggagatcgccccgctcgttcagtcggcctctggccgacttacgccctggctcgctcgttgcggacggagagcagttccaccgggcggtcggggatgacgatacggaaggtggcgccgatggtgccttcgaccaggtggatgtcgccgccatgggcgcggacgagttcggccgcgatggcgaggccaaggccgctgccgccgggccggccggaggtctggaacgcctcgaacaggtgttcccgggttttctggggaacgccgggaccggtgtcggagacctcgagaatggcgacggcgccctcgcgttttccggtgatccggatctgctgcacgcggccctcgcccgccgcatggctttcgagtgcctgggcggcgttgcggacgaggttgagcaagacgcggaacagctggtctggatcggcatcgaccgcgagcccgcgctcgatcgcagcgacccaggcgatcgaggcgtcgttggcgagcccggccgtctcgcgcacctccatcaccaccggctcgatcaggatcatgcggcgatcgggcgcggcctcctgggcgcggccgtaggacaacgtcgactggcagaaggcgatggcgcgttcgagcgagcgcacgagcttgggcgcgaagcgctgcacccgcggatccggcacgctggcgagctggtccgacaggagctgggctgaggcaagcaggttgcgcagatcgtggttgatcttggagacggcgaggccgagggcggcgagccggctcttctgattcagcatcgacatgaggtcgcgctgcatgtccgacaattcgcgctcggccaccccgatctcatcgctgcgctggctcggcacgatgatcccggccgagctctcgggattctcgtggaagccgaccaggctcgcagtcagccgccgcatcggccgcacgaagagataatgaagcgcgagatagacgaggcctgcggtcagcaccgcgatgatcagcgcgaccaccacgaggttgcgggagaagcggtacatctgcttgcgcagcggcagttcgtcggtgacgatctcgatgaactgagcattgccgaccccgggcccgacgatgcggatggcctgattgccggtttcgagcatcatccggaacgagccggtgatcgcctcccaggccgtcatgtcgcgcaggtcaatgtcgtgctcgatggcggtcggaatgttgtcgctggcgagcaaccggcgctgctggcccatcttgatggcgacggcgcgggcgttgatgctcttcaggatctggcgcgagagcgaatcaggaaccatgccgagcggcgcagcgtccagcaccagcgccgccgtattggccgccgcaacgcggtcattcagccggttgacccagaaattggcgatcgcgggtacgtagagcagcacggcggcgatcatcacgagggggatggtgagcagcagcagcttgccggacagcccgagcccgcgcgacccacggggccccatggccggctgctccggctgatccagatcctggatcggctggcgatctgtggctgccacgaaattcgcccctgttggccttggctggtggaggatgcgacccgcccgatgtccggtcaaattacggatcgctaatctgccgaggtgggatgtaggcgctgatatcgcgagtcgccacctcaagggataaaaaccccgcacaaacagcgatattcaccggaatcgcgcccttgtgcggcgttgacgaaaagaaggcgctcccttataagccgcgcaaattgtccgcgatgacccggtgtcgcaccgggagcggctctctcggggccggaaaagggcccgttttgggccgcatcttccggactttaccatcaattctacaggcaaattgcccggtcagcggagaaaaacccgtgaagcggacttatcaacccagcaaactggtgcgcaagcgccgtcacggcttccgcgcccgcctcgccactgctggcggccgcaaggttctcgccgcccgccgcgcccgcggccgcaagcgtctgagcgcctgagccggaccccccttttgggatttcatcatggatcggctgaggcagcgggcggatttcgtcgccgttgccaatggcgcgcgggtgaataatcccgcgttcgtcctgcaaagccgccgccgcgatgaccttggcccggtccgcatcggcttcaccgtcaccaagaagaacggcaacgcgcccgagcgcaatcgtatccggcgccggcttcgcgaattggtgaagcggctcgatccggtgtcgatgcagccccatcatgattatgtcctggtcggacgaagagacgcgctctcgcgcgacttcgccaccatgctcgacgatctgcgcatagcgttcacgaagcccgcgcggcatacggccaaagcgcgcggccacaggccaggtcccgccgcagcgaccagccgcaaaccggattgatgacgagacaatcgagatgaccgacaatcgcaataccatcctcgccgtcattctgtcgggcctggtgctgatcgcgtggcagtatttctacaacgtgccgcagatggagaagcagcgcgcccagcagcagacccaggccgagctgcaaaagggcagcacgccgcagccgagcgcgtccacgacgcccggcagcgcgccgcagcccggcgctgcccagccgtcgacgccggccgtgaaccaggcccagccggtcgtcgcccgcgagaccgccattgcagcaagcccgcgcgtgaagatcgagacgccgcggattgccggcagcatctcgctgaagggcggccgcatcgacgacatcgcgctggtgcaatatcgcgagacggtcgatccgaagtcgccgccgatcatcctctattcgccctcgggcacggcggagccctattacgccgagttcggctgggtggcggcgacgggcgtgacggcaaagatgccggatgcacagaccgtctggcagcaggagggcagcggcagcctgacgccgtcgacaccggtggtgctgaaatgggacaatggcgacggcctgaccttccgccgcaccattgccgtcgacgaccattatctcttcaccatcaaggacgaggtgagcaatgtcggcaatgcgcctgtcacgctctatccgttcgcgctgatctcgcgccacggcgcgccgcacgtctcgggctattacatcctgcatgaaggcctgatcggctatctcggcgacgagaagctgaaggaatatggctacaagcaggtcgacgaagccaagcaggtgaatttcaacaatgtcaccaatggctggctcggcatcaccgacaagtactgggcctcggcgctactgcccgacaccaatgcccggctgcaggcgcggttctcgtcaaaccccgtcggcaaagttcacacctatcagaccgactatctgctcgatcccgtcactgtcgcgatcggcggcacggcgaccgcgaacgcgcggctgttcgcgggcgcaaaggaagccggcgtggtcggcatcaacttcccgctcgccggcctcggcggctacaacaaggagctcggcctcaaccatttcgatctgttgatcgactggggctggttccacttcctcaccaagccgatgttcctcggcctcgacttcttcttccgcttcttcggcaatttcggcatctcgatcctgctcgtcaccgtgatcgtgaagctgttgttcttcccgctggcgagcaaatcctacgcctcgatggcgaagatgaagtcgatccagccgcagcttttggcgctgaaggagcgctatcccgacgacaaggtgaagcagcagcaggagatgatggagatctaccgcaaggagaagatcaatccggtcgccggctgtctgcccgtgctgatccagatcccggtgttcttcgcgctctacaaggtgctgttcgtcaccatcgagatgcggcacgcgccgttcttcggctggatcaaggacctctcggcgccggacccgaccaatctcttcaacctgttcgggttgatcccgttcgatccgaccacgattccggtgttcggctattacctcgcgctcggcatctggccgatcatcatgggcatcacgatgtggttccagatgaagctgaacccgacgccgccggatccgacgcagcagctcatattcaactggatgccgctgatcttcaccttcatgctggcaggcttcccggcagggctcgtgatctactgggcctggaacaatctgctctcggtggtccagcagagctacatcatgcgccgcaacggcgtgaaggtggagctgttcgacaatctcaaggcgacgttcgtgaggaaggcgacgtaatcgtcgttgcaaggagcgaagcgacgaagcaatccagagtgcctccgcggatgcatttctggattgctacgcttcgctcgcaatgacgcggagagacagcgagcaaaaggccttcgcatgatcgacgacaaagatgcgaagctgatcgaagcggggcgaaagctgttcgctcgcgactggcagttcatctgggcttcgccctcgatcgaaacactgccgccgatggcggggctggagatcgcctttgccggccgctccaatgtcggcaagtccagcctcatcaacgcgctcaccggtcgcaacgcgctggcgcgcacctcgcatacgccgggccgcacccaggagctgatctttttcgaagtccccgggaagaccgacctccgcctcgtcgacatgccgggctacggctatgccaaggcacccaagagccaggtcgcgtcctggaccgagctgatccataaattcctgctcgggcgcgccagcctcgcgcgcgtctacgtgctgatcgacgcgcggcatgggatcaaggacgtcgatctcgaagtcctgaagacgctcgaccgctccgccgtcagctaccagatcgtgctgaccaaggccgaccaggtaaaggccgccgagctgcaggcgcgcatcgccgagaccgaagccgcgctcgccaagcatccggccgcgttccctaccgtgctcgccacctcgtcacgcagctcgnnnnnnnnnnggccgcgatggcgcagctgctggaagagcgggcctcgtgatggccgcgcaccgcctgatgcttgggcttgccggcttgatgggcgccgccggcgtcgcgctcgccgccgcctccgcccatggcgccgatgccacccggctcgcctcggcaagcgcaatgctgctgtttcacgcaacagccatacttgccaccggcgccttgctcgcgcgcggccttctgcatggcggaattggcctcgttgcggcgttcggcttcgtgatcggcgccgcgctgttcgcaggcgacctcgccttgcggcaatatgccgggcactcgctgtttccgtacgcggcgccaaccggcgggacggtgatgatcgcgagctggctgacggtgacgttggcagcattggtggcgaagagctaaatccgtagcccatccgggctacatggctgccacgctttgcgcctcgcgcgccaatcggatagaacgcggctcaccgacccgccagcgagatcgcgacatgaccgacatctccccgctcgaccaggcccgcatcctgtccgaagcgctgccgcacatgcagcagtacgacgaggaaaccatcgtcatcaagtatggcggccatgccatgggcgacgaggagaccgcgaagaactttgcccgcgacatcgtgctgctcgagcagaccgcgatcaatcccgtggtggtgcatggcggcggtccgcagatcgcgaccatgctcaagcgcctcggcatcgtctcggaattcgcggctggcctccgcatcaccgatgccgcgaccatcgagatcgtcgagatggtgctggccggctccgtcaacaagcagatcgtcggctacatcaacgaagccggcggcaaggccgtgggcctgtcgggcaaggacggcaacatggtgaaggcgtcgaagacgacgcgcaccatcatcgatccggattcgaacatcgagaaggcgatcgatctcggcttcgtcggtgatcccgagaaggtcgacctcacgctgctgaaccagctgatcggctacgagctgattcctgtgcttgcgccgctcgcgacgtccaaggacggccagacgctgaacgtcaacgccgacacctttgccggcgctgtcgccggcgcgctgaaggccaagcgcctgttgctgctcaccgacgtgcccggcgtgctcgacaagtcgaagaagctgatcccgcagctctcggtgaaggacgcgcgcaagctgatcgccgacggcaccatttccggcggcatgatcccgaaggtcgagacctgcatctatgccctggaacagggcgtcgagggcgtcgtcatcatcgacggcaagatgcagcacgcggtgctgctcgagctcttcaccaaccagggcacgggcacgctgatccacaagtgatccgggagcgcgagcagcggaagaagatcgtcatgccctggctcgacccgggtatccacggctctcgcctcgcgcagtcatcccggagcgcccgcagggcgaactacggtgcgcaactgcgcaccggagaatctcgagattccgggtccggtcgttcggaccatcccggaacgaggggatcgcgtcccccgcaccggtccccgctcacacgcttcctgatggcgctaccggctgcggtcgtctcgttcttcttttcctccgcgcccgccatcgcagacctcaagatctgcaaccgcatgtcctatgtcgtggaggccgcgatcggcatcgacgacaaggcggcaaccgcgacgcgcggctggttcaggatcgaccccgccacctgccgcgttgtggtgcagggcacgctttcggcggaccgcatcctgctcaacgcccgcgcgctcggcgtctacggcgcttctccgattccgcaaaccggcagcgacatgctttgcgtcgcgcaggacaatttcgtcatcgccgcggcgcggcaatgccgtagcggtcagacccaagtctcgttcacgcaggtgacgccgacacaaggcgccgacggcaacctcattgcctatctcgccgaggattccgaatatgacgacgagcaggcgcgcctcgccggcatccagcggctgctggtgatcgcgggctacgacgcggcgccgatcgacggcgtcgacgggccgaagacgcaagcggcgctcgccgccttcctgaagagccgcggattgtcgccggacatcgtgaactcgcagaccttcttcaagaccatggtcgatgcggtgcagacgccgtctgccgcaggcctcacctggtgcaacgacacgccgcacaaggtgatggcggcgatcgcgaccgacgacggcaagtcggtgacgagccgcggctggtatcgcatcgaccccaagacctgcctgcaccccgacgtatcaggccagccgaagcagatcttcagtttcgcagaggcggtcgacgccgacaaccgcgtcgtgaagctcagggaccggccgctgaattggggcggcgacaggcaattctgcacgcgcgagaccaagttcgaaacgagcgagcagaccgattgcggcgcgcgcggatttgcgccgacggggtttgtcgccgtggacatgtcgagcggcggcaagacgctgcgctttgcggtgccgtgatcaagaggattcgatgaacttgccccgcactttcgaccacgtggacacctgggtgttcgacctcgacaacacgctctatccgcatcacgtcaacctgtggcagcaggtcgatgcgcggatcggggagttcgtctgcagctggctgaatgtcggccgggaggaagcgcgcaagatccagaaggattattacctgcgcttcggcaccaccatgcgcggcatgatgactctgcacggcgtctccgcagacgattatctcgcctacgtccacaagatcgaccactccccgctcgagccgaacccggcgctcggcgcggccatcgcaaagctgccgggccgcaagctgatcctgaccaacggctcggtcgatcatgtcgatgccgtactggcgagactcggcttcgcctcgcatttcgacggtgtgttcgacatcattgccgctgagttcgagcccaagccggctgagcagacgtaccggaagttcctgagcgaccatgccgtcgatccgacccgcgccgccatgttcgaagaccttgcccgcaacctcacggtgccgcaccggctcggcatgaccacggtcctggtggtgcctgacgggacgaaagaagtggtgcgggaagattgggagctggaaggccgggacgccgcccatgtcgaccatgtcacggatgatctggcgaggttcttgggtaagctgtcgccaggctgacccgtgtcgtctcctggacaggcgtcagcgcagatccggggcgacagcggagtgtaggcaacggcggagtacgccttgactccacccctgcaaatcccgaaaaagcgccccaatccatcaaaattcccgctccccagaggaaatcccgatgtcccttgcagccctcgaatccaccatcaacagcgccttcgacgcgcgcgacggcatctcgacctcgaccaggggcgaggtgcgcgaggccgtggaccagtcgctggagattctggacaagggcgaggcgcgcgttgccgagcgcggcgccgacggcaagtggaaggtcaatcagtggctcaagaaggcggtgctgctgtccttccgtctcaacgacatgggcgtcattcccggcggtcccggcaaggcgaattggtgggacaaggtgccctcgaagttcgagggctggggcgagaaccggtttcgggatgcgggcttccgcgccgtgccgggcgcggtggtgcgccgctcggctttcatcgccaagaacgtcgtcctgatgccctccttcgtcaatctcggcgcctatgtcgatgagagcacgatggtcgatacctgggccaccgtcggctcctgcgcgcagatcggcaagcgcgtccacatctccggcggcgccggcatcggcggcgtgctcgaaccgctgcaggcagagcccgtgatcatcgaggacgattgcttcatcggcgcgcgcagcgaggtcgccgaaggcgtgatcgtgcgcaagggcgcggtgctggcgatgggcgtgttccttggcgcctccacaaagatcgtcgaccgcgagaccggcgaggtcttcatgggcgaagtgcccgaatattccgtggtggtgcccggcgcgctgcccggcaagccgatgaagaacggccagatcggccccagcaccgcctgcgccgtcatcgtcaagcgcgtcgacgagcgcacgcgctccaagaccagcatcaacgagctgctgcgggattgatccgacgcgcatgaccgatgctctctcgatcgcccaggacctgatccgctgcccctcggtaaccccggccgatgccggcgccctcggggtgcttgaaaagatcctgaccgcagccggcttcgcctgccaccgcgtcaccttcagcgagcccggcaccgccgacgtcgacaatctctatgcacgcatcggcaccgaggggccgcacatcacctttgccggccacaccgacgtggtgccgccgggggacgagagcgcctggagcgtcggcgcgttctccggagaggtgaaggacggtgtcctgcatggccggggtgcggtcgacatgaagggcggcatcgcctgctcggtcgccgcggtgctggagcatctcgccggcaatggcggcaagccgcgcgcggacggaaagggctcgatctcgttcctgatcacgggcgacgaggaagacgtttccatcaacggcacgatcaagctgttgaaatgggccgccgagcgcggcgagaaattcgaccattgcgtgctgggcgagccctccaatgtcgagacgctcggcgacaccatcaaggtcggccgccgcggctcgcaatcgggcacgctcgtcgtcgacggcgtgcagggccatgtcgcctatccgcaccgcgcctccaatccggtgccggacatcgcgcgcttgatcgttgcgatctccgacgagcctctcgaccatggcagcgcgcagttccaggcctccaacctcgaattcacttcggtcgacgtcggcaacaaggccagcaacgtcatccccggcgaggcccgtgcgaaattcaacatccgctacaacgacaaccacacccaggccagcctgcgcgagctggtcgaagcgcgcctcgccaaggcctgcggcaaccgcatcaaggcccgcatcgtctgggagccgtcgaactccaacgtgttcgtcaccaagcccggcccgttcaccgatctcgcggtggcagcaatcgaggaagtgacgggccgcaagccggagctgtccacctcaggcggcacctcggacgcgcgcttcatctccagctattgcccggtgatcgagttcggtctcgtcggccagaccatgcaccaggtcgacgagcgcgtgccggtggctgatttggagaggctgacgcgggtgtatcgggggatactgacgcggtattttgggtagggctaactctcgcccaacgctccgccgtcatgcccgagacaagcccgggcatgacggcggtggcggcattaggggttaataatccaccttcatcaggtacaagccctcgggcggtgcgacgatgccgcaggcggcgcgcttgcgggcggcgagtgcggccgacagatcatcggcgctccagcggccctcgccgacccagaccagcgagcccaccatcgagcgcacctggctgtgcaggaaggagcgcgccgaggtgacgatcgtgatctcgcggccgtcgcgcatcacgtcgagctgatcgagcgtcttctccggcgacttggcctggcattcggtgtcgcggaacgtggtgaaatcgtgtttgccgagcaaacgctgcgccgccgcatgcattgcatcggcatcaagcttgcgcggcacgcgccaggcgtggccgacgtcgagcgcgagattggcgcgggtgttgacgatgcgatagcggtagtggcgcttgatggccgagaagcgcgcctcgaagctgtcgggcacgatctcggcctcgagcaccgcgatcggatgcgggcgcagatgcgcgttgagcccgtcgcgaaaacggcccggcggaaactgcttgtcgacgtcgacatgcgcgacctggccgcgcgcatggacgccggcatcggtgcgcccggcgccgtgcacgcgcaaatccgcgcctgtcatcgccttcaccgccgcctgcagcgcgccctgcaccgacggcagcgtctcctgcacctgccagccgaagaatggcgcgccgtcatattcgatggtgagcttgtagcggggcatctttccggtgtcttcgtccgcgcaggcggacgatccagtacatcgtgacggttcggttcgatctcaggagcctcggcatgctggataccccgccttcgcagggtatgacagcatcagttgaacctcgcgcccgccttcagcggcatgccgcggagaaagtcggcggcctgcacccgggccttgccttcgcgctggagctccaggatgcggatcgcgccctcgccgcaggcgatggtgagctgatcgtcgagcacctcgcccggcgcgccggtgcccttggcgagttcgcagcgcaggatcttgacgcgcgcgttttcgctgatgttcgcgagctcgctccaggcgccgggaaacggcgacaggccgtggatgtggcgcagcacggcacgggccggcttgctccagtcgatccgcgcctcggccttctcgatcttggcagcataggtgacaccctcctcgctctgctttcggagctggaggccgccgcgttcgagcgcggccatcgcgcgcaccatcaggtcggcacccagccgggagagacggtcgtgcaggtcgcgtgcggtcatgctgtctgatatcgcgatgcgctcggccatcgcgacgtcgccggtgtcgaggccgacgtccatcttcatcaccatgacgccgctctcggcatcgcctgccatgatcgcccggttgatcggtgccgcaccgcgccagcgcggcaacagcgacgcgtgcagattgtaacagccgagcttcggcgcatcgaggatcgcctgcggcaggatcatgccataggcgacgacgacggcggcgtcggcatccaaggcgcgaaattcgtccagcgcttcctgggtcttcaacgtctttggcgtcaggacgggaacgccgagctttcgcgcggcgtcctcgaccggggtcggctgcaattgcaggccgcggcggccgccgggcttcggcgcgcgggtgtagaccgccacgatctcgtggccgtgtgcgaccagctcgagcagcgtgggcacggagaaatcgggcgtgcccatgaagatgaggcggaggggcatgtgacgaacctgcggagggacgcaatcagtgaccgtcattccgggcggctcgaagagccgagcccggaatctcgaggttccgggttggatgcttcgcatcgcccccggaacgacagagagttttactccgccgcgcgcttggcggccttctcgaatttcttcatcacgcggtcgcgcttgagcttcgacagatagtcgacgaacaacacgccgttgaggtggtcgatctcgtgctggatgcaggtggcgtagaggccttcggcatcctcctcgtgcaccttgccgtcgaggtcggtgaaacgcacgcgcaccttcgcggggcgctcgacctcctcgtaatattcggggatcgacaggcagccttcctcatacaccgacagttcctcggacgaggcgatgatctcgggattgatgaagacgcgcgggagcggcttggtctcgccgttctcgtcgcgcttggcgagatccatggtgatgagccgcagcggctgcgcgacctggatcgcagcgaggccgatgccgggcgcgtcgtacatggtctctaacatgtcgtcggcaagcttgcggatctcggtcgtgaccttctcgatcggctttgagaccagacgcagctgcttgtcgggcaggatgatgatttctctgagggccatggcggcgatttaagccccatgccggatgcggtcaatgcggaccggaactccgtcaatcctccaccaaccatgaaagcttcagggttcgttaaccatggaaatcaggggattgtcgcccgacacgttccctcttcgttcgcatcgaccctgcgaatcggctacaaggctgcatgaacgaaatcatcttcatggttggcgactggccggtacgtaccgttgacgtgctgatcggcttcggcacgctcgtcctcattctgctgattgtgatcgcggtggtgatcgcgcgctcggggcggcgcggcgcggaactcgccatggccaatgcaatccgtgccgacgagctcgaggaacggctgagcgaggtgctgcgggcgcagagcgagtcgtcgggccgggtcgatgccatgacccaggcgctggccggccgccaggccgagatggctcgtgcggtcaacgagcggctggattcagtgacccatcgcgtcggcgagtccatggaacacaccacccgcaacacgatggagagcctgcgcgccctgcatgaacggctcggcatcatcgacaacgcgcacaagaacctcacggacctcaccacgcaggtgaccacgttgcgcgacgtgctcgccaacaagcagtcgcgcggcgccttcggccaggcacggatggaggcgatcgtccaggacggtctccccaaaggctcctacgagttccagttcacgctctcgaccggcaagcggcccgactgcgtcgtgttcctgcccgaccagcgcccgctttgcatcgacgccaagtttccgctggaggcgatgaccgcgctgcacgacgcccgcaccgacgaggagcggcgggttgccacgcagcggctgcgcggcgacgtgatgaagcatgtcagcgacatcgccgagaaatatctcgtggccggcgagacccaggagatggcgctgatgttcgtgccgtcggagtcggtctatgccgagatccacgacggtttcgacgacgtgatccagaaggcctatcgcgcccgcgtcgtgctggtgtcgccctcgctgctgatgctcgcgatccaggtgatgcagcagatcatgaaggacgcgcgcatgcgcgacgccgccgaccagatccgcaccgaagtgatcaagctcggcgacgacctcggccgtctgcgcgaccgtgtgctgaagctgcagaagcatttcgccgacgtcaacgaggacgtccgccaggtgctgatctccgccgacaagatcgagaagcgtgccggacgaatcgaggagctcgatttcagcaagagcgacgcgccggagggtccgcggctggtggcgacgggagcggcagagctgttcccgcggaagctccaggcgggggagtgagattggggcacgccgtcataccccgcgaaggcggggtatccggtacgccgcagcaattgtgattgaaccgagccgctggtgattactggatcgaccgccttcgcggacgatgacaccgatcgagccggaagctctcccgtctcaccagctaccgcgagagtcttttcccccggaatctgctaacaccgccgccatgaccgcccccgacgcgacctctcctgccgcaagcactgcacccgtcgcctcctggcgcgaaagcctttccgtttacctgcagccgcgggtgttgatcgtgctgttcctcggcttctcctcggggctgccgctggcgctgtcgggatcgacgctgctggtgtggatggccgaggcgggggtcgatctcggaacgatcgggctctttgcgctggtcggaacgccatacaccttgaaattcctgtgggcgccgctggttgacgcgctgcacgtgccgttcttcacgcgtgccttcggacgtcgccgcgggtggctggtgttctcgcaattgctgctgatcggcgcgattctgctgttagcgctgaccgatccggcacgctcacccttgttcgtcgcgctcggtgcgctgctggtcgcgacaatgtcctcgacgcaggacatcgtcgtcgatgcgttccgggtcgagagcctgcccgaaagcgagcaggccgccggcatggccgcctatgtcgccgcctaccgcatcggcatgctgatatcgaccgcgggcgccctgttcatcgtgacgggtttcgagacgatcgtcccgcgtggcgcagcctggatgtggggctacgtggtgatggccgctctggtgctgatcggcacggtgactgcactggccgccaccgagcctccacaatccgagcgcgcggaggccgccacacaggacgagggcgcgatatcgcgggtgcttcatgccgcgctgggcgcattctcggagttcctgcggcgcaaggaagcatgggtcgtgctcgccttcgtcgtgctgttcaaattcaccgacgcgttctccggcaacatgacggtgccgttcgtgatcgatatcggcttcacgcggaacgactatgccgtgatcgtcaagggcgtcggcattgtcgcgacgttggccggcggcttcgccggcggctttgtggcgcggcgctattcgctcgcaacgagcctttggatcggcggcatcgtccaatcgatgtccaacctgtcgttcacgtggctggcactggtcggcgtcaatgaatgggcgctgactctcgcgatcacgtccgataatttctgcaacgccatcggcacggtgattttcgtcgcctatctctcggcgctgtgccagaacccgctgcacacggcgacccaatatgcgctgctgacggcgctcgccgccgtgggacgcacctatctgtcatcgggtgcgggttatctggcgaaagcgacgggctggccgatgttcttcgcgatctcggtgctcgtcgcaatcccgagcttgatgctgctggcgtacttgcagaagcgcgggcatttcgaaaccttggagcccgcgcgggtgtagaactcacctctctctttcgtcattgcgagcgaagcgaagcaatccaggctgtcaccgctgaggcagtctggattgcttcgtcgcaagggctcctcgcaatgacggcggagacagcatcgccgccctcctactgcttcttgatcaggctccacttggtgatcacggcctcgctcatctggccgggatcgctggcgcaggcgatctcgtcgaccttcacggagatctccttgccgacgaacgacttcagctgagtggcctgcgcatcgctggaggtgacgagctggaaggtttcggggccggtctcgagattgcacagcccgttcggcggcggcaggcggcgcggctcggtggtgatctggtaggtcgcaacgcgtttgccgttcttgacgtcgcgcaccttcattgcattcaattcgcccgacagcacgtcgccggtgttgatcggcttgccgggcttggacggcggcgggactccatcgtcctgctgcgcggaaacagccggggtcaccaccgccatcatcatcgcaaccagggccagccgtttggcgaatcgtgtcgtcatatcgtccgttccgtaaaagtctggattgctagaacagcgtacgctgccgcatcgcagccgatagcgtaccttcgtcgagataatcaagctcgccgccgacgggaactccgtgggcgagccgcgtcaccttcacattggcgtcctgaagcaggtcggtgatgtaatgcgccgtggtctggccgtcgaccgtcgcattcagcgccaggatgatctcgtgcacctgcgaatcatgcgcgcgcgccaccagcgcgtcgatggtgaggtcctgggggccgacgccgtcgagcggcgacaatgtcgcgcccagcacatgatagcgcccctgggtggcatttgcccgctccagcgcccatagatcggcaacgtcggcgacgacgacgatgatcgagggatcgcgcttcggatccgtgcagacggtgcagggattttgcgtgtcgatgttgccgcaggtcttgcagacctggaccttgtccagcgccacctgcatggccgaggccagcggcatcatcagtgcttcgcgcttcttgatcagatgcagcgccgcgcgccgcgccgagcgcggaccgaggcccggcagccgcgcgagcagctggaccagccgctcgatctcaggacctgcaacagcgctcataattactggccgaacaaccccggtggcaggccgagcccgccggtgagggcctgcatcttctcctgcatcgcggtctccgccttgcggcgggcatcaccgaaggcggtgacgagcaggtcttccagcacctcgcgctcctccgccttcatcaacgagggatcgatcctgacacccttgacgtccatcttcgccgtcatgcgcacggcgacgaggccgccgccggagatgccctcgacctcgacgttggcgagctgctcctgcatctcctgcatcttggattgcagctgcgccgcctgcttcatcatgccgagaaaatcagccatgggtgctcgtccttgaaagaatggtcagagatcgtcgccatcggaaccgtcgggcggatcgtcactgccgtagtccgcgttaatattggattccggcgcctcgggggcaagcctgcggacctcgacgaccttggcgccggggaaacgcgacagcacctcctgcacgcgcggatcggcttccgcggtacgggcatgctcctgcttggccgcttggttcaccgagcgcagcgtcggctggccctgctcgttggagacgatcacggtccagcgccggccggtccacagctcgaatttctttgcgagctccgagatcatggtcttggaggcgttgggctcgagcgcgacttccagccggccttcctcgaaacgaacgaggcgcatgtcgccttcgagcgcgctcttggtcatgatgtcgcgcttctggcctgcgagggcgacgagctgggtgaagctggtgacgcgcagcacgggcgctgcggcctgcggatccggcgcgggggccgccatctgcggccgggcaccgcccccgccgaacgaggagggcgaggatgtcggcatgcgaaccggcgctgcggaaaccggcgctgcggaggacatcggcgcggacggcgcactgctgcgcgctgcgctgccgccgttcacgaccggcgagccgccgccgttctgctcgagcattttgatggcttcgtctggcgtcggcaggtcggcaacgtaggcgatacgcaccagcaccatctcagcggccgcggcggggcgcgtcgccgcctgcacctcggcgatgcccttgagcagcatctgccacatccgcgacagcacgcgcatcgagatcttcgaagcgaactccttggcgcgcacgcgctcggtttcgccataggcgacgttgtcggcaaccgccggaatgaccttcacacgggtgacgaaattgacgaattcggcgaggtcagagagcaccacgaccggatcggcgccgacgtcgtactggtcgcggaactccttgaaggcggccgcgatgtcgccgcgcgccagcgactcgaagagatcgatgacgcgggtgcggtcggcaagccccagcatctgcctgacggcatcggccttcacctggcccgccgcatgcgcgatggcctgatcgagcagcgacagcgaatcacgcaccgagccttcggcggcgcgggcgatgatgccgagcgcctcgggctcgatctcgacgccttccttcgtcgcgatattggcgaggtgcttcatcaatacgtccgcctcgacccggcgcagatcaaagcgctgacagcgcgacagcacggtgaccgggaccttgcggatctcggtcgtcgcgaacacgaacttggcgtgctccggcggctcctccagcgtcttcaggaaggcgttgaacgccgccgtcgacaacatgtggacttcgtcgatgatgtagaccttgtagcgggcgctggcgggggcatagcgcacgctgtcgttgatctggcggacgtcgtcgacgccggtatgcgaagcggcgtccatctccagcacgtccatgtgccggctttccatgatcgcctggcaatgcacgcccaaggtcggcatgtggatggtcgggcccttcaccgagccatccggcatctcgtagttgagcgcccgggcgaggatgcgcgccgtggtggtcttgccgacccctcggacgccggtgagaatccaggcctgcggaatgcgcccggtctcgaacgcattggagacggtgcggaccacggcctcctggccgatcaggtcatcgaatgaggacgggcggtatttgcgtgccagcacccggtagggtgcattgccggcctggccggcgctatcgggattgggaggggcgccagcgtcggtcatcggtcgatccgcaatgaaatctctctcggccggctcttgcggaaaggagcgcgcctggcggggcgaccgccggcgcaattcgctcgaaaaaacaagtaggagactgacgagcgacccgatccggacctcgttagggctgcttccttccggacctgacccggttggcgagtggctcgtccaccgccaatctcccggtccctatttggggccaaagggagcggaaagcaagcgggcaggatgactgttcccagggtcccgggacacacggggccggctggcccgaccggatcggcatgcccgccccgatgcaacggcgtatcacggttattgtccggaaccgtggtctctgcgacggtgggaatcatcacgagaaggtcttcatgcccgaacctgcctggtcgctgcactcccgcctgaaagaggacaccatcgacatcggcgacctgcccctgtcgaaggtgctggtcatcaaggacgcgcattatccctggctgctgctggtgccgcggcgccccgacgcggtcgagatcatcgacctcgacgaggtgcagcaggcgcagctgatgaccgagatctcccgcgtatctcgcgccctcaaggagatcaccaagtgcgacaagctcaacgtcgccgccctcggcaatctcgtgccgcagcttcacgttcacatcatcgcacgccgcaccagcgacgcggcctggccgcgaccggtttggggcgtcatgccgccgctggcgcacgatgccactgaagtgcagaatttcatcagcgcgcttcgccgcaagatctggttgggttgaaagaacaataatgtcagcattcgacgcatttccgctgggacagccggccttcgtcaccaacgtcctcgaccgcgccgcgcatctgcgccgagacgacgagaagctgttcgcgatggagcagaagccgtcctcacgcgcctacgtggtctatcgcgactcgctgctggtgaagcgcgacggcgacaaagtgcgcgcgctgctctcgatcgacgaggcgctgaaatgcggcgccaatcccggcacggtcttcctgggtctgcgcgagggcgcggccgtgttcggaatggggatgccgcaagccgctgccgagaagctggtcggccgcgaggactataccgtgaccgaactccgcggcatggcgatgcagggtgcgcttccgccacaggagctgtcagccatcgcaatggcgaagtcgatggtcggctggcatcagcggcacggctattgcgccaattgcggtgcacgtaccgcgatgaaggaaggcggctggaagcgcgactgccctgcttgcaaggccgaacactttccgcgcaccgacccggtcgtgatcatgctggtcgcctccggcgaaaaatgcctgctcggccgccagaagcagtttccgccgggcatgtattcctgcctcgccggcttcgtcgaggcggccgagaccatcgaggacgccgtgcgccgcgagatcctggaagaatcaggcattcgctgcaccgacgtgcagtactacatgacccagccctggccctatccgtcgtcgctgatgatcggctgcagcgcgcgggcgctcaacgaggacatcgtcgtcgatcgcatggagctggaagatgcgcgctggttcacgcgcgaagaggcggccaagatgctgacgcggacgcatccggacgggctcgccggtccgcatccgttcgccatcgctcatcacctgctcggccgctgggtgcacgacaagagctgaccgctgacggctatccggggtgcgccgtcgcctccgtatcggcaacacggtgcgatcgtccgttctccgggcagccgtggcgctgaaacgcggtggctggcgcagtggccttgctggcctgtaaccctttgatatgtccaactctttccatgcgacacctaggcaacgccatgtccgcgccaagaatattggcttgccggggaaagattttctctatatcaggtaaatcagcgcccgaaatggaacaaagttcttcaaatgaccgatgccgctgtgcagatccccgagaccagccgccgcctcgatgccatcgaccgcaagatcctgatggtgctccaggaggatgcctccctgtccgtcgccgagatcggcgaccgtgtcgggctgtcctcgaccccctgctggaagcgcatccagcggctggaggccgacggcgtgatcatcaagcgggtcgccctggtcgaccagaacaagatcggcctcggcatttccgtgttcgtgtcggtggagagctccgaccattccgaggcctggctcaagaaattcgccgaagccgtcagcgccatgcccgaggtgatggagttctaccggatggccggcgatgtcgactacatgctgcgggtcgtggtcgcggacatgcaggcctatgacgtgttctacaagaagctgatcagcgcggtgccgctgaagaacgtcacctcgcgctttgcgatggagaagatcaagtcggtgacggcattgccgattccggcggtggtggcggcctgacggccaattgctggtttgacgcgtttgctacacgcgaaccggtatccacttcgctcgaatacgcttcaggacagctgaaacaccggtagcgtgacgttgacgcgcgtacctccgcttggcgctgcgccgatctcgatcgtgccgccatgggcttcgaccaggttgcggaccaccgcgaggccgagaccggctccgccggtcgcgcggttgcgcgacttctccagacgatggaacggctccagcacagtgtggcgctgatcggcgggaatgccgggtccctcatcgtcgatcgagacgacgagggctccgtccttcatggcaatctccacctgcgcggtgcggccgtaggccagcgcgttgtctacgatgttcgcaaagattcgtcgcagcgccagcctgtcaccgagcacgatcacattccgcgtccgctcgtggcaaaccaactcgactgccgcgccctgaacgcgccgatcgtgcacctcggcagcgaccagcgcagggagctcgatcatttcctgcgacaggccgccggcgcccgcccgcgtcgacaacagcgcatcgtcgagcagccggatcatgtcgtcgatatcggccactgcccgctgccgctcggcatcgtcgggaatgtgctcgacgcgcagccgcagccgcgtcgcgaaggtcctgacatcatgcgcaatgccgccaaccagcgtcatgcgcgcacgcagcatttcggcaagccgcccctgcaggcggttgaacgcggcgatgacggcgcggatctccggcgcgctgcgccgcgcatccggcagcggcagcggatcggccgacaggtcgacacgatcgacggcggcggcgagccgcgccagcggccgcgtctcgcgctgcatgaccagcagcgccagcagcgccacaatcgtgccgaacaggcctgcgccgaagccgacgggaaggccgaacgggctcaccggcaggcgggtataggcgtcgatgatcagcaactctccgctgcgcaggccgatgcggaattcgatcgcgttggccatcaaccgcgcgaggcggggaaacacccggctgccccgatgattggacggcggcacgatctcaacggggcggcccgcaaggcccgccgcataggtctcgcgcagttcctgctgctccggcggcgtctcgccgccgaccggcgcgcccgacggcacgatgcgcacggtgaactgcggcgaagacaccgcatcgagcacggcctgccgtgaacccgcgtccgttcgctccaggagcgtggccagcgcatcgagacgcgcgggcgaaggccgggtcagctcgttttcgcggagggtcgtgcggtagaagatcgcgacgaccaccgtgatcaccagggtaatccccaccagcccgatcagagcgagccgcgcggcgagcgtcacgcgcagcatcacgacacctgcttgactgtcgcggtgaacagatagccgccgttgcgcaccgtcgtgatcaggttggagccgggacttgcaccatcgagcttgcggcgcagccgcgagatcagcatatcgacggtgcggtcgaacggctccgccgaacggccacgggtccagtcgaggatctggtcgcgcgtgagcacccttcgcggccgctgcacgaagcagccgagcaggtcgaactcggcgctggtcaattgcagttccggcgtctcggcctcggtcgtctcgacgctgcgcgcatcgagatcgatcacgaagcggtcgaaggcatatcgccggacaagcggcttggccggagttccgttggcgcggcgcaggatggcgcgaacccgcgccaagagctcgcgcggaccgaacggctttgtgagataatcgtcagcgcccatctcaagaccgaccacgcgatcgatctcgtcactcttggcggtcagcatcaggatcgggatggcatcgtcggcgcgcaagcggcggcagatcgaaagcccgtcctcgcccggcagcatcaaatcgaggatgacgatgtcgggccgcaggcgctggagcatcgaatccatggacttgccgtcggcgacgcaggcgacctcgaacccctcgcgccgcatgaagtcggcaacgagacggctgatctcgggatcatcctccaccatgaggatcgtggccgaaggcgcgttcatcgccccattgtggacgaccgcgcttgccgcgcaagggctgcggcaccgttgttacatggtgttacatgaggccgacaaagtcccaacaatcgttgcgtttcggcaatgcggcgcacacgcagcagccccagtctcctccgcacggctcccgctcacggcagcccccagaaggagacaaccaccatgaccaagcttttcctcacctccctcgtcatcggcaccctgtcggtcgcggcggcagccgacgccaatgcctggacgcggtcggcgacggcgagcgggccgcgcggcacctctcacgtcaccgcgacgggaagctgcgcctacggaagctgcacgcgcaccgtgacgcgaaccggtcccgccggcaatacctacacccgcaccggcacggtctcgcgctgacgcatcgccgccgtcgccgcgtcagccccgcgcggcgacggccgacctcatatagtcagaaaggatccgcaccgtgccgtcgattttccgttctctgccgcaagccgcaaccgtcgtcgccctcggccttgcaacctcgacatccgtgctcgcccagacgcaattgcagacgcagatcacgccgcagatgcgcagcgaagcaaggaccatcgtgcaggcgtgtcgcaccgaccttgaccgcctgtgcagcagcattgcaccgggtggcgggcgcatcatcgcctgccttcaatcccatgccggccagctctcctcatcctgtgcgcaagcgctgccgcgcgcgcaggcgctgcgaaacaatgccgccagcgccgccgcggcaccgaaataggagaatgccgtgggctacgcttcactgctgctcgacccgatgctcaggcaactgatcctcgcaaccgcgctcggcctcatgctgctcgaatacggcatcggacgactcgcacgtcacgatacccacgactggcgcgaaagcgctgcctcgttcggcgtggcgttgggacagagcctgctccgcgccatcgaggccggccttctcgccgtgcccttcgcgttcctgtacgagcaccgcctgttcgactttgcgcagaccacgccggtcgcgctcgcaggattattcctgggcagcgaattcctgtactattggcagcatcgcgcgtcgcatcgcattcgctggatgtgggcgacgcatgcggtgcatcactcgacgacgcggctgaacctgactgcggcgatccggctcggttggaccggcaacatctcgggcaatttcctgttcttcctgccgctcgcgctgatcggatttcatccgtttgcgatcgtggcaatgctcggcatcaacctgctctatcagttcttcatccacagccagttcgggccgaagctcggcgtcttcgaatgggtgctcaacacgccgagccaccatcgcgtgcaccatgcctgcaatgagccgtgcctcgacaagaactacggcggcatcctgatcgtgttcgaccgcctgttcgggacctttgccgaacatccctccgaccagccgctccggttcggcctcgtcgggggcgtccaatccttcaacccgatccggatcgcgctcggcgaatggatcgcgatgctggacgacgcctggagggcgccgggggcgggcgcgaagctccgcgccctgttcggcccgcccggaggctgagcgcgcgcaggcgctcaaatcttctgattgtactcgccgacttcgggatgcgtgcgcagcacgctgttcaccatctcgaacatgtcgtgcatgcgctgctcggagaccgggctctcgaccacgacgacgagctcgggcttgttggaggacgctcgcaccaagccccagctgccgtcctccaccgtgacgcgtacgccattgacggtgacgagatcacggatcgcctgtcccccgatcttggcgccgctctcctgcaagccctcgaagtgcttcaccaccttgtcgatgacgccgtatttgacctcgtcggcgcagtgcggcgacatggtcggcgacgaccaggtcttcggcagcgcgttcttcaggtcggccatcgacttgccgggcgcgcggtcgagcatgtcgcagatcgcgatcgccgacacgaggccgtcgtcatagccgcggccatacggcttgttgaagaagaaatggccggatttctcgaaccccgcgagcgcgcccgtctcgttggtgcggcgcttcatgtaggaatggccggtcttccagtaggcggtcctggcgccctgctcctgcagcacgggatcggtgatgaagaggccggtcgacttcacgtcgacgatgaactgcgcatccttgtgaatcgcggacatgtctcgcgccagcatcacgccgaccttgtcggcgaagatctcttcgccggtgttgtcgacgacgccgcagcggtcgccgtcgccgtcgaagccgaggccgacatcggcgttgtgatgcagcaccgcgtcgcggatcgcgtgcagcatctccatgtcctcggggttcggattgtatttcgggaaggtgtggtcgagctcggtgtcgagcgggatcacctcgcagccgatcgcttccagcacctgcggggcgaacgcgccggcggtgccgttgccgcaggccgcgaccaccttgagcttgcgcgtcagcttgggacgggaggtgagatcggcgatgtagcgcgccggatagttctcgtggaattggtaggagccgccggccttgttcttgaactcggcgttgagaacgatctccttgagccgcgtcatctcgtcggggccgaaggtcagcgggcggttggcgcccatcttcacgccggtccagccattgtcgttgtgcgaggccgtgaccatggcgacgcagggcacgtcgaggtcgaactgcgcgaaataggccatcggagtcacggcgaggccgatatcgtgcaccttgcaccccgccgccatcaggccggagatcagcgcatatttgatcgacgccgaatagccgcggaaatcgtgcccggtgacgatctcctgacggacgccgagctcggcgatcagcgcgcccagccccatgccgagcgcctgcacacccatcaggttgatttccttctggaacaaccagcgcgcgtcgtattcgcgaaagcccgtcggcttcaccatcggctcggattcgaaggcgtaggtgttgggcaacaatacggatttcggcttcgggaacattgagacgtctcgtgcaaagggggcaggatttgccgcagccttagcgaatgccgggctgcaacgaaaggcgggaatgaaggcttatggccgataattgcggcagtttggtaacggagaaacgttaccgggagggcggccggagcaaagatatcttcttgaaatgggcgggccgcgtgacagcgtggactacgcttactgctccagcaccatctggccgttggcgtattcgaagcgcttcaggcgggacaggaaggagagaccgagcaggttctccgacagtgctgcgtcaggcagcaccatggcatcgacgtcgcgcacgaccaggccacccacttcgagcatggcgatgcgggtgcgcgcggccttgatggtgccgttggcggtggagacggttgcgttgtagtcgctgcgcgagggacggaggccaaagcgggctgccgaactctcgttcaatgcgaccacggaagcgccggtatcgatcatgaagccgatgcgctggccgtcgacccggccctccgtctggaaatgaccgcggccgtcgcgcgggatgctgatgctgcggccgccggcgggctctgtggctgcaacggcgactgtcgtgcgcggcaccgaggtggcggatgccgagctcatcttgtccgccatctgcgccatgaaggtgccgaggccgatcatgacggccgcgatgatcataatgttacgcattacaccacttccgagccggaaagctcgatttcaccacgcgacaggctcggccgcgagcgaagccacggctgggccgatgccattttgacgaaaaggatgagcggacggttaattccaggtgagagttcttacgtcccgcgcggctttgcccgccgggtcggcagcgcattggcgggatcgtccggccaggggtgacgcggatagcggccgcgcaggtcggaccggactgcggcatagctgccgcgccagaagccggggagatcgcgcgtcacctgcaccggacgctgcgctggcgaaagcaattccagcaccagcggcaccttgccggcggcgatcgagggatgcgtgttgaggccgaacaattcctggagccgtaccgcgatggtcggcccctgctcggcctcatagtcgatcgcgagcacgctgccggtcggcgcctcgaaatgtgtcggcgcctcgcggtccagccgcgcacgcatgtcccagggcaacagcgacatcagcgcatcggagagatcgcccgcggaaacatccttgagcgcgatcttgtcgtagagcgccggcaccagccaatcctcgcggcgcgcgatcagcccggagtccgacacgtcgggccagctgtcgccctcggctttgcgcaggaacgtcactcggtcgcgccactgcttggcggccttcgaccagggcagccggtcgaggccggctgcgatcagcccgtccgcgaagatgcgtgcggtatcttccgaaggcgacacggcaagcgtcgcctcggacagggtgatggcatgcaacacgcgcttgcgccgcgcgcgcagcgccatcgcgccacgatcgaacgagatctcgtcggtggtctcgatatgctcggcgaaatggttctcgatctcgtcctgcgtgatctgagccgcgagcaggattcgcccgctcgccgccgttcccgtcatttcgccgatcgcgatgtagggcgcgcgggcgagcgaggacgtctgctcgaccgaagcgccgcggccgttggcgagcacgaaactgccattgccgcgattgcgcgcgacgcggtcgggaaacgcataagcgagcatcaacccggtcgagagatcctcctgcggtcctgccttctccgacaccgcaacctgcgaggcccagcggcgcgccagatcgcgcgcgctcgcggcacgcggcgagcggtcacggcgaaactggtcgcgccggtgctcgagatcgacgctgtcgccgccaagtccacgttcggtgatgatcgcggcgatctcggccgcggcctcgccgcttccagcgcgatgcgaatccacgatcatgcgcgccagccgcggcggcagcgcgagcgcacgcaggctcttgccttcagcggtgatgcggccgtcaacatcgagcgcgttgagctcggtgagaaggctcttcgcctccttccaggccggctggggtggcggatcgaggaacgacagcgtggcgggatcgctcacgccccattgcgcgagatcgagtaccagcgaagacagatcggcgctgaggatttccggctgggtgtagggtgcgagcgaggcggtctgcggctcgtcccagagccggtagcagacaccgggttcggtgcggccggcgcggccgcggcgctggtccaccgccgcgcgcgaggcgcgcacggtctcgagccgcgtcaggccgatgtccggctcgtagcgtgggacacgggcaagacctgaatcgacgacgatgcgcacgccctcgatggtgagcgaggtctcggcgatcgaggtcgccagcaccaccttgcgcgtacccgtcggcgccggcgcgatggcacggtcctgcacggcggcatcgagagcgccgaacagcggcacgatctcgatggcagcgtcctgcacgcgctcgccgagaaagttctgggtgcggcggatctcggcggcgcctggcaggaacgccagcaccgagccgctatcggcgcgcagcgcggatgcgatcgcgtccgccatctgccgctcgatcggcgcgtccgccttgcggccgagatagcgcgtctcgaccggaaaggcgcggccctcgctttcaacgacgggggcatcaccgagcaatcttgccacgcgcgcgccatcgagcgtcgccgacatcaccaggatgcgcaagtcttcgcgcaggccggtttgcgcatcgcgcgccagcgcgaggccgagatcggcgtcgagcgagcgctcgtgaaattcgtcaaacaggatggcggcgacgcctgtcagttcgggatcgtccaggatctggcgggtgaagatcccttcggtcaccacctcgatgcgggtcgcgcgcgagatcctcgagccgaagcgaacgcaatagccgacggtctcgccagtgcgctcgccaagcgacttggccatgcggtcggcgctggcgcgcgcggcgatgcggcgcggctccagcacgatgatcttcttgtccttcgcccagtgcgcatcgagcagcgccagcggcacccgcgtggtcttgccggcgccgggcggcgccaccagcacggcagcgttgttggtttccagcgtgcgcgacagatcgtcgagcacggcatcgatcggaaggggggtggcgaagctgcggggcaagaagtcatcccgtcgtcatgcccgactccgggcatgacgttccttcatctgacagcgaacatgacgtggatggccgggacaaacccggccatnnnnnnnnnnccatctagcggataacccgtctgcaatcagccctgcacagggggccggccgacgctctcgtacgtgaacccggcggcttccatgtcttcggggcggtagatgttgcggaggtcgacgatgacgggctgcgccatggtcgccttcagccggtcgaggtccaacgcacggaactgcacccattcggtaacgatgacgagcgcgtcggcaccttgcgcacaggaataggcatcctcgcaataggtgatgttgggcagttcgcccttggcctgctccatgccgacgggatcgaacgccttcaccttcgcacccatgtcgatcaggccggtcaccagcgggatcgacggcgcgtcgcgcatgtcgtcggtgtcgggcttgaaggtgaggccgagcaccgcgatggtcttgccgcgcagcgagccgccgagcgcctggctgactttccgcgccatcgcacgcttgcggttctcgttgaccgccagaacggattccacgatgcgcaggttgacgtcgtagtcctgcgcgatcttgatcagcgccttggtgtccttcgggaagcacgagccgccgaagccgggaccggcatgcaggaacttggtgccgatgcggttgtcgagaccgatgccgcgcgcgacctcctgcacgttggcgccggccttttcggagagatcggcgatctcgttgatgaaggtgatcttggtcgccaggaacgcgttggcggcgtatttgatcatctcggcggtgcggcgcgcggtgaacatcagcggcgcctgattcagcgacagcgggcggtagatgtcgcccatcaccttgcggccgcgctcgtccgaagtgccgaccacgatgcggtcggggaacttgaaatcgcggatcgccgcgccctcgcgcaggaattcggggttggaggcgacgaccacgtcagccttgggattggcttcgcggatgatccgctcgacctcgtcgccggtgccgaccgggacagtcgacttcgtcaccacgacggtgaagccttgaagcgactgcgcgatctcttttgccgcggcgtagacgtaggagagatcggcatggccgtcgccgcggcgcgagggcgtgccgaccgcgatgaacacagcatcggcatccgccaccggcttggtcaggtcggtggtgaaatcgagccgcttggctctgacattgttcgccaccagctcgtcgaggccgggctcgtagatcgggatctcgccgcgatggagcgccgcgatcttcttctcgtccttgtcgacgcagatgacgtcgtggccgaaatccgcaaagcaggccccggacaccagccccacataacccgtgccgatcatcgcaatgcgcatgaaaaatccagttccagcttggttaacgaaagcccaactcggccaattcggggcggtttagcattttccagagctcatggaacagtccgcatgcaaaaaccggcccgcgatttgaaccggtaaagaagtcggaaaccactgggctccaaactgccccgcgaccacacagggacgggcgggcggcgcctcaaatagggacaccatgacacgatcgggcacaatcggcggcgccgggctcacagcctcttctgccgcgcgtgtcgactgggtcgactacgccaagggcatctgcatcgtcatggtggtgatgatgcattcggtgctgggggtcgagcttgccgccgggcagaccggcttcatgcatgtcgccgtggccttcgcaaagccgttccggatgccggacttcttcctgatttcggggctgttcctgtctctggtgatcaatcgggactggcgaacctatctcgaccgcaaggtagtgcatttcgcctatttctatgtcgtctgggtgacaattcagttcggcttcaaggcgccggcctttgccgcggagaccggctggcccgccgttggcgtcctgtaccttgaatccttcatcgagccgttcggcacgctgtggttcatctatctgctgccgatcttcttcgtcgtcacgaaactgacacgaaaagctccgccgctcgcgatctggcttctcgccgccgcgctggagaccgcccgcatcaacaccggctggaccgtcatcgacgaattctgctcgcgcttcgtctatttctattcaggttatctgttcgcgccttacgtgttcgccctgtcggatcgcgcgcgcagccatccgggtctcgcacttgcggcgctcgcgatctgggcgctggtcaatgccggcctggtcgcgtggggcgccagcgagtgggcgatcgtctctctcgtgctcggcttcgccggcgcatgtgccatcatcgcgaccggcacgctcctggcgcgcgcgcaatggctgagcttcctccgcttctgcggcgagcattcgatcgtgatctatctcgccttcttcctgccgatggcggcgacgcggacgctgctgctgcgcacgggcgtcatccctgacatcggcacggtgtcgctgatcgtcaccatcgcaggcgtgctcggagcgctggcgatctggcgcgtggcgctgcgtttcaatgtgcgcttcctgttcgagcggcccgatgcgttctggatcgcgccgaagaaggtcggcgtgcggttgcagccggcggagtagccggtgtcgtcgcccggcttgaccggggcgaccagtccgccgagacgtcagtggttgggccaggaagccgcggcgtactggattccctgctttcgcgggaatgacagtggggatagtcgcgcaaccgacccaaaattcgcgcttcccaggctgtcaatgcccgcaaaaattcatacattgcggcccatgcccaagacctcgcccgagacctcgccgaagacatccccgaagaccagcgccaaagctgacaccaaggccgcgtccaaagtcgccgccgataccaagcccgccgcgacagcccctgccaaaccggtggcctcgaaggcggcaggcaagggcgaccacgtcttcctcgtcgacggttcctcctacatcttccgcgcctatcacgcgctgccgccgctgaaccgcaaatccgacggccttcaggtcaacgccgtgctgggcttctgcaacatgctgtggaagctgctccgcgagatgccggaggacaatcggccgacgcatctggcgatcgttttcgacaagtcggagatcacgttccgcaacaagatctatccggactacaaggcgcaccggccgccggcccctgacgatctcatcccgcaattcgcgctgatccgcgaggctgtgcgcgccttcgatctgccctgcctggaacagaccggcttcgaggccgacgatctcatcgcgacctatgtgcgacaggcctgcgagcgcggcgccagcgccaccatcgtctcgtcagacaaggatctgatgcagctcgtcaccgactgcgtcaccatgtacgacaccatgaaggaccgtcgcatcggcatccccgaggtgatcgagaaattcggcgtgccgccgaacaaggtcgtcgaggtgcaggcgctcgcgggcgattccactgacaacgtgcccggcgtgcccggcatcggcatcaagaccgcggcgcagctgatcaccgaatacggcgatctcgatcaattgttgttccgcgccggcgagatcaagcagcccaagcgacgcgaggcgctgctggagaatgcggagaaggcgcggatctcgcgacagctcgtgctgctcgacgacaaggtcgatctcgaggtgccgctggacgacctcgcggtgcacgagcccgatgcgcgcaagctgatcgccttcctcaaggcgatggaattcacgacgctgacgcggcgcgtcgcggagtatgcgcagatcgatcccgccaatgtcgacgccgaccccggctatgccagcggcgccagcgtgttcacaacgctgccgccctcggacgtcgtgcccgcaccaggcacgggaaccccggcgcgggcccgaccgaatgaaccaaacaaatcggccggcaaggaggacaaggctgcgagcctgaagggtgcaccgatctcgctcgccgccgcgcgcgaggaagcgctgcgcaagcttccggtcgatcgcagcaaataccagaccatcaagacgctcaaggagctcaacgccttcatcgcgcgcgtccatgatgccgggcaagtcgcgatcgagacgagagcgaactcgatcgatccgatgcaggccgatctttgcggcatcgcgctggcgctggcgccgaacgatgcctgctatgtgccgctggcgcacaagcagtccggcggcggcgccggcctgttcgatgcgggccttgcgccggaccagatcaggcacactgatgccatcgaagcgctgcggccggtgctggaatcatcaggcatcctcaagatcggcttcgacgtcaagttcacggccgtgatgctggcacagcacggcatcacgctgcgcaacatcgacgatgcgctgctgatctcctacgtgctcgatgccggccgcggctcgcacgcactggtatcgctgtccgagcgctggttcggccatgccatgctgaaggaaagcgagctgctcggcagcggcaagggcaagatcaccttcgaccaggttccgatcgacaaggccgcaccgctttcggccgaaggcgtcgacgtcgccttgcgcgtctggcgcgtgctgaagccgcggctggtcgccgagcacatgaccgccgtctacgagaccctggaacggccgctggtgtcggtgctcgcccgcatggagcgccgcggcatctcgatcgaccgccaggtgctgtcgcgcctgtcgggcgactttgcccagaccgcggcccgtgtcgaagccgagatccaggagatcgcgggcgagccggtgaatgtcggcagccccaagcagatcggcgatatcctgttcgggaagatgagcctgccagggggcaccaagaccaagaccggcgcatggtcaaccaccgcgcaggtgctcgacgaactcgccgagcagggccacgacttcccgaagaagatcttggagtggcgccaggtctcgaagctgaaatcgacctacaccgacgcgctgcccacttacgtcaatccgcagacacatcgcgtgcatacgacctacgcgctggccgcgaccacgacgggacgattgtcgtcgaatgagccgaatttgcagaacatcccggtgcgcaccgaggatggcaggaagatccgcagggccttcatcgcgacgcccgggcacaaactcgtgtccgcggattattcgcagatcgagctgcgtctgctcgcggagatcgccgatattcccgtgctgaaacaggcgttccgcgacgggctcgacattcatgccatgacggcatcggaaatgttcggcgttccgatcaagggcatgccgagcgaaatccggcgccgcgccaaggcgatcaatttcggcatcatctacggcatctcggccttcggtctcgccaaccagctcggcatcgcgcgcgaggaagcctcggcctatatcaagaagtatttcgaacgcttcccaggcatccgcgcctacatggacgagacgcgcgacttctgccgcagccacggctacgtcaccacgctgttcggccgcaagtgccactaccccgacatcaaggcctccaacgcctcggtgcgtgccttcaacgagcgcgccgcaatcaacgcacggctccagggcaccgcggccgacatcatccgccgcgccatgacccgcgtggaggacgcgctcgccgagaagaggctgtcggcgcagatgctcttgcaggtgcacgatgaactgatcttcgaggtgccagacgccgaggtcgaggcgacgctccctgtcgtgcagcgcgtgatgcaggacgcgccgttcccggccgtgctgctctcggtgccgttgcatgtcgacgcgcgcgccgccaacaattgggacgaggcgcactagcgctctctcttcacctctccacgctgcggggagagggagcgcagcgagcgcatggcgagaacccgattgtcctccgagcaattgcgaggtggtgtcaccgttccgcgcatattagagctggtgcatctcgcgcaccggttcacccatgccccacacccactcgctgctcggcttcgccctcgtctgccttggcctcgttctcacgcccgggccgaacatgatctatctgatctcgcgctcgatcacgcaaggcgccgcggcgggcatcgtctcgctcggcggcgtcgcgctcggcttcgtgttctacatgctgtgcgccgcgttcggcatcacggcgctgctgctcgccattcccttcgcctatgacgcgctgcgctttgccggtgccgcctatctgctgtggctcgcttggcaggcggtgaagccgggcgggcgttcgccgttccaggtcagaaagctcgcggtcgacagcccgcgcaaattgttcgccatgggcttcgtcaccaacctgctcaacccaaagatcgcgatgctgtatctggcgctgctgccgcaattcatcgatccctccgccggcagcgtgctggcgcagtcgctggtgctcggggccatccagatcgcgatcagcgtcagcgtgaatgcgatgatcgcgctcgcggcaggatcaatcgcactgttcctggcgacgcggccgagctggatgctggtgcagcgctggctgatgggcacggtgctggccgggctcgcggtgcggatggcggtcgaagcgaagaaggtgtagcggaggccgcgatcacacccgtgccccggacgcgctgctgcgcagagccgcgacccatcgctacatgcgccccggttttgcagcgcaccgcttgcgcgctgtaccgcgtccggggcacgaaagcgcgtcagcagcctcaatccagcttcgcttccatcccgcgcttgaccgccgggcgcgccatcagcgcctcgtaccagcgcttgacgttggggaagtcggccagatcaaccttgtggcgagggtgacgccaagcccagcccaggatggcaaaatcggcaaccgagagctcgccggccacgaactcccgaccctcgagctgccggtccaggacgccatagagccggcgcgtctcggccatgtagcgcttcaggccgtaggcgcgatcctgctcgttctccagcgcgatgaaatggtgaacctggcccggcatcgggccgaagccgcccatctgccacatcagccattcgtaaaccgggatgcggccgccaagcgatttcggcaggaatttgccggtcttctcgccgagatagagcaggatggcgccggattcgaagatgctgacaggcttgccatcggggccctcggggtcgacgatcgcggggatcttgttgttgggcgagagcttgaggaactcgggcgccatctgctcgcccttggtgatgttgaccgggatcaccttgtaaggcagccccatctcctccaacgcgaccgagatcttgcggccgttcggcgtgttccaggtgtagagctcgatggtcattccgtttccttcccaagaagcctgccccttaactactccggaaggttgcgccctcacaaccggcagcccggggtgaccgatccctgttgacgggagatgccccctctggaatgtcgcgtccgtcgcggataaattccgcccccacctaaaacgctgttcgagggaccgccgtgtcgaaatccgcctcccgcgcccgcctgttcgaaatcatccgccggcgctcattcggccgcggcgaggtgacgctcgcgtcgggccgcaagagcgatttctacttcaacctcaagccgaccatgctcgaccccgagggcgcaacgctgctcgccgaactcacgtacgaggcactgaaggatgagcagctcgatttcatcggcgggctcgagatgggcgccgtgccgctcgccggcgcgctggcgcagatctcctggatcaagggccatccgatcgcggccttcttcgtgcgcaagaaaccgaaggagcacggcgccaagctcgcgatcgagggcctgcccaagggcgagacgctggcgggcaagcgcgtcgtgatcgtcgaggacgtcacgaccactggcggctcggcgatgaaggcggtggaatcggtgcgcgaggccggcgccaaggtggtgctggtgctgacgatggtcgaccgcgaggaaggcgccaccgacacgttcggtgcggccggcctgccgttccgctcactgtacaaggcgtcggagttcttgaaggggtagcgggtgtccccgggcgcggcgcgctgtgcagcctccagagcacgaaaccggccccctcaaccgctcgtttaccatccgctcttatggtgaatcatgtgctgagacccaaggggttccagccggttcagtagcgtcgggtggagtaggcgtttgcgtacaatctcgtcccatgcgcgccggcagcgtcgcgcgatgcttgtagccgccacgctggcagcgccgctgcttgcagtcccggccccagtctcggccgaaggcctgttcgacttcctcttcggcggcatgccgcagcagcggccgcagcgcgaggtgccgcagcaggcaaactcctacgccgatcccttcaccggccagcagaatggggcgacaccgcaatatgtgccgccaacccgctcggcggcggccggcggctcggggccggccttctgcgtgcgcagctgcgacggcaaatatttcccgctgatgcgcggcctcgtctcaccggcgcagatgtgccaggcgttctgtcctgccagcgcgacaaaagtctatttcggctccagcatcgagggcgcttattcgcagaccggcgagcgctatgcagacagcgagaacgcgttcgcctatcgcaaggcgctccgcgccgactgcacctgcaacggccgcgagccggtcggcctggctccggttgaccttgcgctggattcctcgctgaaggcgggcgacgtgatcgccaccaccgacgggctcgtcgcctataccggcattcgcgtcggcaacgaccaggctgccgacttcaccccggttgcttcctatcccggcctcaccgcccaggtccgcgcgcggcttggcgagatgaaggtggcgccggtgcgcgccgagacggtgtcggccgatgcgccggccgcagccgagatcgtgcgcgagccgctgccggatgtgtcggtgccgaagacccagaagcctgccaagcgggcgggattggattaaaggccaatctgtcacaacatcgtcattgcgctcgcaatgacggcggttgcagcgtcaccttccgatgatcaccccgatcacgttcggcgctgccagatatttctcctcgatcgccacccgcgcagcggcgcggttttccggggtcaggaggccgcgcttctcggccaggatcatccagcaaaagccccaccagtcggtcagcatgccctgatcgccgacgagatcataaccctgctcggccgcgaagatgcgcgcatgcgcctcgtcgagcgtgtcgagaaacagatggtcctccgtcgagaacagatcgtcgctgatgtcgtcgatggtgtagccccagatcgactggcacactgcgttgaactcgcggtcgaactggtcgtcatcgacggcatggcgccgtgccgcctgatgcagccgcgacagcgagcgcgcgaaatcggcgatccgggtgagggcaaactgatcgaaggcgatggtggacatctagttctcgcaaggtctgtcagacgctagatattgtgtcggcaatgcgccgaatcataatgatatatcaaagacttgctaaagtgttcttaattcgttcacggcaccggcgctgccggtccaggcgaatgccgggaatcgaaaggggccgcctcgcagcgaccccctgccggttacaatcttgttcgggatgagaaattccagccccggcaagcgtgaggttagaaccggcggcaggcttgtgcgattccggaaaagtactggctggagtgctgtcctaatttgggcccggatctcaataacagcgggaggccgcgatggcatggacccggcgatcgccgaggagatgggcgacaaagccgttcttcgggaagatctttgcgaaggcggcgtcgcggatgctgaggccaccggcataggcgccgaacgccggcatcacggcgcgcatcccgtcgctcgcaaagcaccggcgctccagcgagcggccgcgcgcggagacacgcgccttcgggtgcagatgaccggcgatctcgccatccgagccggtcggctcgtggcggaaggtgatcgggccgatcgcgacctcgtccgcgacggtgccgccgagatcgggcggcaacatgggatcgtgattgcctgagatccatatccagtcgcggccggcctggagcgcggcgaccgtgtcgcggtcttccgccgataggcgcccatgcgcgctgcggtcgtgaaaactgtcgcccagcgcaacgatgacttgcggattgtggcgggagatgacagcagcgagccggctcagcgtcgcaatggtatcgtaaggcggcaacagcacgccgcgcgtggcaaagctcgagcccttctccaaatgcaggtccgagacgacgagcaggcgctgctcttcccagaacagcgcgccggagagatcggcttggagcgatacacctgcgatatcgagcgcaagcgccgaagagagcgatagcgcaacgttgtccgtcatggccgggcgcgtcccggccgtccacgttcttgccgctgcaggaaagacgtggatgcccgggtcaagcccgggggcgacatggagagagttgggccgcggaaagacattgctgcagcagtttacgacatcgcctctttgacgagttcgtcggcggcttccgccaacagttcgtctgcagcttcgccataaactgactcgcggccgatttccagcatcacgggcaccgccagcggggagacgcggtcgagttcccggtgcgtgatgcgaccgtggatgcgcatcaacatgtcgctcagtcggcgcaggtcgagcagaccggtggcggcatcggcccgcgcggcgcgcaaaagcacgtgatccgcctggtgcttgcgcaacacgtcgtagacgagatcggtcgagaacagcacctggcggcggctcttctcctcaccggtgtggcggcgcgcgatcaagccggagatgatcgcgcagttgcggaacgtgcgcttcatcagcgctgattcggcgagccaggcttccagatcgtcgccgagcatgtcggggtcgaacagcgcgtcgaggtcgatcctgccgtcacgaatcatgaacgacatgtcgccgagcgcccagatcgccacggcatattcgttggcgacgaagccgagcggccgcgcacgggcgcgctcgaggcggcgcgtcagcagcatgccgagggtctgatgcgcaagacggccctcgaatggatagcagaccaggtagtgcttgttggcgcgcggaaagctctcgaccagaagctcgcgcaccgcgggcacgcgcgagacgtccttctgcagtgacagccagtcgcgcacctgctccggcaggccgccccatgcgcggccgtcgtcgagcagtcggcgcacgcgctcggcaagataggtcgagagcgggaatttgccgcccatataggacggcaccttcggatccttgtcgtgtgcgcgcgagacatagacctgatcctcgaccagtgtctcgtagcgcaccacctcgcccgaaaacacgaaggtatcgccggggctcaggccctcgatgaaggcttcctcgatctcgccgagcagccggccgccacgcgcaatcactccagtagaacctgcaccgccgccgcgggagcgcaccaggcgcaccttcagcatgtcgtcctcgacgatggtgccgacgttcatccgatagctctgccgcaccttgggattggcgacacgccaatgcccctccttgtcctgcttgatgcgggcgaagcgctcataggtcttcagcgcgtaaccgccggaggcgacaaaatcgatgacgtcgtcgaaatcctgccgcgacaggccggcgtagggcgcggctgtgcgcacctcggcatacagtttgtcagaaaggaacggctcgccgcaggcacagcccagcacgtgctgagccagcacgtcgagggcaccggtgcgcaagggaggcgtatcctgggcgttctcggcaatggcgtcgatggcgacgcggcactccagcacctcgaatcggttggccggcaccagtaccgcgcgcgaggcctcgtcgaggcggtggttggcgcggccgatgcgctgcatcaggcgcgaggagcccttgggagcaccgatattgacgacgagatcgacgtcaccccagtcgacaccgaggtcgagcgaggaggtgcagaccacgccgcgcagccggcccgccgacatcgcgtcctcgaccttgcggcgctgcgcgacgtcgagcgagccgtgatgcagcgcgatggcgaggccgtcgtcgttcatgctccagagattctggaacagcatttcggcctggctgcgggtattgacgaagacaagcgtggtcttgttcgccttgatcagctcgtagatctcgggaagcgcgcgccacgcgctgtggccggcccagggcagccgctcgcgggtatcgagcatctcgaccacgggcggcgcagcgccgccggcgacgacgatgtcggccgcggcttccgtgccgtcgggctgcggtaccaggaagcgcgcaagctgatccggctcggccacggtcgccgacaggccgatcgcgcgcatctgcggcgcaagacgccacagtcgggccagcccgagcgagagcagatcgccgcgcttggacgtcaccagcgcatgcagctcgtcgagcacgatgcgcttcagcgaggaaaacaggaacggcgcatcgtccgaggagagcaacagcgcgagctgctcgggcgtcgtcagcagaacatccggcggatatcgccgctgccgctggcgccgcgacaccggcgtgtcgccggtgcgggtctcgaccttgatcggcaggcccatctcggcgatgggacgctcgaggttgcgcgcgatgtcgacggcgagcgccttgaggggcgagatgtacagcgtgtgcaagccgccggtccgttgcaggccgcggccggtggagacgaggctttgcttcgtgcttgcctcgcgttcgatgggatcgatcgacagctccaccaacgtcggcagaaatccggccagcgtcttgcccgcgccggtcggcgcgatcagcagcgcgctggcatcctcgcgcgccttctcgagcagcgccaattgatgtgcgcgcggcgaccagccgcgggctgcaaaccatcgctggaagcgatcgggcagaagggcaggcgtctcgaccgatttttgtagaatccggggcggcacggcatgacaggtaagccgtgaggatggcttcgtcgaggggctgcgccctccccggcttcacaagaagacccagagctctcacacctccgccggcacctggtccaggaatccgatcacgctcttgatccgcccgtccctcagcaccgcgaaatcagtgcctttgatcgggctgtcggcgccgtcaggaccaagtccccacgaaaagcggatgtgatcgccgtagccgttgggttcgccgatcagcttgaacttgaaatcggggaagcgctgctgcacgcctgcgatcagcgcctcgatgccgtcccggccgtcacccttcatgacgggatcgacatagctggcatccgccgtccaggtttcgctcagcagctcgcggcggcggctcgccatgcgctcgttccagacatcgatatagcaaagggcgatggcggtgtggtcggtcatgttgctctccttcgatgaagccgtctccggctgaccgtcactatcgaaggtttgcgcaccgggatcgattacctcggacgtcatcgatgcgcgaaaaaagaagcgcgatgatgggtctcatcgcgcttcatttcggatcgtcggcgaaaatcacttcgccgcggtgaccatgatctcgaccgtgtattgcggcgccgccagcttggcttcgacggtggcgcgcgccggcgtgttgccgggcgagacccaggcgtcccacaccgcgttcatctcgccgaaggtcttcatgtcggtgatgtagatcgttgccgagagcagcttcgacttgtcggtgccggccttggcgaggtgggcgtcgatggtcgccaggatatcctgggtctgcttcgtcacgctctcgccggccgccttgttggcgacgacgccggcgagatagacggtgttgccgtgcacgacgacctggctcatgcgcgggccggtttcgaaacgctgaatgctcattgggggtctcctggtgaaatggcggctctgtctagcccagcacctcgcactccgccaccccggggcgcgcatgcgccgccgggcccgcatgtgtcgcctgcgacggacggagtctcggccgattgcgtcgcctcagggaaaactgctgaagaacgtccagatcgtctcggcaccgtcgatgtcgatgttctgcggccccagcaggccggctgcgatcttcggaaagcgggcatccggaacaaatccgggcacgcggtggccgccactattgacgcgatagagcaccacgtcgtgtccttgggggcaacgcgaggagatccgcgtcaccgtggaatggtctgcgggcgccctgtcgggcaaatcggtcgtctccgcgtcttcaacctcgcagccattgagcctgcgccagaacgccagcgtctcgtcggtcgaccagaatccatccgcggcgaaatagctcgttccgcgtccaccggcgtaggggaccagcaggtcggcggtgccgttcatgagcagcatcgggagcggccgcgacggatggcacgtgacggcggcctcgtcggtgagattcatgatcacactcgcagctgccgcaaacagatcggcgcgcgcgcaggccatggtcattgccatggcgccgccgttggagacgcccgcgatgaagacgcgctttgcgtcagccgtgccgtcggccaccagcttgtcgacgattttcgcgatgaacgcgacgtcgtcggtacccgctggcggtccgcgcagggcaggcccggccttcgttcgcgcgtctgcccacgcattgttgagcccgtccggaaagaccacagcaaggccctcgcgcttcgcaacctgaggccaggtcgtccgcgcgatcatgtcggcaccgcgccgggacttgccatgcagcacgaccacgagcggtaccagcctcttgcccggcagctgcgccgtgtaggagcgcttcacgccgttgacgtcgatcgtctcggcggatgcagccgaggcggcgatcaacgccgcaagaaacaccccaacctgcatccgtcgtcccacgatctaacccaccgctttcgacgcggcgcggcccgccttgcggcccgagaacagacacccgccaagaaaagtgccttccagcgagcgatagccatgcatgccgccgccgccgaagccggcggcttcgccgacggcatagaggccggggatcacgctgccctcttcgccgaacacgcgcgaatcgagatcggtctcgaagccgcccagcgtcttgcgggtgaggatgttgagcttcaccgcgatcagcggcccatgcgcaggatccaggatgcggtgcgggggagcggtgcggatcagcctgtcgccgatatagcggcgcgcattgtggatgttcatcacttgcgcgtccttgacgtaggggttggcgatctcgcggtcacgcgcctcgatctgcatcttgatgtgctcgagcttgaggagatcgctgccggcgagcttgttcatggccgcaacgagttcgtcgagcttgtcgcgcacgatgaagtcgacaccatggcttttgaacgcctccaccggagccggcgcccccttgttggtggcgcggcgcaacgtcatgcgccagctcttgcccgtgaggtcgggattctgctccgagcccgacagtgcaaactccttcttgatgatgctctgggtcaggatgaaccaggaatagtcatagccggtggacatgatgtatttgagctggccgagcgtgtcggaccccgggagcagcggcgccggcagccgcttgcctgtggcgtcgaaccacattgaggaggggccgggcaggatccggataccatggcgcggccagatcggcgaccagttctggatgccctcgacgtaatgccacatgcgatcgcgattaatcagccgcgcgcccgatttttccgtaatgccgatcatgcggccgtcaacatgctcgggcacgccggagatcatgaatttcgggggatcgccgagccgcttcggccagttctgccggaccagttcgtggttgccgccgatgccgccggaggcgacgatcacggcctgcgccttcagggcaaactcgccggtcgcgttgcgggaggaactcttaccacggtcgatagggtccggagcgaggacggtgccgctgacgccatccacagtgccgttggtaatggacagtgcgtcgacgcgatggcggaatctgaagagcaaccggccgctgttcattgcctcgcgcgcgcggcgcgcgaacggctcgacgatgccgggcccggttccccaggtgacgtgaaagcgcggcaccgaattgccatggcccatcgcgtcgtagccgccgcgttcggcccatccgaccacggggaagatgcgatggcccatggcccgcagccagtcacgcttctcgcctgctgcgaacgccacataggcctcggcccatttgcgcggccagaagtcctcgtcgcggtcgaagccggccgtgccgagccaatcctgcatcgcgagctcgatcgagtctttgatgccgagccggcgctgctccggcgaatcgaccaggaacaatccgccgaacgaccagaacgcctggccgccgatcgactgctcgccttcctggtccacaacgatcacgcgcttgcccgcatccgcaatctcggtcgcggcgacgaggcccgacagtcccgcgccaacgacgatgacatcagtctcttcagccatccgtgttttcccctccacgagttccccctgtaattgcccggattgaagccagcggttgtagctgagatcaagggttggcgcggtaagacctcgttaacttgttccacttgggtattgagaccgccggagtgcagcgcgaacgcaacactggatttgaatttcttttgagtcagcccgcctgcctagacaaaaccttggttacgacggacgctggctgcgcatcaccacctgacacgcagattcgaatacgactggggcgggggacaatgaagtttctgacggggttgcttgcgtcggttctcctgatggcgggcatgggggcttctcacgcagtggttcgtatcgcggacgaccgcggcggccggatcggaacctacgtcgacaaataccaggacctcaggcaatcgggcgaaaccgtcatcatcgacggcctttgcgcctccgcttgcaccattgtccttggcgccatcccgcacgaccgcatctgcgtgacctcgcatgcgacgctcggcttccacgctgcctgggatttcggcgccaacggccgcgccgtcaccaatcccgaagcaacgcagatgctgtatgcgatgtatccctctcaggtgaggcggtggatcggccagcggggcgggctcactcatcgcatgcttttcctgaagggcaagcagctcgaggccatgtacaagccctgctacctggacgcgcaggcctcgacggccaagccgtcgcgccggtcgctgccacagacggagccacttgaatccgctcggggccagctcctccgctgatcctcgcagcctgacgggttgttttacgcccaagcggcggcttgcccgcaggctgcgcagagcctatctgagagccagggaaccggggccttcgtcccgctcgttgtcatggctcaaccactgcatccagcgcatcggctatcggacaattcgcccaatcccggccggatgccatccgtgctggtctggggcggcacggccgttggcggtcttgtggtgatcggtgcgctggcactttggttccactatggcagccacgtgttcttcgaaatgatcaggactggccttgccgcctgtttctgagctgcgacaggaagttatccgcccatgagctccgccacccgtgcgctggtgattgcgaccgccttcgccgcaagcctgattgtcgggctcctgatcatgttctgggcgatgggcggggtcggcaaaatggcgcaaccggccgcgatcggcggcccattccagctgaccgaccagaacggcaaggccgtgaccgacaagagcctgaaaggcaagccgaccctgatcttcttcggctacacccattgccccgacgtctgcccaacctcgttgttcgaaatctcggaagtgctgcgcgtcatgggcaaggatgccgacaagatcaacgccgtcttcatctcggtcgatcccgagcgcgataagcctgcaacgatgaaggattatctttcgagcttcgatccccacctccagggcctgtccggcgatccagccgagaccgccaaggtcatcagctcctaccgggtctacgccaagaaggtcccgaccaaggacggcgactacactatggaccacaccgcgctgatctatctgatggaccgcgaggggaggttcgtgtctccgttcaatctgaagcggacgcccgaggaagccgcggcggatttgaagaagtatctctgatccagccgtcacggccgggcttgccatccacggctcggcgcgcgcagaacgtgggtgcccgggacaaggccggcctaacgatccagcccataatcggcactcgcgttcccgctgggatggtctataagccctccgatcccaacgaagttcgttcattcccggccgatggcaccatcgcaacaggcgaaatcgtccaaatctgcccgtggcttgctgaccgggctggccgtggccgcatgcttgctcgcgagcctgcctgccgccgaggcccaggcgcccgccaagcggcctccagccgcgccgcaagccgcgccccaagcagccccgcaggccgtgcccggcttctgggacccgcgccgacgaccggagcggccggacctgtcgcgcctcaccgtcatccgattcctgacggagaccgactatccgccattcaatttcaccggtgccgacggcaatccggccggcttcaatgtcgatttcgcccgcgcgctttgcgaggagatcaaggtcacctgcaccgtccagatgcgccgcttcgagacgctggtcgatgccctcacctccaaccggggcgatgccatcatcgcctcgatggcggtgagcccgcagctccgcgcccgcgtcgatttcaccgatccctattaccgcgtgccggcgcgcttcgtctcgcgcaaggatgccgtgatgccggagatccggcccgaatatctcgagggcaagaaggtcggcgtgatcgcgggctcggcgcatgaggcttatctcaaggcgatgttcaccgacgccgagttgcacgcctatcccggcgacgacgcggtgcgcgcagctttgcgcaggggcgaggtcgatttcatcttcggcgacgccatctcgctcgcattctggatcaacggtacggattccggcgattgctgcgccttctccggcggccccttcgtcgagagccgtttcttcggcgagggcatcggcattgccgtgcgcaagggcaacgacgtgctgcgtcaggccctcaactgggcgatgttccgcgtctgggagaaaggccgctataccgatctgtggctacgctatttctcggtgagcccgttctaaggcgaacgcctctccctccgtcgtcgttgcgaggagcgcagcgacgaagcaatccannnnnnnnnnnntggctcgcaacgacggtgcgagaggcaacaccgctcacaaaattgcatttggcccggaaatcgctattttccgcggcccggaggcccctgatgtccgttatcgatctcgccgcgaacccgagcgacttgcgtgcgctcgccgaacaatccaacgcctggccgttcgagcaggcgaaggccattgtcgcgcggctgaagaaaagcccgaaggacgaggtgctgttcgaaacaggctacggtccctccggcctgccgcatatcggcacgttcggcgaggtcgcgcggacctcgatggtgcgccatgccttccgcgtgctgaccgaggacaaggtcaagacgcgcctgctcgccttctcggacgacatggacggcctgcgcaaggtgcccgacaacgtgcagaaccgggcgccgctggaagccaatctcggcaagccgctgacgcgcgtgcccgatcccttcggtacgcatgacagcttcggcgcgcacaacaatgcgcgcctgcgcgccttcctggatcatttcggcttcgactacgaattcgcgagctcgaccgactattatacgtcaggccgcttcgatgcgacgctgctgaagatgctcgcggcctacgacaagatcatggcgatcatcctgccgacgctggggcccgaccggcgcgccacctattcgccgttcctgccgatcagcaagaccacaggtgtcgtgctgcaggtgccaatgatccgtcgcgacgtcgcggccggcaccgtgacctatgtcgaccccgatacgaaccaggaagtcgagactcccgtcaccggcggcaacgtcaagtgccagtggaaggccgactgggcgatgcgatgggtcgcgctcggcgtcgactacgagatggcaggcaaggacctgatcgactcggtgaagctgtccggcgcaatcgccagggcgctcggcggcacgccgcccgaaggcttcaactacgagctcttcctcgatgagaagggccagaagatctcgaagtcgaagggcaacggcctgaccatcgacgaatggctgcgctacgcctcgccggaatcgctgtcgctgttcatgtaccgcgagccgaaggcggccaagcggctgtatttcgacgtcatcccgcgcaatgtcgacgactatcagcaattcatcgacggttttgccaagcaggatgccaagcagcagctcggcaatccggtctggcacatccacaacggcaggccaccgaagggcgacatgcccgtcaccttccagctgctgctgacgctggtgtcgtcgtcgaatgcggagaatgccgagacgctgtggggcttcatcggtcgctatcgacccggcgtgagcccgcagacgcatccgaagctcgatgcgatggtgggttatgccatcaactattatcgcgacttcgtcgcgccgacgaagcagtttcgtgtgcccacggataccgagcgcgccgcgctgcaggatctgcgcgatgcactgtcgcagctcgcgccaaacgcatccgccgaggacatccagaacgtcgtctacgaggtcggccgccgcgagccgtttctcgaccaggtcaagaagggcaaggacggccgtccgggcgtcacgctggactggttcaacatgctctaccaggtcctgctcggccaggagaaagggccgcgcttcggctcgttcgtcgcggtgtacggcattcagaacgcgatcaacatgatcgacggcgcgctggcaaggagcgcgtgagcggcgcaatcactggctcgcccagaggatccgcgcaatccaggcgacatcgctcgacgcgacccttcgcgccgcctgcgacgcatcgaagggcgccaagtccagggcctttgccgtgcgccgcttcagggtcgcgatcgtgatctcgcccgtcttgatctttaccaccacgcgatcacccttgcggatcggcgccgcaggcgagaccaggatgatgtcgccgttgcgataagcaggcagtagcgctgcgccggaaatctccagcgcaaagacctgaccgtcctcggcgatcggaagcgcgatctcggtccagcccctgccggatggaaggccggccccatcgaaggccccgccggtcccggcctgcgcgaggccgagcagcggcaccgagccgcggtcgcttacaccgccgtcatcgatcagcttcgcaaagctgtcgatcgaggcgtcggccgcggccagcgcctttgcgatcgattctgtcgatggccagcgctcgcggccatcgacagtgacacgtttggacctgttgaacgtggtggggtcgagcccggcacgcttggcaaggccggacggcgacagcccggcgcgcgccgccagccgatccagcgcggcccagatctggtggtgagtcagcatcctctgtgctttggcctgcctgaccatggaaggtccagcccgtcgcaactcaggaaaactgtcctcaaatcaaccggttttccgtttttcgcgcaagggcggcggctaactcttgagttcggcagaggcggcctttacggtcgcggccgggttttgaggacccgcacgagacgaaaaaatccaaaagactcaaagaacaaacaaggctgcggtagcggtggtcaagatctacaaaatctgtccggcctcggcttggcgcgaggcggaacggcagggtgtctaccggggcagcgcagacgacgcgcgcgacggattcatccatttctcgaccgccggccaggttcccgagaccctgcgcaagcactatttcggacagcgcgcgctgttcctggtcgaggtcgacggcgatgcactcggcagcgagctgcgctgggagcgctcgcgcaatgacgagctgttcccgcatctttacggcgagctcgatctcggcacggtggtcacggtgatcaacctcaccatgcgttccgacggcagccacgacgttccggagctgctgccgtgatccgcgcgttcgacgccttctcgctgccggtgctgcgctggttcgatcccgaggacgcccatcgcctcgcgatccagggcctgcgcttcctgccgccgatcaagccccgccccgacgaccccaagctcgccgtgcgcgccttcggactcaatttccccaatccggtcgggatggccgcggggttcgacaagagcgccgaggtgccggacgcgctgctgcggctcggcttcggcttcgtcgagatcggctcggtgacgccgaagccgcaagaaggcaatccgcggccgcggctgttccggctcgagcgagacgaggcgatcatcaaccgcatggggttcaacaatgacggagcagaggcagctctgcgccgccttgccgcgcgcgcacagcatggcggcatcgtcggcgtcaatgtcggtgccaacaaggattcgccggatcgcgtcgccgattacgtcaagctgatcgagacctttgcgccggtggcgagctatttcaccgtcaacgtgtcctcgccgaacacgccgggcctgcgcaacctccaggaaggcgcactgctcgacgagctcctcgcccgcgtgatcgacgcgcgcgagcgggtgcgccagaaggccggcgacacgccggtgctgctcaagatcgcgccggatttgagccttgcccagctcgacgacgtcgtgcaggtcgcgcgctcgcgccgggtcgacggcatgatcgtatcgaacaccacgatcgcgcggccgagcacgttgcgcgagcaggcgcgcgccaaagagcaaggcggcctgtccggccgcccgctgttccgtctgtcgacgcggatggtcgcagaaacctatgtgcgcgtcgaaggcgcgttccccctgatcggcgtcggcggtgtggattccggcggcgccgcgctgacgaagatccgcgccggagccagcctgattcagctctattcgtcgctggtctacaaggggctcggcctcgtcgacgagatcaagcgcgacctgacctcgacgctgctgcggacagggcgcgattcgctgtcggagatcgtcggcgcagatgccgcgacgctcacggcggaagactggccagggatgtgagctacgcctacgatttcggaaacgtcgccctatacagcgccggataccttgcgccctgcagcccaccgcgcgccacatagaacgcgatcagcgcgctccacagcccggcattgccgagagattgcagcgccagccagacgccgaagaagatcgcgagcgaaaccagcatcagattgcgcatctcgcgtgcccaggttgcgccgacatagatgccgtcgaagccgaaggcgaatacgcccggcaacggcgcaagcacgatgaacggcaggaactcgcgcgctgcgcggcggacgtcttcactggcggtcatgaaattgatcagccccggcccgaacagcgcgaacagcaaggcaacgaccagcgcgaagccgagcccccacagcagcaccagccgggtggaatccaggaaacccttggcgtcgcgcgcgcccaacgtgcggccgcagagttgctgggccgcgttgccgatgccgtccagaaagaaggcgctgaccaggaggaaattgttgaggacagagttcgccgccagcgtcacgtcaccggcacgtgcgccctttgcggtgaagaacaggaatacgacgatcagcgccgcggtgcggatcatgatgtcggaattcaccgccagcaggcgcatcagcttgacccggtcgaacaggcgggcgcggggaacggcaaagccgcccaccgcatagcgacggcagacgatgacgccaagcacgaagccggtcgtctccgacagcagtgcggcgatggccgcgccggcaatgccggtgtcatagaccaacaccagcaggatcgtcgccgccatgttgatgaggttgatgacgacctggagcgcaagcgcgggattggcgcgggcctgcccgatcagccagccgagcacgacgtaattggcgaaggcgaacggcgatgaccagatccggatcatgaaataggtcttcgccgcgcgcgtcacgccttcgctgccgcccatcaggtcgaatagcaccgaggtcagcggcaattgcagcgcgatcagcccggtgccgatcaggccggcgacgatgaagccacgcacgaggatggcattcagttcctcagtcacgcccgcgccgagtgcctgtgcggtgaaggcgagcgtgctcatgcgcaggaagccgaacagccagaacaggcagtcgaagatgatggaggccatcgcgacgccgccaagcagcgcggcgtcgtcgagccgtccgatcgcggtggtcgaaaccaccccgatcagcggcgtggtgaggttcgcgaccatggccggtcccgcgatggcgaacacctgtcgggagctgatcctgggatgaaccggtgcgtgcatgtcagaacacgagcaccatgccatcctctgcagccagatgcggcacgtcgcccagacgcgacagcatgtcgtcgctcatatgggtgaggacgagccgcttggcgccgatcgcgggcagatgctgttccaaggtcttcaagctgagatggttcttgacaaccttctcgtacatgtaggcttcggcgatgaaaaggtccgcgccatgcgccagcggaatgagcgtctccgtccattcggtgtcggcgctgtaggccagcgtccggccctcagcctcgacgcgataggcgaggaaaggcccgccggattcgccgtgcacgaccggatacggtgtcaccgttattgccccgaaggctcgacgctgctctggggcgagctcgaccaggttgagctcgaagcgctgcctggttttggaggagtgctcgaacagcgcttccatcacctctcgcagccgcgtctcgatgccttgcgggcccgcaaccgtcagcggccgcgtccgccgcgaaaactgcgcgtcgagcagcaggaacggtagccctgcgaaatgatcgccatggaaatgcgtgatgagaatgaggtcgatgtcctcgcgcacgatctcgagccgcttcagcgccggcagtgccgacgcgccgcaatcgatcaggaaattcgcggcgcgccccgagacatggaagcaggtgttgagcctgcccccggagccgaaggcgtcaccgcagccgacgaaacgcaattgcatcggctgcgtactccctcgcccaggtccttaccggccgcgcggcgcgccgaacacgcgcgagagcagccagatcgggatcacgatgaccgcgccgagcaggaagtagcgccacagccaattgatcgtgtcgaatccgagatcccacagacgctggaacagcagctggatgctgtagatgatgttccagggatcgaagccgatcgccgccagcacgacgccgaccaggatcgagagcatgaccagccggaacgcgaccgtcagcggggagccgccgagaaagcggtgcaggccgtcgctgcggccggccggcaaatctctgacgtcttggaccatcgcaaactcctcagggggattcgaccccagtatagggcacggcgaggcacatggggaacccgtaacggcgcgtcaatcagcttaccggagtttaattcgggcagcgccggagcttcgactgtggcgcgcggctggccgcgggctccttaacctctcttgtttgcgacagaagtcggcgcgcagcgcggagtaagggcgctctcctctcggccgatcccaccctggatatcccgggagggagcgcattgctcgtgaggacagttcatagatcaatctccgccggttcggccttcaacattccctccagcgtttccagccggtcggcctctcgcggcggcttgtcccagcgcaggcggctgatccggggaaagcgcatggcaaccccggatttgtgccgcggcgagcgttgcagcccttcgaaggcgacctcgagcaccaggcccttgtccggctcatgcacgacatggcggaccgggccgaacttctcggtggtgttgcggcggacgaagcgggcgatctgcaggagctcctcgtcggtgaagccgaaataggcttttcccaccggcaccagttcgtcgccgccattgccgccggtccagacgccgaacgtgtagtccgagtaataggacgagcgcttgccgtgtccgcgctgtgcgtacatcagcacggcatcgatgatgtgcggatcgcgcttccacttccaccattggcccttcggccgccccggcagataaggcgcatcgcggcgcttcagcatcacgccttcgacggcgtcggcgtcctcgcccgcaccggcgctcgcgggatcggcgcgcgcggcagtcagcgcctcccagctcgcgaagcggacggtgggcgacagatcgatacggggatcgtcaagcttcgcaatgaaggtctccagccgttcccgccgctccgcgaagggcagctcgcgcagatcgttctcgtcgtcgccgagcaggtcgtaggcgcgcaggtggatggggaattccttgatcagcttcggcgagaccaccttgcggttcagccgctgctgcaggacgttgaagctctgcacgcggccctcgcgcaggatcagaagctcgccgtcgatggccccgggcagccgcagcgacggcacgagatccggaaagctgccggtgatgtcctcgccggtgcgcgaatagagccggcccgtgatgtggccgcggtcgtcgcggcccgccactgcctgcacgcggatgccgtcccatttccattccgcgatgtagtcggcggggtcgagcgccgcgaagtccgtgtcctcgatggcatgcgccagcatcacggggcggaacggcgcagggtcgcggttgaccggcttttcggcgcggccttccagccaggcgaacaggtcgagatagggcggcgcaaggcccggccagatcagctcgacctcatgcgggtccttgtcgccgagcgcggccgccgcggtcttggccaatcgcgcagagatgccgatgcgcaagctcccggtgacgagcttcagcagcgcccagcgtccggtttcgtcgagctcgtcgagccagcgttcgagctgctttggcagctcggtcttgccgagcgtgcgcaacgtggtgacgacttcggtgagcgttggtggcggcgggttgttgtgggcggccgatggcgccttcggccacatcagcgccacggtttccgagagatcgccgacatagtcgtagctcagcccgaacagcacctcatccgtgcgcgccgcgatcaggtcgcggatcagcgcaggcttggcgtgcttgaagctgagcgcgccagtgagcgcggcgagcgcgtagccgcgatcgggatcgctgacctcgcggaaatacccggtgatcagccgcagcttgttgttgcggccgggctcataagcgagacggtcaagcagctcggcgaagcggttcatgcctcggcctcgcctggaataggcacttcgctctcctcctcgtcgccatagccgacgaggtcgagcggctgcgctttgaggcccctgctccggcaccaatgcaccagcgcgtcttcctggccgtgagtgacccagacctcgccggcgccggtcgccccgatcgtggcggtgaggccgtcccaatcggcatggtcggagatcaccagcggcagctcgaccccgcgctgccgtgcgcgggcacgcacgcgcatccatccggacgcaaaggcggtgacgggatcgggaaagcggcgcgtccagatatccgaggtcgccgagggcggcgccagcgtgatggtaccggcgagcgccgccttcttcatgcccttcaccggcctgagctcgccgagttcgatgccgcggctctgatagtattcggtgatcttctccatggcgccatgcaggtaaatcggtgcgtcgtagccgctccggcgcagcaacgcgatcacgcgctgggccttgccgagcgaataggcgccgaccagatgcgcgcgctccggaaacagcgcgaccgaagccagcagcttcttcacctcgtccgcggcatcgccatgccggaacaccggcagtccgaacgtcgcctcggtgatgaagacgtcgcagggcacgagctcgaacggcgtgcaggtcgggtcgggcgcgtccttgtagtcgccggaggcgacgatgcaggtgtccttgcagatcaccgcgatttgcgccgagccgagcacatggcctgccgggtgaaacttcacgcagacatcgccgagccggatttcctcgccatagcggatcgcttgggtcgatccggcaaaattctcgccgtagcgcaaccgcatcatgtcgagcgtttcctgcgtcgccagtacggcgccatggccggcgcgagcatggtcggaatggccgtgggtgatcacggcccggttgaccgggcgcacaggatcgatgtggaagccgccaggcttgcagcacaggccggcagcatttggcaacaggatgtcttgcgggcgcatgtgagacatataggaagcagccgctccaaattaagccatcatgcgcgggcttgacccgcgcatccatcctcttaaagagtcctcgttttgatggattgccgggtcgggcccggcaatggcgagatagttccgaatgcccctgcgcctgttccagtcctccggcgatctcatggcggaccgccgcttcgagttcgcgcgcgacctccagctcaagggcgatctgcccgcggccgccgatgtgctggagcaggccatcgagctcgcgcccgatttcacctcggcatggttcacgctcggcgaaatccgaatgcagcttggcgaacgcgacaaggccatcgcggcgttccaggaatcgcggcggtgcgacccggaggaccagcacggcgccggcctgcatctgatccggctcggcgatgcgccgctatctgaaatgccgaaagcctatgtgcaggccctgttcgaccaatacgcgccgcgcttcgagcacgtgctggtcaacgatctcggctatcgcgcccctgcgctgatcttcaaggcggtgctggccgcgcgcgttgcggcgaagaagccggcttacttcaagcgcaccatcgatctcggctgcggcaccggccttgcggcggccgccttcgccaaacaggtcgatcatttcatcggcatcgatctgtcccccggcatgatcaaggaggcgcgtgcgacgaacctctatgccgagctcgaggtggccgacatgatcgacggtctgcgtgccaaggctgacgccagcgcgaacctcgtcgtcgccgcggatgcattcgtctatctgtccgatctcgcaccggtgctgaacgaagcgaggcgcgtgctcgtaccaggcggcgtgatcgccttcacgctggagacgcatgacggcagtgggatcgtgctcggcgcggggttgcgctatgcccactccgcggaatatgtccgcgacgccattgccagggcggatctcaaattgctgacactggagccggcttccccgcgcaacgagaacaacgagccggtgcgcggcctcgtcgtcgtcgccgagaaaacttgagtctaggcgctgaatctgcagcatttaagcgtcattgcgtcgcaaagccgcgacttcccacttgcgagcagagctgcgatgccagcacaatgcactcgctagggagaaacaaataatgacgaagaatccatcgcggcgcgatttcagcgccgctgcgctcgctaccatcgctgcctccaccttgcctgcaccttatgtctgggccgccgagaagaaatacgatgcgggcgccagcgacaccgagatcaagatcgggcagaccgtgccgcattccggccccggctcgctttatggcgtgctcggccggatcggcgaggcctatttccagatgctcaatgagaagggcggcatcaacgggcggaaaatcaagttcctcaccatggacgatgcctacagcgcgccgaaatgcgtcgaagcgactcggcgtctggtcgagcaggaagaagtgctggcgctctacggctcgctcggcaccgcgccgcagactgccgtgcacaaatacctgaactccaagggcgtgccgcagcttctgctcaacaccggcgcctcgaagtggaacaatccgaaagagttcaaatggaccatggcgggcctgccgctctatccgaccgaggcgcgcattctcgcgaggcacgtcgtcagcgtgaagccgaacgccaagatcggcatcctctaccagaacgacgatttcggccgcgacttcctggcgccgttcaagaaggtgctggccgatgccggcggcaccgctcaggtgatcatggagcagacctacgatctcaccgagccgactgtcgactcccagctgatcaatctgtcgaagtcgggcgccgacgtcttctacaacatctccaccggcaaagcctcgtcgcagtcgatccgcaaagtggccgagctcggctggaagcctctgcagctgctgtcggcggggtcgaccggccgctccatcctcagcgccgccggcctcgagaatgccgcgggcatcgtcgccatccgctacaacaaggaggtcggccttcccaaatgggagaaggaccccgacgtgatggcgttcgaggagctgcgcaagaagtacacgccggcgatcgatcccgacaataccatcgctttcgccgggtatggccaggctgcgaccatggccgagatcctgcgccgctgcggcgacgagctgacccgcgccaacgtgctgaagcatgcctcgacgctcgcgggcttccattcgccgtacttcctcgacggcgtcacctacagctacacgcccgagaactatacgccgatgaagacgctgttcatctccaccttcaccggcaaggactgggacatctccgacaaaccgatgtcggaatagtcttgcagcaccgcgcgctgctgtctctcctgctcgccaggagagacagcacgggcggcgccttgcgctaacctgcgatcgccagccgataagcccgcgtcgcattcacgccgaaagccttgtcccgcacacgcgggccaaggcccatcaagcaatcctccaacgcggtcttgatcctgccgtagcttcccgcaagcaggcacaccggccagtcggagccgaagatcagcctgtcctcgccaaagcattctgcggcgtgcgcgacgaatggaagcagccgttccgcgtcccagtcagtccagaccgcctcggtcgcgagcccagagatcttgcaccagacattgccgcaggccgccaacgccctgatgaggtcggcccattcggcgctcccgccggcggcgatcggcggcttggcggcatggtcgagcacgaagcgcgcttccggaaaggcttgcgcggttgcgatcgccgacggcagttcgcgggtgcggacgaggaaatcataggcgagatcgtgggcgaagactgccgtgaggccgcgctgaacgtcctcgcggagcaaccactcgggatcggcctcgtcatggacctggtggcggactccggccagcttgccgccgcccggcaaagcacgcagccggtcgagcgtttcgtcgagcgccccatccgtcagatcggcccagccgacgaccccgatgacggagggcgtcgcatgcgcgatgcgcaggaattcctcggtctcctccagcgcggagcggcactgcaccaggatgctggcgtcgaggccgtttgccttcagcaatggcgcgagatcggcgggcccgaaggcgcgacggatcggggcgagctcgggcgcgtccatccacggatagtcggcgcgcgccggatcccagaaatgctggtgagcgtcgatgatcatgccctacgctccgcccgggagcggcgcgcgcacatcgacgagctttcgagcgcgcagctcctgccagaacgcggcaggcaccgccttctccgtcatcgccatgttgtcggcgacctcaccggcattgcgcgcgcccatgaccgcgaccgtcacggccggatgagccatgcagaactgcagcgcggcggctttgagctcggtgccatgcttgcggcagagcgcatcgagctccagcgcacgtgcgagcagcgccgcgtcggcatcctgatagttgaacttcgcgctcgtggtgggattggccaggataccgctgttgtagaggccgccgagcaggatgcctatatgcttggcctgacatagcggaaacagtgcatcaagcgcgccctggtcgagcagcgtgtagcgcccggcgagcaggaagcagtcgaccggcacggcttccgcgaagcgaaccagcatctccgactggttcatgccggcgccgatggccttgaccgtgccgttctcgcgcagccgctgcagcgcgcggaaggcgccggtgacggcatcgtcatagtggtcgtcgggatcatgcacgagcagaacgtcgatgcggtcgaggccaagacgctcaaggctctcctcgaccgatcgcatcacgccgtcatggctgaaatcgaacaccggccgctcgcgcggcgtgcccttgtagtgctcgtcctcggcgggagcgccatccggtgctcgcagcaggcgaccgaccttcgtcgagatgacataggattcgcgcggttgttgccgaaggaacgcgccgagccgccgctccgcgaggccaaagccgtagagcggcgcggtgtcgaagaagcggacgccgagcgaccaggcccgctcgatcgtcgcttgcgcgtcagcatcgctgacgggcgagaacaatccgccgagcggggcggaaccgagaccgattgaggtgacatcgagagcgccgagccgcgaccatttcattcccattgccttccagcagtcgtccttcgaacaatcatctcccccactcgcggaaaccgcaagcgggggagatacgcaggaacgcggggctggcggcgctcctacttcagcatctgcgcgacgttgtccttggtcacgaggtcgaggccggtatagacgatctccggcaccttctcgcctttcttgatggcgagtagcgcatccatcgccttctcgcccatctcgaagggacgctgaccgatcagcgcattcgcatagccgtcgcgcagcagctcgagctgcatcttcagcgtatcggccacgaccagcgtgaacttcccggaatcgatgtccttcttgtttcgggaggcaaaggccttgaagccttcgggggcgaacatcggccagccgccgatgggaacgatcgcggcgagatcgggcgttgcggtgcgcatgtccgtcatctgctggaccgcgagcgcgggatcgtcgttgcagaaggtcggggaacccgcgacctcggtccacttcgatcccttcagcgcctcgcgcacgccgtcgacgcgctcggcgaggttcttggcgccgggaccgccggacaccatggcgtatttgccgccgtcgggccgcatcttcagcaattgcttgccgagcgcgacaccgaactccttgttgttggtgccgatataggcgatgcgcttggagccgggggcatccgcatcgaaggtgatgacgggaatgccggcggcagtcgcggcctcgatcgacttggtcatcgctgcgacatccgcgacggagatagccagaccatcgaccttctgcgtgatgaagtcctggatgatctgggcctgcgtcgccggctcgtgctcgaccggtcccttgtagatgcactcgatattgccgagctccttggcacgcttcaggcagccgtcgcgcgcgaagtcgaagaacggattgttcatcgccttgggcacgatgacgaagcggtagttcgcggcgaacgtcggcgtcgccatcatcgcaaccgcgatgcctgcaagaagaagcttcctcattatctcctccacccttgtttggtgcccgtcctttcgaatcgtccgggaagcgaacgggcggcgttttgtctgccttcccgagacgacgttagttcagctcacccgcgagcggatgcggtcgaccagcacggcgaggatgatgatcacgcccaccagcgtctgctgccagtaggagctgacctgggcgagcacgaggccgttgcggatcacctccagcagcacgcagccgacgatggccccgagcggaccaccgatgccccccgcaaggttcgcgccgccgatgacggccgccgcgatcacgttgagctcgtaggatgtcgccatgttggccggcgccgatccgagccagccggagatgatgatgccctgcaggcccgcagcaagcgcacagatcacgtagacctcgatcttcacccggaccaccgggatgccggtcagctccgccgccttctcattgccgccgagtgcgaagacgtggcggccgaacgaagtgtggtgcagcaccaccgccatcgccagcgcgagcatcacgagatagatgaacggcgccggtacgccgaacacgtcacccgaagtagctgcgtagaagtagtcggcgtccggcccacctgggaaactgccgcgtccgttggaaacgacataaccgagcccgcgcacgatcgagagcatgccgagcgtggtaacgaagggcgagaggcccagcacggcgatgcagaaaccgttgacgagaccgacgaccaacgctgcgccgaggccggcgaggaaagagaccagcaggatcaagccgggtgcgttggcgagcacggtcttgccgtccgacgccatgtgcacgaacagcgatcctgcaggcgagccgggcatcgacagctcggtcatcaccatcgaggtgatcatggccgagaagcacatcatcgagccgatcgagaggtcgatgccgccggtgatgatcacgaaggtgacgccgagcgtcgcgatggcgatgaaggagaagttcttcgccacattctgcatgttgccctgggtgaagaagtaggggctggcgaaatgcatgaccaacagcagcaccgctagcgcgagcaggacatagccggtctgcgacgcgaagagaccacgctgccaccatttgatcttgccgacattggtgaaggtgatcggggattccatgggcatggccatcacgccgcctccttcgcgccggtgatgagggcggtgacttcctcgggcgacgtctgatggatcggcttgtcggcccgcttctcgccgcggcgcatgacgatgacgcggtcgcacaccgcaaacacgtcgggcatgcggtgcgagatcagcatcaccgcaacgccctgctccttgagccgacggatcaggctgagcacctgctcgacctggcgcaccgagatggctgcggtcggctcgtccatcatgaccagccgcgcattggagagccgggtccgcgcgatcgcgacggcctggcgctggccgccggacatctgcttgacgagatcgtcgggacgcgtctccgagcgcagctcgccgaacagctccagcgcgcgcgccgccatggctttgtggtcgagcaaggcgaacggtccgaacctgcgcttcaactcgcggccgaggaagacgttggcggccgcggtcagattgtcggcgagcgcgaggtcctggtagacgacctcgatgccgacggcacgggcatcgaccggtcgattgaagtggactgcattgccggccaagcggatctcgccatggctgggccggaagttgccggcgatgatcttgaccagcgtcgacttgcccgcaccgttgtcacccatcaggccgacgacctcgccagaccggatctgcatgtcgacgtcatgcagcgcgcggatggcgccgaactccttgccgatgccggtgagctcgagcgccggtgttgcgtcaggctttgtcatcagcgggcgttcctcagacataacggttgaccagggattccatgtattcctgccggcccgagcgcggctgcggatcgaagccggggctaagcgcgcggtcggcgagatcggccagcgaacgctggccggcgagaatggccctgccctcggggcaggcccatccggcgtagcgtgttgcaagcggcgcggtgagcgtaccggcgtcgagcatgtcggcagcggcaaggaaggcgcgcgcgcaggcatccatcgagccgacatgggcatagatgagatcatcagggtcgatcgactggcggcggatcttggcatcgaaattgagcccgcccgtggtgaagccgccgcgattcaggatctcgtggaacaccagcgccagctccggcacgttcattgcgaactggtcggtgtcccagccgagcagatcgtcgccgcggttgatatcgagcgagccgaacacgccgagcgcctctgccagcgcgacctcgtggtggaaggaatggccggcgagaatggcgtggttctgctcgatgttgagcttgacgtccttgagcaggtcgtagcgttcgaggaagccgtagcaggtcgcggcgtcgaaatcatactgatgcttggtcggctccttcggcttcggctcgatcaggatcggccccttgaaaccgatcttgtgcttgtgctcgacgaccagcgagatgaagcggccgagctggtcgagttcgcgcttgagatcggtattgagcagcgtctcgtagccctctcggccgccccagagcacgtagttctggccgccgagccggtgcgtcacctccagcgcggcgcgaacttggccggcggcataggtgaatatctcggggtccgggttggtcgccgcgcctgccatgtagcggcggtgcgtgaacaagtttgcggtgccccagagcagccggaccttgctcgatgccatcttctgctcaaacaggtcggcgatggcattgagattggcgacggactcggcgagcgaagcgccttccggcgccgcatcgacatcgtggaaggtgaagaacggcacatccagcaggcggaacagttcgaaggcgacatcggccttggcgcgtgccattgccatcggatcagtgccgtgctgccaaggccggaggaaggtctcgccaccgaagggatcgccgcccggccagcacagggaatgccaatagcagaccgcgaaacgcatatggtcctccagccggcggccatgcacgaggcggtccttgtcataccagcggaaggcaggcgcgccttccgcgtccttgcctccgaaggcgacgggcgcacttacatcgaagaatttggctggcgcgttcacttaagaagactccttcaacgcgggataaagcgcacgccagcgacgataggcctcgtcataggccgcagcgacgaacgggcggggcgtgaaactcgcgaggcggcgcggacgggtgcagacgtctgctgggtcttcccccgtcgcggcgagccggccgagccgcgcagcgccgagcgcggcacccacctcgccttcctcgacccgatggacgggaatgccgagcacgtcggcgcagatctgcgcccacagcggcgagcgcgagccgccaccgacgagatcgagctcggcgatcggcccgctggccgcgctcagcgccgccagattgtcgcgcgcggcaaaggcaacgccttcgagcacggcttgcacgatctggccgcgcccggtcgcgcctcgcaggccgacgaatgcgccgcttgcggccgcgtcattgtgcggcgtgcgttcgccatcgagatagggcaggaatttgaccgggcttggtccatcgacgcgctcaccgagccgcgtcaacagcgcagcaggctgagtctccatcacgccggcaagccatgccagcgaggcggccgccgacagcatcacgcccatctgatgccagaggccgggcagcgcgtggcagaaggcatgcacggccagggccggcgctggggcgaagcgatcggtaacgcggaacaggacgcccgacgttcccagcgagaagaaggcgtcgcccggcgcaatggcgccgagcccgatcgcactggcggcattgtcgccggccccgcccgcgactgccacatttttctgcatgccccagcgctgcacgtaatccggcgcgagcaccgcgctggccgcgctgccttcgaccaggcgcggcatgtgatgcaggtcgagcccggtggcatgcagcagcagggccgaccagcggcgcaggccgacgtcgagccacaacgtgccagccgcgtccgacatatcctcgaccatctcaccggtgaggcgatagcggacataggctttcggcagcagcacctttgccaggcggtcgaagatctttggctcatgccgcgcgacccagagcagttttggtgcggtgaagccgggcatcgccagattgccggcgatcgcgtgcaacgagggacagcgccgctccagcgcgacacattcggcctgcgagcggccgtcgttccagaggatggccggacgcagcggcctgccatcctggccgagcaacgtcgcgccatgcatctgacctgacagcccgataccgcggacctgcgcaacatcgtgcggatggtgcgcggcgagatcgtcgactgcgccaacggccgcctcgacccatgcgtcgggatcctgctcggaccacagcggcgccggatgcgacagcgcaagctcgcgcgaggcggtcgcaacgactgcgccggcttcgctcacgagcaccgccttcacaccggacgtgccaatgtcgatcccgagatacacgtcatcctccctttggccggctgcggtgcgcgatcttgcgtcgctttcgcccggaacggcctgtatccaagttcccctgccgctaaggcagattgtcccgcatcacgatgtcgatcctgatcttctcctgttcgctcaagatcggctcgccgcgggcgagcgcgagcagcacgcggacggccgcgcgcgcttcatgtccgggattctgcgagatcgcggcatccatcaagccttggagcagcaatcggcgcgtcaacgcagtgacgtcgtgtccgacgaacacgaccttgtcgcgaccggtctcgctcaacgccttgtcgttcagcgccttgtcgttcagcgccttggcgacgccctgcgtgcccgcaccgacattataaaggccgacaatgtcggcatgtccgccgaacagccgtgccagcatttgctccgagcgttcgtcctcgtcgcgcccttccagcacgggcagcacgctgagatcggggaattccgtcgccatcacctggttgaagccgaagatgcgctcggcgtggtcgcgcaggccctgcgagcccgcgacgatcgcgaccttgccggacctctggccgaccagccgcccgatcagcgcgcctgcggtgcgcccggcagcgatgttgtcgatcccgacataatgatgcctgcgcgaggacggcacgtccgagaccagcgtcaccaccttggtgccggcgtcgacgagatcgttgatggcggcacgaacactggggtggtccagagccaccacggcaacgccatcgtagtcgcccgacagcgcctccagtgaggccgccagcgcggcgggctcgaacacgtcagttgcgaccatctcgaccttgaggcggcgggccgacagccaggccgccatctcgccgagataggcctcgatctgctgcatgaacgggttcggccccgacggcatcacgaacgcgaagcggcgggcgcggccgcgcgcgagctcggcggcggccacatggggctggaaggagttgcgagcgatggcttccttgacgcgccggaccgtatccgggcgtacccccggcctgttgtgcagcacgcggtcgacggtcgcgagactgacccccgcctcgcgggcgatgtccttcagcgtcagcgcagtcggtgtgagcgtgtcggccatagctgaaggctagcagaggtgttttgaggtacgcaactcattttgagggtactgaccggcttgaacctgacctgccctcggacgatttccaggaggagacagccctcacccggcgcttgcgccgacgttcccgcaagctgggagaggtcaatggcccgcgacactcgaatcaacctaagccattccgctctaggaacagcttcccccggggaccgttgccgccaagtgcgcagcgacatcacccatcattccagcgagggcctgagcccgacgctcgaacgcaacatccaggcgctggtcaagcggcggcgccgggagcagcaggcggcaagaggccaggacaaggtcgcagacgccgtcacgaccttcaccggcagcatgacgttcgtctgcctccacctcgccgtgttcgggttctggatcatcgccaacctgcactggatccccggccttccggcttgggacgagagcttcgtcgtgctggcgatgatcgcctcggtggaggcgatcttcctctccaccttcgtgctgatctcgcagaaccgcatgaccgcggccgccgacaagcgcgccgacctcgacctccagatcagcctgctcgccgagcacgagctgaccaaggttgcccgcctgctcacgcagatcgccgagcggctcgacgtcaagccggagtctgagcgcgatatggaggaagcggcgcgggacattgcgccggagcgcgtgctcgacaagatcgaggagacgcgctcctgagctaccggtgcgccggcgccgacaggtccagggtcaggaacaggctgttcggatcctcgacgtagccctcgaatggcccgcagatgacgaagccgtgcgcctgatagagcgcgtgcgccggcttgaagtagtcccacgagccggtctcgaggctgaggcgggtcatcccgcgcgcacgagcctccgtgatgatgtggcgcagcatctggctgccgaagccgcgccggcgcgtggtctgcagcgtgtgcatcgatttcacctcgccgtggtcggacgaaagcgtcttcaacgcgccggtggcgaccagcgcttcgccgtcccagccggtccagaaggcgatatcgggtgcacgcaggcccgcgagatcgagcgcatgtgcgctgcccggcgctgtctgcgcccgcgctgccgtgacgtgatgatcgagcagcgcgatcacgcggggatcataggtgtcaccggtgcggatctgcatcgtcaggtctccaggatctcacatctttccataggcggcgccgcgccgcgtgatgatgatgtagcgcgcgtcctgcctggtttcgttctcgaagatcacggcacgcatcacgtcgaaatccagacaatcgccctcgcgcagccgcaccgccttggcatcgatgtgcacggcgatcgcgccctgcagcatcaggagctgctgggtgaaggcgttgcggccccaggggctgtacggcacccgcgcgccggccggcaggtcgacgacgatgatctcgatgccgctcgccgcatccgtcggggaagcatgccgtctgcgatagccgctttcgggatcgcgccagtgcggctggtcggccagccgcaccagccgctcgggcggcttctcggccagcgcgaccacatcgctcagcgacacgtcgagcgcggcgcagagctttccaagcagcgccgccgtcgcactgctctgcgcccgctccacccggccgatcatggcccggctgacgccggagcggcccgcgagctcgttcaacgtcatgccggcctgcgtccgcagcgtcttcaggcgccggccgatcgcgcggtcgagtttctgctggtccaaggctttcatccgaacagcgaccaatacgaagacagcaccatcagggcgggagcagcttagcccgcacgcatgcaaacgccggcagctacagtccaatatattagaaacttggcgtcgcacgggagctgatccgtttgcaccaacggacttggaccctggaagcttggattcttcgggcagcttggagcgggcgaagggaatcgaaccctcgtatgcagcttgggaagctgccgttctaccattgaactacgcccgcttgcgcgcgccttgcgcccctcctgattagccgagacggcgcgtctcgccaagcgccttggcgccgcgggcgggacgcttgttaacgtcctggaaagattccaggtgcgccggattgtggcggtgttttgatttgctcttgggaggacgtgcactgagtggggcgtgtgcatggtggagcgggcttacgcgatattcgacacggcgttggggcgctgcggcatcatctggagcagcaccggcgtgatcgcggtgcagctgccggaggcgcgggaaatcgacacccgccgccggattttccaggtccatcccgaggcgcgggagcagcggccgtccgagaacgccgagcttgcgatcgagggcatcacgggcctgctgcagggcagcgatcccgatttctccgatgtcagcctggacgccggcggcgtgccgggcttcaaccagcgcgtctacgagttcgtctgcaccattccgcgcggggagacgcgcacctatgccgaagtcgccaaggcgctgggtgcctccggagcggtgtattcggtggcgcaagccatcgcgaagaatcccttcatgctgatcgtgccctgtcaccgggtgctggaagccggcaattacaccgaccggctctcgccctatggcggcgtgatctcgaagcggcggctgctggcgctcgaaggcgcccatcccctcgccagcaagactctgttcgatgttctgctgcccgttgccccgccgcgcgcctcgacctagataggcgggatggacgccaccgcgctgctgacgacgccatcgatgactgtcttcgagtttcgctgcgatgcgggaccggacgacacgccctttgaggaatgccgcaccggccattccatcgcctatgtccgttccggcagcttcggctgccattgccgcgccggcttcttcgagctggtggcgggctcgatgctgatcggcgcaccgggccaggaatatacctgcacgcatgagcacgtgtccggtgacgtctgcctgtcgttcttcctgagcgaacacctcgtcgattcgctcggcggacagcgcaaggtctggcaggtcggcgcgacgccgccgctgcccgagctgatggtgttgggcgagctcgcccagacggcagcagatggcaacagcgacatcgggctcgacgaggtcggccagatcctcgccggccgttttgttgacgtcgcctcgggcaagacccgcaagccagccacgcccaccgcccgcgatcgccgccgcgccgtggaggccgcgctgtggatcgacgacaactcgcatgccgagcttgatctcgagcaggcagcaaaacaggccggcctcagcccgtttcatttcctccggctgttctcgagcgtgctcggcgtcaccccgcatcaatatctggtgcgctcgcggctgcggcacgcggcgcggttgctcaccgacggcgacatcgcggtcacagacatcgcctatgacgtcggcttcggcgatctctccaacttcgtccgtacgtttcatcgcgctgccggcgtgtccccgacgaaattccgccaggcctcgaaaggggagcgcaagattctccaagagcggcttgccctcaactgactagcttcgtctccggcttgcgccgccgtcggcgcgctgaatcgatggagacaatcatgtacgaccacatcggacttcgcgttgccgacctcgacgccgcgacgcgcttctacaccgcagtgctggcgccgctcggctatgtcctgtgctcgagcggcgacggttatgccggcttcgggccgaagggcgagccggcgctgtggctgcacctgaacaagggccgcaaggccgacggtgcccacatcgctttccgtgccaaaaaccaagacgaggtgaaggcgtttcacagcgaagggctgaagagcggcggccgcgacaacggcggggccgggccgcgcaaggactacagtccgacctattacgcggcgttcctgatcgatcctgacggcaacaatgtcgaggcggtttgtacgtaaaggccgcaggggcacgcgcattcaccaggtgatctgccaagcagccgccgagctgcttggcggcagcaatggcagcgacatgatggcgatgatcccgcaatatcgacgcggctcgccataccggcggccccatcgccgcgacaagtcccgctagtcggctgcgcccgacagtgcaggtctgatccccggcttgcccttgcgcggtccccagcgcgtcagcaccacgctggagcatgacagaaggccgagcaccaccatcgagcttgcggcgagccagaagaagctctgcgcgctcgcgtcgtgcgtcgacagccaccagccgacgcccgcgatgtagaccagccgcgccgtctgcgccagcaccggcccgatcaccttggctgcgccttgcgaggagaaatacatcgtcgtggcaaggccgaagaaggcgtagaacggcccgaccgtggacagatattgatggctcgccgcgcgcaccgcctggctgtccgtgaacatgttgacccagaggtcggggaagatcgcaacgaggcaggccggcgcgccgaccgccacgaatgcggcagcactggcggtccaggcgatgcgccgggcgcgcgcgatacggcccgcgccaatcgccatgccaaccatcggcacacaggcgatgccgaacgcgaacgcgatcgaggtcagcaaaaattcgagccgcgccccgatgccgtagccggcgaggaccgcggtgccgaacttcgccagcatgtgggtgaagatcgagatcgtcagaaccgattgcagcggcgagaagcaggcgatggcgccgaccttgaggatgtcgaagaacatcgcccattgaatgcgcaggccgcgcagcctcattacgatccgcgcccggccagagaaaaggtaccagcccatgatgcagatgttcatggaataggcgatcagcgccccggcggcgacgccgtgcatgccgaggcgcggcacaggtccgagcccgaggcccagcgtgccgccgagcacgatttgccaagccgccgaattgaggatgaggaaggacggcagcttcatgttgccggtgccgcgcaagacgccggccatggtgttgagcagccagggcagaacggcgccgccgaaaaacacctgcgtgtaggcgatcgcatgcgtcagcacatcgccgcggccgccaagcatttcgagcaccttgggtccgaagatcagcatgccgagcatgaagacgaggccgaagctgacgccgatcagcagcgcatggaccgcgagcgtgccggcgcgctcgcggttcccggcgccgagcgcgcgcgcgatggccgaggccaccgcaccgcccatggccccgcccgacatggtcatggtcagaatgatggtcggaaacaccagcgccatcgccgccagcgcctcgacgccgagccggccgacataggaggtttccgcaatcaccacgcagatgccggcggacaggccgatcacgttcggccaggcgagtgagagcagcgtgcgcaggatcgggccgtcggtcagcgcgctcctgatcggcggcggaggtggcggcaacgggcgttcttgctcatcgaccgggatctcggcgatgtcggacatgtcctctcccgggcaccacttgcggcgcagtaatgaacaggtgtgccaataatctgcttgcgcgcggtgcgcggcacgggcttgttagcacggctcgccaagattcctcctgcgcagtgcgcaagcatgccctgcgacagtgcatttccatgtgagattactggatcgtccacaccagcggcggacgcccgccgacggaaggccgcaggtgcacgccgatgtgccgcccgcatcccgcagccagcccctcgaacaatccttcaagcacttccgcgcaggcggggtgatagtcggcgacgtcgtccatcagcttccagctctgctggcggatttcgaacgtaccctcggactgtgtggtctcggccacgtcatcctgcgcagcgaacagcgcattcaggaacgatgcgaactcgtgtgcgccaccgcggcgcatcgtcagagctgctgcgacctcatcgaaatattgcatgccgaccagcttccccgtgaggtgcaggagatacccgccatcttccggaccaaacagctgcaccagcacgggcgccgccgtgcggacgtattccattgcatagttgcgataggccttctccagacgcggcttcggccagctcgcgacaggcagcgccggggcactgttcgcgtcgaacagcggcgcttcgaggtgacgcgcgaagacgagccgctggtcgacctcgagcggatggtcgtattgatgataataaccttcgagcccgtcctgtccgtcgacgctctgcttggtgcagacgaagcccagacgcagatcgccgagggcgacgccgttgttggcgtgccagccgcgcaacatcgcccgcgacacctcgccggggatgccgcagatcgcagtgcctttccagatccagcgtggcggcgggtagcggatccaggctttggtgtcgctctcatacatgtactcgacatgcacgccgccgatccagttggagagatagtgatattgcgcagcggccaccgccggcggcagatggtcgaggccgagcttctcgagacccggcaggaagcgttcctgctgctgacggcggaacacgcggaagacgaattcagctgcatccgcggtgccgcgccgcgtgaccacggtgaggatcagaccggtaaagtaagcgtggtagagatcggcgatcgcgcgccagcgcttccattgggtttcctgcgctgtatctgatgcggcggtcatgttcactcccgatcctggttttgatcgagtgtgtcaccgcgcccggtggcaggcaacatgaggcgcatgcaggccgccctgcactgcacgccgccaattccgcatcacgaattttgtgcagccttggccgctcgctcgcgctcggtgcgttcggtgacgtcccgcgccatcgccgctgatcccagcacgttgccgccggaatcacgcaccagcgcgaaggtcatctcgatgtagagcttgcgcccgctcttgtgcagcgcgcgggtcagggtcggcttgcctgcaagcttcgtggtgccgctcgcaagcgcggcctcgaaacccttccagtgcgcggctcgaagatgttcgggaatgatcagatcgagattctggccgagcgcttcggcggcggagaagccaaacagcacggtcgaagcacgattccagcgcgtgatcgtgccggagcgatccgaatagatcagcgcgtccgcaacgtcttcgatgatacgtatgtcgagatcggatggattgctcatctcgtcacctcgcatgcagcctggatggagcgcagcgcaatctgggttttctcggcgagagttcccggatcacacgagcgctccatccgggcgacaggatgcagctacgcccgaaaatgcttcgatagtttaaggccctgagcctggtagttcgagccgatgcgctggccgtacatggcgtccggacgggccagcatcttctcatagacgaggcggccgacgatctggccgtgctcgaggatgaacggaacttcgcgcgagcgaacctccagcacggcgcgtgcgccctgtccgcctgcgccggcatagccgaagccgggatcgaagaatccggcatagtgcacgcggaactcgcctaccaagggatcgaacggcaccatctccgcggcgtaatcgggcggcacctgcaccgcctctttcgaggccagaatgtagaactcgccagggtcgaggatcaggctgccgtcgggacgcgccgagatcggctcccagaattcttccaccgcataaccggagcgacgatcgacgtcgacgacgccggtatggcgcttggcgcggtagccgacgaagccgccgcccttctcgccggagagatcgacggagacggcgacgccgcccgagagatcggcatcgtcgacgtcgacgagacgctcggcggcatgcagcgcatcgagttcgtcggcgttgaggatggcgtcaccggtgcggaagcgcacttggctcaggcgcgagccctcgcgcaccaacaccggaaacgtcttggggctgatctcggcatagagcggaccatgatagccggcgccgatcatgtcgaaacggcgggtgccgtcggcgatcacgcgagtgaagacgtcgagccggccggtggagctctttgggttggcggccgcgacgatctccggcggcagcgccaggctctccagcagcggcacgatgtagacgcagttggtctcaagcactgcgccgtcggcgaggctgaactcgtgcagcttcaactcgtcgatgcgttcggcaaccgtggcaccagggcccggcaggaagctggcgcgaacgcgataagcgatatcaccaaggcgcagatcgaggctcgccggctggatctggctttcgacgaagtcgtacgccggcaaaatgagccccgcttccgccatcgccgcgatcatgcggtcgggcaggataccattggcgtcggcggcgaccgtgaacgtcaaccgggggtcctcatcaggggtctgtcgcatcccgacatgcgggacatgccggccgtttacggctagccgatggacgccttgacggaaagggcgttgcggaatatgagcatcacttatcccgtggtgatttgagccggccggcttgcagccacgttaaataagtcgctaaacaggccggggacctctgtgatcccggcccgtggagatatccaggccggtttttttgtgaccatttgcgcgtcgatggtcatgtcggagggtccaatgtcaaagtcgcctgctgcctaccgtcccgaaacccgcctggtccattccgggaccctgcgctcgcaatatggcgagacgtccgaggcgctgttcctgacacaaggctacgtctacaacagcgctgaggagtgcgaggcgcggttcaagggcgaggatcccggcttcatctattcgcgctactccaaccccaccgtcgcgatgttcgagcgccgcatgatcgagctcgagggcgccgaggctgcccgctcggcggcgaccggcatggccgcggtgacgaccgcgatcctggcgccgctgagggcgggcgatcacgtggtggcctcgcgcgcgctgttcggctcgtgcctctacgtcatccaggacctgttgccgcgctacgggatcgagaccacgctggtcgatgggctcgacctcgaccaatggcagcgtgcacttcggccgaacaccaagacgttcttccttgagagcccgaccaatccgacgctcgacgtgctcgacattccctccatcgccgagatcgcacacggaggcggcgcacggctcgtggtcgacaacgtgttcgcgaccccgatctggcagagtccgctggcgctgggcgccgacgtcgtcgtctattccgcgaccaagcatatcgacggccagggccgctgcctcggcggcatcatcctgtcctcggaggccttcatcgccgagcacatccacaacttcatgcgccagaccggcccgtcgatctcgccgttcaacgcctgggtcctgctcaagggtctcgagacgctcggcgtgcgcgtgcgcgcgcagaccgataccgctgcgcgcatcgcggaggtgctggcgagccatccgaagatttcgcggctcgtctatcccggccgctccgatcatccgcaggcagcactggtcaagaagcaaatgcgcggcggctcgacgctggtcggcttcgaggtcaagggcggcaaggcggctgccttccgcgtcctcaatgaactgaggcttgcgaagatctccaacaatctcggcgacgccaagagcctcgtcacgcatccggcgacgacgacacaccaacgcctgaagccggaagaccgcgccgctctcggcatcagcgaaggcttcatccgcttctcggccgggctggagcatcccgacgatctgatcgaggatctgacggcggcgctggcgaaggcgtgaatagcgaatggcggagagtgattggcgaataggtcgatctattcgctactcgccattccctattcgccttctcacatcggccggtatgtcctcacgtccgcgggcacgttcacaccgagcttgatctggtcgacggaccggatgatgtcgtcacccaatagctgggcgaagcaggcatagccccaatcgttcatgtgcaggccgtcggcgatgacgaagccctcgaccggaatcgcctgcttctcgtgccaatcgcgcatcacctcgaagcgcgggaagatgcccacgtgacggagctcggcggccttgccgagcagcttcaccatcttgccggcgctctcggcgcgctgattgacggccggcgaatattgcggatcgaccagcacgatgtcggtgccgccggcggcctggatgcggctgatgccctcctcgaccagcttcacggtgtcgccgggatcgagattgcgcagcacggcgttggtgccgacctgccagatcacgagatccggatgcacgtcgatcacctgcgtctggaggcgcttcatcatctcgggggcatcctcgccgccgacgccggcattgatgaccgtgatgtcggcggtcgggtagtgccggcgcagctgcgcggcgagacgattgggatagttgaactccggcgagctcgcgccgaacccttgggtcgacgacgagccgaacgcgacgataacgacggactggccggcggcgagcttgcccgcaacgtgcggcagcgagcccatcgtcttcgaaccgcccttcggcggcaggcatggcacacggttgaagatgtcggcggccgactttgcgacctccttcaccttgtcgatggcacgcgaggtgacgccgcgctgctcggacgacctcgcggcaacggtggtctgggcaggcgaagcggaagtcggatcagccggctgcgccggtgtcggctgtgcggctggcgtctgagcgtatgcggccggcgccagcagcaacagcgctgcggctgcgggcgcggccagccatgtcgtcaggcaaaaagggcggagagaactcattaacgctagacctcaattttgctgctgggccggctcgcggtgagctgcgtcgatcacgaattgtgccaacgcccggccaaggcaatcatggacctgtttcgccagttcgggcccgcgggacgggctgaacaggtcgaactgaccctgatcattccactgccgcatgattgcgaaacgatcgaacagcgggatgtcgtgctcctgtgccacgacccgcatattatcgagaaaaggctgggccgaaatcatggtttcggtccgtggactgtactgcaagttcatcaagacgacgtcagtccccgcactttgcaatgcaacaacgccttcggtgacggcgctgcgaaagtcgtcgggatcgatggctcgaatagcatccacggtcccggtctgccagatcaccaaggtaggcgtttttgcttccatcagcttaacgaaggtggcggcggtctcctctgccgttttcttgctctgtatttctacggagacatgcaccacttccgacggcggcagcttctccttgaggatcgcctccatgcgcgcggggtacgagctgttctccgaagatggaatggtcgtcgagcggctgcctatgacgaggatctcgagcggcttgccagccttgacggcggcggcgaccttgggcagcgggctttcgctggtcagcagataggccggcaaatcacacgaagcgggcgcaacggaagccgtgggcgcagcatcgctcgctcgcgccgtcggcgcggtgaggctaccgcaaagcaggatcaggctcaggagaaccttcgccttcatcagccccctcccgccagatcggcgttgccgacggcgtttttgcttttcgcaccgctcttgtcagccacgcgcttataccacgaaatcacccacgccacgccccacatgatcaggacaccgcagagactaatcaaagcatgcatgactgcgccaccggagacttccgccaggatgaagtggccggcgaaggccaggaagacgccgaggcagaagatctcgagcgaatgctgaccgcacaggatcagcggccgcagccaaggcgacttcaggcccggccaatcccgcggcaggaaacgcacggtgagcgcggccagcgccaggaaatgcgtgaagcgcaaaacgtcgagatctgtcttgttgatcggatacatccattgctcgatcagcttcggcatgaactgggagagctgcggcacataccaggtcaacgtcacgtagaacgacgcgacgagataggcgatcgccatccacatcgtgacgcgtgacgacagaatgcgcgacatgcggcgcgcacctccgagcgcacaccatgcaccgaagacgaacagcaattgccaggcaaagggattgaaggcccagaatccgttcggataggccgacagataaagatcgaactcccaggtcactgcgtagagcacgaccgagaggccgagcgtgacgtcgggccgccacttcatcgaccagaggataaagggcagcgccagcatcagtacgatgtagagcggcagcacgtccatgttgacgggacggaaacgcaaaagcagcgcctgcacgatggtgacgtcgggctgcttgaggaagtccatgatgcccatctcttcggtatagagcgggttctcgaagcgggtcgccacataggagatttcggcgaggaagatcgtgaacaggaagacgtgggcgacgtagatctgccagacgcggcgcaggatacgcgcggtggcgatgacgacgccgctctccagcatcgcccggccgtagacgaaggcggcggtatagccggaaatgaagatgaagatctcggtagcgtcgctgaatccgtaattgcggatcgtgaaccaggtcagcagactgggcggcaggtggtcgacgaagatcagccacaaggcgagtccgcgaaacagatcgagccggagctcgcgctcgccgatggccggcagcgtaatggcgggtacggcggtgcgtggcttggccgccgcgggcttggggccagcggcgcccgcgatcgtcggtcccgtcacttggtcggcaatggtcatcgggggcaaaaaacccttcccgcaaatcgcgacgttgacggaatgtagcggtccggcggccgtctcgcaaagcggccggacccacatcaggaggtcactgtgggtgtccttcccttccaaatctggccggacgatgtcgccgaagccgcctggggcgtttggttcccgggacggatttcggtatgatgcagccatgtaccgcgccgtgacccgccagatcgaagtgaccgtcgagccgaactttgttccggagcagtcgtcggcggaccgctcacgctatttctggtcctaccccatcgtgatcaccaattcgggcgaggagaaggtgcagctcaagacgcggcactggatcatcaccgatgcctccggccgccaacaggaggtaaagggggagggcgtggtcggcgagcaaccgatcctggcccccggcgagcgcttcgaatacacctccggcgtgccgctctcgaccgcctccggtttcatgaccggtcggtaccagatggtcagcgaaaccggcgagcgcttcgaaatcgacgtaccgacattttcgctggacagccccgacaacaagcgggtgttgaactgaggacgggcgcagcgaagccgtccagaccgccaccgcgcaaagacgcgggattgcttcgcggagcctgtcaccaggccgcgcttcgcgcggaccggttggcgcgcaatgacggaggataggattaagcgtcctcgacgcccgcctcgtgcggcgtgaactggtagaccgacgagcagaactcgcaggtgacgacgaccctgtcgtccttcaccatcgcggcgcggtcgtcgggcgagaagctcttcagcatcgaggcaaccgcatcgcgcgagcaggagcaccgggcctgaaggacctgcggattgaacacgcgcacgccgcgctcgtggaagagacggtagagcaaccgctcgccggagagctcgggatcgatcaactcgatgtcttcgacggtttcgatcagcgagcgcgcctcgacccaggcgtcgtcttcggcgacgctgtgcacctcggtaccgtcaggggcatcgccgggatgcagatcggcctgccgggcacgctcgggggccttgggcagaaactgcatcaacatgccgccggcgcgccagcgatgcttgccgccgtcgctcgagcgccactcctcgccgactgcgaggcggacgcgcgtcgggatctgctcggagcgcaggaaatattcatgcgcggcgtcttccaggctgccgccgtcgagcgcgaccagtccctggtagcggctcatgtcggggccctggtcgatggtcatggcgagatggccgcggccaagcagcgtgccggaatccttggcttcgccgagacgcgcggcatcgaagcgcgcataggcgcgcaggcgatccggcgccacgtaatcgacgaccaggaacgagaccggaccatcggtctgggcctgcaggatgaagcggccctcgaatttaagcgcgctgccgagcagcgtcgtcagcatgatggcctcgccgagcagcttgccgaccggcgccggataatcgtgcttggtgagaatgtcgtcgagcgccgggccgagccgtaccagccgcccgcgcacgtcgagcgcgtcgacctcgtaaggcagcaccgcgtcgtcgatcggaacggccgatggtgcgcgaaccggaccttccggcccggttttcatgtcaggggattgggaaaccatggcgcactatttggggtcggaggcggaaaatggaaggggaacgccggcattccgtcgtcctcacgggccgcgtagcccgggtatccggggagatcgtttcacgagttgagaaccccggatttcgctgcgcttcatccggactccaagcaagcttatttcaccgcgtcaaagcaccaggccagaatgcccttctgcgcatgcaggcggttttcggcctcgtcgaacacgaccgattgcgggccgtcgatcacttcatcggtgacctcctcgccgcgatgggcaggcaggcagtgcatgaacagcgcgtccggcttggccagcgacatcagcttggcgttgacctggtacggcttcagcacgttgtggcggtgctcgccttccttgtcgcccatcgacacccaggtgtcggtgacgacgcagtcggcgccgcgcacggcggcttccggatcggtgccgagcacgatcggcgcgccggtcgccttgatccagtcccgcatcgccttcttcggtgcgagctcggaaggtgttgcgacgttgagctggaacttgaagcgttctgcggcatgcgcccaggacgccagcacgttgttgtcgtcaccggtccaggccaccgtcctgccctcgatcgggccgcgatgctcctcataggtcatgaggtcggccatcacctggcaaggatgcgagcgccgcgtcaggccgttgatgacgggcacggtggcgttggccgcaagctccagcagcgcatcgtgattgaggatgcggatcatgatcgcatcgacatagcgcgacagcacgcgcgcggtgtcggcgatggtctcgccgcggccgagctgcatctcggcgccggtgagcatgatcgcttcgccgccgagctggcgcatgccgacgtcgaacgagacgcgcgtgcgggtcgagggacgctcgaagatcatcgccagcgtcttgccttcgagcggcctgaccggctgatgcgccttctgcttggccttcatggcggaggatgcggcgagcatgcgcttgagctccgacaacggcagctcgttgatgtccaagaagtgcttaggagctttgtcgggcgtcttgctcatcagcttgccgcccgcttggtctggctggacgagatcgcagcgcaggcgcgttcgagccgcccgacactgtcctcgatctcggcctcggtgacgatcagcggaggcaggaagcgcactacgttgtcgccggccccgacggtgagcaatttttcagcacgcagcgccgcgacgagatcgcccgaaggcaccacggccttgatgccgaccaaaaggccctcgccgcgtacctcgctgacgacatcggggtgccggtcgatcacggaggcgagcttctgcttgagcagcagcgacatcttctgcacgtggtcgaagaagccgggcttgagcatgacatcgagcacggcattggccgcggcgatcgcgagcggattgccgccgaaggtcgaaccgtgcgagccgggccccatgccggcggccgcgtccgcggtcgcgagcaccgcgccgatcgggaagccgccgcccagcgccttcgccagcgacattacgtcgggcacgacaccggtgcgcttgtaggcgaagagctcgccggtgcggcccatgccggtctgcacttcgtcgaaggcgagcagcaggccgtgctcgttgcagagctcgcgcagcgccttgaggaaggcgggagacgacgaacgaacgccaccctcgccctggatcggctcgatcaggatgcccgcggtgtgtgggccgatcgccttcttcacggcttccaggtcgccatgcggcacctggtcgaagccttccatcggcggaccgaagccctccagatattttgcagatccggtggcggcgagcgtcgccagcgtgcggccatggaaggcgccctcgaaggtgatcatgcgataacgatcaggatgccccttggagaagtgatggtggcgcaccagcttgatcacgccttccagcgcctcggcgccggaattgcagaagaacacgaagtccgcaaagctctcgttgcagagccggcttgcgagcttctcgccgtccgggctctggaacaggttcgacatgtgccagagcttcgtcgcctgctcctgcaacgccttgaccagcgccggatgaacatggccgagcgcattcaccgccacgcccgaggtgaaatcgagatagcgatctccgttggtcgcgatcagccagcagccttcaccgcgctcgaaaccgaggtcggccctggcgaaaacggggagcaaatgcggcgcggcgctgttagtcatgacgtcacttgaatgttgcggacggtgtgacgcatgcattgcgcaacgcaccattgaccggcccggaaaacgaaacgtgccgccttttaagggcggcacgtgggactatcttatgcttggcaagacgtgtgtcaatgccgcccgaaagccccgcgaaacgctgaatccgtagtcttgcggtgccgattttgcgggattttcaccacggaacatgtggacgcgagtcggcggactcttgcgcgggagtcacgccatattgtagcgtttggactgtcagatacgacatctcgtgcaacagttctgatcccaagagtcctcatgtaccggcgtaaacgttcgggcgtcttgagcgcgcccggcgagccttaagggattctggcggcacgggtttttcaaggcttaagcattcgctgtgaaggccccaggacggcaggcgcgcagcgagggaaagggtgcaatgacggttttgacctggtccgatgatcgcgtcgagcagctgaagaagctctgggaggccggactttcggccagccagatcgcggcggagctcggcaatgtgacccgcaatgccgtgatcggcaaagtgcaccggctcggcctgtccggccgcgccaagagcccttcatcggcagcgccccggccgcgcaaggcacggcccgcgcagcacatgatgcgagtcactcgccccgtcgcgcgcggcaacaccgcgctggcgcaggccttcgaggtcgaggttgaggctgaacctgttacctacgacaacgtggtgccgatgagccaacggctgtcgctactggaattgaacgaggcgacctgtcactggccggtcggcgatccctcgagcccggatttcttcttctgcggcggcaaggcgctttccggcctgccctactgcgcccagcattcgcgcgtggcgtatcagcccgcagcagaccgccggcgcgcgccggcgaagccgggcacgcgctgagtttgtcgatctacctgatggcagccgcgacgcgatcacggctccagtaactcggtgtcatccccgcctggtgcgcgattgcgcgcgaggggcggggatccgtagccacagcgcgcaattgtcgcgcgagatggtcactccgagtcttcgtcaaagcacgttctgtggttatggacccgggctcgcgctgcgcgcgtcccgggatggcggccaagatcattgccgcatctcgcgaaaccaacactcgccagtttagagctttacgtctgctccgccttggcgaaccgatcatccagcgcgtagccggcgccgcggaccgtgcggatcgggtcctgctcgcgacccagattgagcagcttgcgcaggcgcccgatatggacgtcgacggtgcgctcgtcgatgtagatgtcgcggccccagacgctgtcgagcagctgttcgcgcgagaacacgcggccgggatgctccaggaagaactcaagcaggcgatattctgtcgggccgagatcgatcggccggcccgagcgcgccacgcggcgcttgtcgcggtcgagctcgatgtcgccataggcgagcaccgtcgcgagccgctcggggctcgcgcgccgcagaagccccttcacgcgcgcgagcagctccggcaccgagaacggcttgacgatgtagtcgtcggcgccggtcgcaagcccccgcacccgctcgctctcctcgccgcgcgcggtgagcatgatgatcgggagctgcttggtctcgggccgcgtgcgcagccgccggcacagctcgatgcccgatagcccaggcagcatccagtcgagcacgatcagatcgggaatgtgctccttgaggcgggtatcggcatcgtcgccgcgcatcaccgtctcgacgtcatagccgtcgccttcgaggttgtagcggagaagctcggtgagagcttcctcgtcctcaaccaccataatgcgtgcgcccatggtgtcgtcgctccttacgtcttcaggtattcggtatcgtggtggcgaaattggtcatgtcgcccttcggccgcttgtcggtgatcgcctgcccctcgatcatgtagaacacggtctcggcgatgttggtggcgtggtcgccgatccgctcgatgttcttggcgcagaacatcagatggatgcagaacgagatgttgcgcggatcctccatcatataggtgaggagctcgcggaacagcgaggtgcagatcgcgtcgacctcctcgtcgcccttccacaccgccattgccgccggcagatcgtgcgcggcgtaggcgtccagcaccgacttgacctgctgctgcaccaggtcggtcatgtgttccaggccgcggaacagcttcagcggatggaaatccgtctccagcgccgcgacgcgcttgcccatgttcttggcgagatcgccgatgcgctcgagatcggtcgcgacgcgcatggcgccgacgatctcgcgcaggtcaaccgccatcggctggcggcgcgcgatggtgagcaccgcgcgctcctcgatgcgcttctgcagcgcatcgagctcggtgtcggtggcgacgacgcgctggccgagcgcgacgtcgcggcggatcagcgcgtcgacggaatcgacgatcatgcgctcggcgatgccgcccatttcggcaaccaggcgcgtgagctcctggaggtcgctgtcgaaggcctttgcggtatgttcagaacccatgttccgtctcctcagccgaaccggccggtgatgtaatcctgcgtgcgccggtcgctcggcgacgtgaagatcttgctggtatcgtcgaactcgatcagctcgccgagatacatgaacgcggtcttgtccgagacgcgcgccgcttgctgcatgttgtgggtgacgatcgcgatcgtgtagttctcggacaattcctggatcagttcctcaaccttcgccgtcgagatcggatcgagcgccgagcagggctcgtcgaacaggatcacctcgggccggaccgcgacggtgcgagcgatgcagaggcgctgctgctggccgccggaaagcgacaggccggaagcattgagcttgtccttgacctcgttccacagcgcgccgccacgcaacgccttctcgacgcggtcgtccatctcggacttcgagatcttctcgtacagacgaatgccgaacgcgatgttctcgtagatcgtcatcgggaacggggtcggcttctggaacaccatgccgacccgggcgcgcagcagattgagatcaagcttggggtcgagaatgttggtgtggtcgagcagcagctgaccggtggcgcgctggcccggatagagatcgtacatccggttgaagatgcgcagcagggtcgacttgccgcagccggacgggccgatgaaggccgtgacgcggttggtgccgagcgccagattgatgttcttcaatgcatggtgctcaccgtagtagaagttgaggttgcgcgccgtaaccttggcgggcgcctcgggcaggggctgcgagccgggatggacggtcggcgcgctgacggaaacagacatttcactcattttgcagtcctctcggcgccgatgatgcgcgcgccaatgttcagggcaagcacggtcagggtgatcagcagcgcgccgctccaggcgagctgcttccagtaggcgtaggggctctgcacgaaattgttgatggtcaccggcaggttggccatggtcttgtccaggcccaggctgaagaactggttcgagagcgcggtgaacagcagcggcgccgtctcgccggcaacgcgggcggtggcgagcagcacgccggtgatgaggccggaacgcgcggcgcgataggcgatccgcttgatcaccagcgagcgcggcaggcccagtgcgctggcggcctcacgcagcgggttgggaaccagcagcagcatgtcttccgtggtgcgcaccacgaccgggatcacgatgacggcgagcgccagcgcgcccgcgatcgccgagaagcctcgcatcggcaccaccaccgcgccgtagatgaacagaccaatgatgatcgagggcgccgacaacaaaatgtcgttgatgaagcggatcaccgaggtcagcttgtcgttgcggccgtactcggcgagataggtgccggcgaataggccgagcggcgcgccgatgccgacgccgatcgcggtcatgatcagcgagccgacgatagcgttgcgcaggccgccctcggtcgatccgggcggcggggtgtcagcggtgaagacctggaagttgagcccggccaggccgttgtagaacagcgtgatcaggatcagcgcgagccaggtgacgccaaacgcggcagcagcgatgcagagcccgcggatgacgatgtcccagcggcggcgacgtgcatagatcgggttcatggctttacttcccggccttggtttccaggcgcatcagcatcagccgcgcggctgcgagcacgaagaacgtcaacacgaacaggagcagaccgagaaggatcaggccggactggtgcaggccgtcgctctcggcgaactccgacgcgatcgccgccgagatcgtggtgcccggggcgaagatcgacgatgagatgcggaacgaattgcctatgatgaaggtcaccgccatggtttcgccgagcgcgcggcccagcgccagcatgacgccgccaatgatgccgacgcgggtgtaggggatcaccacgctgcggacgacttcccaggtggtgcagccgacgccataggcggcttccttcaagaccggcggcaccgtcttgaacacgtcgaccgagatcgaggtgatgaagggcagcaccatgatcgcgaggatcagcgcggcgttgaacaggctgagataggaggggggcccggcaaagatcgcgcccagcacagggacgccgtcgaagaccttgatcatgaagggctggaaggtgttggccaggaacggcccgagcacgaagaagccccacatgccgtagatgatcgagggaatgccggcgagcagctcgaccgccatgccgatcgggcggcgcagccattgcggacagagctcggtgaggaagatcgcaatgccgaggccgaccggaatggcgatcagcatggcgatgaaggaggtgatgagcgttccgtagatcggcccgagcgcgcccagcaccggaggatcggcggacggtgcccagcgctgcgtccacaggaaggagaggccgtactccttcatcgcgggaaaggcgccgacgaccagcgaaaggatgatgccgccgaggatcagcagcaccgagatcgcggaaagccgcgtgatccaatagaaagtgacgtcgccgagcttgaacgcgcccaaggccttggcgcgatcatacggtccggcatcgtcgattacatcgctctgaacggccatctctgccacgccgatcccctgttttgctcacgccagctgcatgccgccaaaggcggtcgttttcgacagcttgcccgcgtcgttccgggattgtcttgaaggggacccggaatcctgaagattccgggccgctcgtccactcgcgcccgccgcgaggcggagcgcgagttcagtacgctgcaatcagctcttgatctcggcagcccacgtcttctcgatctgcttcacgacagtgtcgggcatcgggatgtagtcgagctcctcggccatcttgtcgcccttctcgaacgcccacttgaagaacttgagggcttcctgggaggccgccttgtcggtcgcatccttgtgcatcaggatgaaggtcgcgccggtaatcggccaagacgcttcacccggctggtcggtcaggatcacatagtagttcttggagccggcccagtcggcgttggcggctgcagcctggaaggccgcaacggtcggctgcacggtctttccggacttgttgatcagggcaccgtaggtcagcttgttttgcttggcataggcatactcgacatagccgatcgagttcttggtctggctgacattgcccgcgacgccttcattgcctttggcgccaacgcccgtcggccattcgaccgcggtaccggcaccgaccttcgtcttccactcggcattggtcttggaaaggaaatcggtccagatgaacgtggtgccggaaccgtccgaccgacgcacgacggtgatggcgtccgaggggagcttcaccttgggattaagcttggcgatcgccgggtcattccaagtcttgaccttgcccagatagatgtcgcccagcagctcgccggaaaacaccagctcgcccgacttgatcccttcgagattgacgaccggcaccagggcacccatcgcctgcggccattggatcattccgtccttttcaagctgctcgggcttgagaggcatatcgctcgcgccgaaggtcacggtcttggcctggatctgcttgatgccgccgcccgaaccgatcgactggtagttcagaccgttgccggtctcctttttgtaggcgtcagcccacttggaatagagcgggaacgggaacgtcgcgccggcgccggtgatgtcggccgcgaaggcggccgtcgtcgatgcggctaccaagccagcagcgaccatagttttgaggaaattcatgctggtctccatacaggggagcgaagcgccatccgcgcccgatcgcgctccccgcgccgcccgtttaggagcggtcggctgtgcttttacgaaggtttcatgacagttggatgacgcaaccaagcatttggattcgcttggtttttaggccgcggccgaaatcttcgcctggggaaaacacgccgtgaaagttgcaccctgcttgggcacgctttcgatcaaaagccggccgcgatggcggttaagaatatgtttcaccagcgataatccgagcccggtaccgccttgcgagcggctgtcgccgacgtccacccgatagaagcgctcggtcagccgcggcaggtgctcgggcgcgataccggggccgaaatcgcgtaccatgatccggatttcctgagttccatcagaggcggcgcctgatgtcagcgacacgatgacgcgcccgccggaggcgccgtatttgagcgcgttctcgatcaggttctcaaacaggcggagcagctcctcgcggtcgccggcgatcatcaccggcggatccggcagctggatttccaccacgacctggcgctcgcgggccagcggctcgagcccgtcggcgacctggcggatgatcggcacgaggtcgaccagggtgtcgggccggacatgggccgacagctcgacccgcgacagcgacagcaaatcgtcgatcaggcgcgccatgcgggtggcctggttgtgcatgatgccgaggaagcgctcgcgcgccttggggtcgtccttggcctggccctgcagcgtgtcgatgaagcccgacaatgcggccagcggcgtacgcagctcgtggctcgcattggcgacgaagtcggcgcgcatctcctccacccggcgcagcggcgtctggtcgtggaaggtcatcagcatgcatttgtcggtaccgccgaagctggtcggaaccggcaccggcgtgatcatgagctccatccagcgatcgaccggaacatggtcgagataggtcgcgcgccgcggctcggtggtcgcgatcgcctcgcgcagtgccgtgatgatctccggcgagcgcagcgcgaactgggcgagctcgttccgacgcagcgccggggcgagctgagcggcggcggcattgaggtggatgacgcgaccggcgcggtcgagcagcacagccggatccggcatgccggcgaccaccgcggccaccgccgcgctctcgaccgggttgatgcgcctgacgtcgtcccgggaagcggcgggatcgtgcagccgccaggggatcagggcagccgccgcgatgcagaggaacacgatcgcggcgtgcagtgccgacaattcgccgagcgagaccacgactgacagcgccagcgccgcggcgatgaggatgatggtcgagtgccgcagccggtccgaccatggctgaacgttgggagaagatggggcgtcgatcgccatcgggacgggcttctcctggaggacttgtcctggggcttgcgccggtcaggcaccgctgtcgctacgctctctcacataggcggcttcacgcgccgggccggggtcgagcttgagtgccgcctgctgcaagcgcttcgaacgtgtgccgattataacttcgcgaaacgtcagcaagattacagatatgacgaagggcgacacataatagaggaggcggaacagcagcattccgcccagcagctcctcccggtccatctgccagaggccgaccagcatggcggcgtcgaacacgccaaggcctcccggcgaatggctggcaaagccgagcagggtcgccgagacgaagatcatcgcgaccacgacgaaaccgagattgggctcgtccgggaccagcacgtacatggcgagcgcacaaaagccgagatcgatgatgccgattgcgatctggagcagcgtcagggggccgcccggcagcaccacggtccaggggccgcggccgaccacccgcggctgggtccagacccagaccacgtagcagaccagcgccgcgatgatcatcagcgccagcgtccgattcagccagggcggaagctggtcgatcgaggctgcagcctccggatggtaggcgatgccgagcccgagcacggcggcgttgccgagccagaaggtgaggccggcgaggaagcagatcttggcgacgtcgatcgcgttcagtccataggccgaatagatgcgatagcgcaccgcgccgccggtgaagacggatgcgccgacattgtgaccgatcgagtagctggtgaaggccgcgagcgcggtgatccggtagggcacctgggcgtggccgatcgcgcgcgtggcgaacaggtcgtagaaggtcagggtgaaatagcccgcagcgacgaacagcgccgccatcgcaatctggctcggctcggtgctcttgatcgcttcgaggacctcgttgaaatcgatgccccgcagcatgtggtagagcacatagcaagcgatcccgatgaccgcgatgctgatcacaacgccaagcttatgcaggacttgcttctcgcgcagaaacgacgtcgccctgcgtatggcttccagcatctagacctcgaacaacgcttcagcggccagggtggccggcggacgggcggacgactcacaggcactcaacgaaccttcgccgccggcaccggcatcgcgcatgccccctgcccctccactagcgcgttttcgggcggagtggaattcgccagttcgaacaaaaacacgtgccttcagtattttaggcagggtcatggctcctgatgcacggtttggcgccttcggcggcacggttgacgcgaatctccgtggcaatcctgcgcagacgccatgaagttttgatgatttcggccgcacaatgttccgtcacgacttaagccaacttcaatctatcggccgcgcggtcagggtgcacggcaacatcacggagccgccggcggtgcggtgcgcgagacgacgcggtcgcgcagccatgcaccaatggtgcaaccgacgagatagcaggcgaacatgatcagcccaaggtcgagccagtagccgaagcggccggggacaacatgggcgaccgaggccgcgatcagagccacagcaagcgcggcgagccagcgcgccgtcaccttcgaggtgccgttgccgcgctggaccaccgagatccagcccatgcaaaagcccagcagcaacgagccgatcagccagcccaggtggaaagagacgagatagggcatcgtcacctcaccagaaattcgatgcggcggttccgcgccttgccttcatcggtgtcgttgctggcaacgggctgcgtgctgccatggccgaccgccgtgaaccggctggccggcaaaccggccttgacaagatagtcgatcaccgcctgtgcgcgcttttccgagagagcctggttgaaggaatcctcaccgtccgcgtcggtatgcccgacgaccacgatattggtggtggggcagcgcagtgcggtctcgatgagacgatcaaggatggccgcggagtcgggatcgatatccgcgcgcctgtttgcgaagcggattttgcccttggtcagaagctctgtgaacaattgctggcacacggtgccgtcgacggggcctgccgcgggcttcaccgtgatctccggcttgtattgccaggttttcgggaagtccctgccgaggccagcgcgaatgtcgttggcggcgccctcgtagagcgcatcaccggacagcttcacctcgcgatcggagacgacgagcgtgccggtcgatagccgcgacagcgcgccaagcgctgcgacgaccgccatgctgaaggagccgggcgcgccgacgctggccttgagattgtccacgaccttttcggtgaagaactttcgcgaggcgctggtggcgattgccgcatggacattgttgtcgggaacgtagccggtcagcgtcaccttcgccgccaccgggtccttgtaggcctggaagatataagggggcgccttgatgtcgttggcggcgattgaaaagccctcgggcaggttcttcagcgctgctgcgatcgcctcgcggccgccgagctcgcgcgccatgcccgacagattgaccttggtgtccgttatcgtgatcttgccgtccttgagcttgccgatctggtccagcaggagcatcgcggccgcctcgaaccgcggcggcgcgccgcgtgccagacccatttggtcggccacctcggcgccgccgacctccttgcgggccgcctcggtcagccgggccttcatcgacggcaaggacgcagagcccgacagcgtcacccgcaccacgtcacgctcggcattccagacgaaaggcttggcctcgggaacaagtcgggtccggtcgtcgaccagtcgcacgccgggcacggtctcgaccgccatcacggcgtcgcggcgcccttcctcggagaaggcgtccgcggccaggctgacgtcgcggccatcgaccgcgatgcgggttttgtccaggacggtattcttcagcaccgccgagcttcgggcagacaggtcggcctcaaccggtaaggtgttattccaggccgcaaatccccacatgatggccagggggatcagccccggccaccatttgctggcccacgagaaaagcttttgcattcgacgacccgaactctggaaacggagacaaaacaaacccttggcaggctgtcaaaccggaaatggtgccgttccgaaggccctgcctggacaatccaaataactttttcttcaagggttcttccgtaagttgaaggcggaatgccagagtccctcagccggtcatgaaacaactgcgtaacaacgtcatccgcgccgggctgggagcactttatttcagcggggcgcaccacctgttgcgcccgctcttgtcgggcgtcggcgccattttcatgctgcaccgggtgcggccggcccgtgaggccgcgtttcagccgaaccggcatctcgaagtcacccccgaattccttcgcgcgacactgtgccatttgcgctcgcgcgacatcgacatcgtcaccatggacgagctgcacgagcgattggcgcagggacggttcgaccgccgcttcgccgcctttaccctcgacgacggctatcgcgacaatctggaccatgcactgccggtgctgcgcgaatttgacgcgcctctgaccgtctatgtcgcgagcgactttgccgacggcaccggacgcctgtggtgggcggcgctggaggccgtcatcgcgaaggccgagcagatcgacattacaatcggcaattccgcattgcggctcgatgcgacgacgcctgcggccaagcaggcaacgttcgaccgcctgcacgactggctgcgcgcgctgccgggcgagcacgacctcaagcgcgagatcgaggcactgtgcacgacgtacgacgtcgacatgggagcgctgtgccgcagcctctgcctgtcctggaccgagttgaagacattcgccgccgatccgctggtcacgatcggcgcgcacagcgtcagtcattgcaacctcgccaagcaggcggaagacgttgccgcgcaggagatgacggtgagccgcgagcggatcgagcaggcgctggagcgccccgtgctgcatcttgcctacccctatggcgaccgcgaggccgcggggatgcgcgaattcacccttgctgcagccgccggcttcaagaccgcggtgacgacgcggcccggcatgctgttcgccgacaatgccgcccacatgacggcgctgccgcgcgtctcgctcaacggcaactaccaggacgcgcgcatcctgccggtgctgacctcgggcgctgcgaccgcgatgtggaacggcctccgccggatcgcggcggcatagcccctcgatgtccgcggccgcggagattgactcccctccccgccccgctcacaacaagcgccaatcaagggaggcaccatgttcaacgatctgttctcgctcaaaggccgcatcgcgctggtgaccggcggctcgcgcggcattggcaagatgattgcggcgggttcctcagcgccggcgcggcgaaggtctacatcaccgcgcgcaaggcgggaccctgcgaagccaccgcgaaagagctcagcgcccaatacgacggcgagtgcatcgcgctgccgatcgacatctccacggtcgccggctgcgagctgctggcgaatgagtacggcaagcgcgaggccaggctggacatcctggtcaacaatgccggcgcggcctggggcgcggagttcgacgaattccccgagagcggctgggacaaggtgatgaacctcaacgtcaaggcgccgttcttcctgaccaaggcgctggcgccgacgctgcgcgcgtcgggaagcgcggagcggcccgcgaaggtgatcaacatcgcctcgatcgacggcatcttcgtcaatccgggcgagacctattcctatgccgcgagcaaggccgggctgatccatctgacgcgccgcatggcggtgaagctcgtcccggaccacatcgtggtcaccgcgatcgcgccgggcccgttcaagtccgacatgaaccgcgccgcgcgcgaccacgccgacgaggtcgcaacgcgcgtacccgtcggccgcatcggcaccgacgaggacatggcgggcgccgcgatctatctcgcctcgcgcgcgggcgattacgtcgtcggggcgaccatcgcggtcgacggcggcatcgtctatgcgaacccggggatcaagggcagcgggtgggacagcgattgatccggcgatctctggtcacacgcaatggggcccaaaaccgaaacgtcgaaaacaaccccatgcacagtagaatgccccttgatcagcaagggattttcttgagccgcccagaatcgacgattcagccgcgacgcggttgacacgtcgggcaaaacactgcccgtccggaatccagtgcgcttgcgacttctctgtgaagccacaagcgcccctgcaatagtgcatcacccgcttcgcgggtgatgacgccattcgtgtttgcgggagcgccgagtcccgatgcttacgactcgatcttcacatattcgaaatcgccgggcttgttgtcgatgccgaccttgggcggggagatccaggacgcgaactggccgatctcggtgacgggctgcatcagggaggtgatgaagtcgccgtcgctggcggacggcagccactcgtccttgcgcttggcccaggtggcatcgtcgatcaggatgccgtcgggcgtcgcgtgcacgtccttgaactcgccgatgtggcggtggaaggcaacgttgggcagcttgagctggaaatcgtagcccgcggtcgagatcactttgttccagcgcagcatgcccttgacgcagtcctggctgtaatcgtcgcgcaggcgcatgttgagcgcggtcagcgccggctcgtcgaccagcttgatctcgccgttgatcagcttgagcaccggataggtggagttcttgagctggtgatcgtcttcgatctgggtctcgtggtagcggcccttgatgccggcgttgaaggcgttggccgcgttggtcgagacctccgagccgaacaggtcgagcgacagcgtatagtgcaggttcagcttcttctggatggtccgaagatcgatcaccccgagcgcgcggaccttggcgatgtcggtgggatcggtgatgccggccgccttcatcgcatcgcaggtgcgctgcacgacgcgggtgatgccggtctcgccgacgaacatgtggtgcgcctcttccgtcagcatgaagcggcaggtgcgcgacaggggatcgaagccggactgcgcgaggctgtgcagctgcatcttgccgtcgcgatcggtgaagtaggtgaacatgaagaacgacagccagtccggcgtcgcctcgttgaaggcgcccagcatgcgcggcgcatcggcatcgccggagcggcggcgcagcagatcatcggcttcctcgcggccgtcgcggccgaaatatttctgcagcagatagaccatcgcccagaggtggcggccttcctcgacgttgacctggaacaggttgcgcatgtcgtagagcgagggcgcggtcttgccgagatggcgctgctgctcgaccgaggccggctcggtgtcgccctggatcacgatcaggcggcgcagcatggcgcgatgctcgcccggaacctcctgccaggccggctcgccgtagtgctcgccgaacggcacgacgcggttttcctcctgcggcgcgagcaggatgccccagcgatattcgggcatgcggacatagtcgaacttggcccagccgcgcggatcgaccgaataggccgtgcgcaaatagaccagcgattcctggaaaccttccggccccatgtcgctccaccagtccatgtagccgggatgccagccttccagcgccttgagcacctggcggtcttcggcaagattgacgttgttgggaatcttggtcgagtagtcgacgttcatgatgttgacgttcatggggacctcccgtgtgggactagctcgtttgaaggggcgaatggcgaatggcgggtagcgaatgggcatcccctattcgccattcgccactccctacccgctagactcgcgtcatatcgaatttcggcttctggccgctgccgtagcggcgcagcgcgccttcctcaccgacggcattcggacgctggaagatccagttctgccaggcggtgaggcgcgcgaagatctttgattccatcgtctcggggccgacgaagcgcaggctcgcttccatgccggtgaggctgtcgggcgagaagctggcgcgctcctcgaggaacacgcggacctcgtcgtcccagtcgatgtcgtcgagcgcaaaggtgacgaggccgagctcttccgcctgctccgcatcgagcgcggtgccgagcgtggcttccgcgcggtcgacgtcggacggatcggcctggaagcgcgattgcagccgcgtcaggccatggctcatcggatacgggccgaagttcatcgcagacagttcgatcgacggcggcggacggttgtcgccctggcgcgtgccgatcagcatgtaggagcggtcggcggcgaacacgagctcggccagcgtgccggcaaagcaggagcccggttcgaccagcgtcaccagcgtgcgcgaggtgacgtcgatgcgcttcagcacgcgcttccagtagtgcctgatctcgttgacgagccagtgcgccttgttggcttcgaggaaggcgtcgcaggcgagaacatgggcgcggtcgccatggctcttgaacaccagcatggcgatctcgagctcgttgatgcgaagatgcaggatggcatcgtcgagctcgcgcgcgacctggagcggccagaacgacgctccttgcgccatcattccgtcgatgtcggcgggcggtgcagcctccggcgccttgatcgagatggtggcgatgcgggccgcgcgatcgatgtccacggtgacgaagccataacggatgccggtctcgtcaatgacgcggttgagcggcgtcagcgcaatgcccttgccgctgccctgccgcttcgaagcggcggcgaattccctggcgcgctcggcgatcctggcttccagcttggagttcggcgcgatctcgtccacgagacgccactgcaccgcgcgctttcccttcacaccctcctcgatggtgcagaaaaaatcggcatggtcgcggcgcacttttcgcttgtcgacgacgcgcgtcagaccgccggtgccgggcagcacggcgagcagcggcacttcaggcaaggccaccgcggacgagccgtcatcggcaaggatgatgtgatccgtcgcaagcgccagttcatagccgccgccggcggccgagccgttcaccacggtgatgaagcgctggccggaattttccgacgaatcctccatgccattgcgggtctcgttggtgaatttgcagaaattcaccttgtgcgcgtgggtcgatcccgcgagcatgcggatgttcgcgccggcgcagaacacgcggttcttggccgagcgcatcaccacgaccttcacctcgggatgctcgaagcgcagtcgctgaagcgcgtcagccagctcgatatcgacgccgaggtcgtaggaattgagcttgagcaggtagccctcgaacaggccgccgttctcatcgacatccatggtcagcgtcgcgacgtcgccgtcgaccgtgagcttccagtgcttgtagcgggacggttcggtctggaaatcgatgaatgtcgcgccgcctgcgaggcgccgatcttccccggccatgggtcatccctgagcttgaattatgcgttctggcttgtccgttagatgcacaatagtgcatcttttcgaacgcgtctagccctcaactgccgtagcatgcactttgtttcatgaggagtcgttctgctgccatcacgcggcgcgcccttgcagaccctgatcgtcgcgcagggccgctcctgcgaactgctcgatcgcctccagcgtcgccgccggcgcctcgcgatgcggagaatgccccgcgccggaaacgatcttcacgtcgaccgggcagtagcactcctcctgcgcgatctcgacctgacgcagcgtcccgtattgatcgtccgcaccctgcacgaccagaacggggacgcggatgtaggcgaggtagtctgaaatgtcccaatcgcggaacttcgggtcgagccaggcgccgttccaaccgtagaacgcgttgtcgacgtccttgtgccagcgcgcgagcttcgtcttgaggtcggtggtctcaaacgtcgtcttgatcgcggcgatggatttgatcgagatatcctcgacgatgaaatgcggcgcgatcagcacgaggccgctgagacgatgatcctgatgcgctccggcatagatcgtggcgatcgaggccccgtcggaatggccgagcagaaggccacgcttgaagccgatcaagtcgagcagcttcggcagcacgtccagcgcctcgcgttgcatgtagtcgagtggccgcggcagcgcgaccggactggattgaccatagcccgcgcgcgaatagacgaagatgccggcgccggaggcttgctgcagcttctccgggaagtcgctccagagcccgacggagccgaggccttcgtgcagcatcacgatggtcggcgcatccgcggccggtggcgcgagccatttgtattcgaggctggcggtgccgatgctgaggaaaccggtgggggtgagattggtcatggtgtcactctgcttcgctggatgagcgcgagatatttacgcgcactccgtcgttccctcccccttgtggggaagggaacgcgacggaggtctcggtgacggcagtgcgcggcatcagcaaactcaattcgcgccttcccgcagtttgaaccgctggatcttccccgtcgcggtcttgggcagggactccaccacgtcgatccagcgcggatatttccaagggccgatcttttgcttgacgtgttccttcagcatctcctgcaagtccgtcgtcgtcgcgcccgggcgcagcaccacgaacgccttcggcttcaggaggccttccggatcggcctcgggcacgacggcggcttccagcaccgccggatgggtgatcagcgcgctctcgacctcgaacggcgagacccagatgccggagaccttgaacatgtcgtcggcacggccgcagaaggtgtagcggccctcgccgtcgcgaacatacttatctccggtgcgagtccacggcccctcgaaggtgcggcggcttttgtgacgctgattccaatagccctcgccggcggaaggcgcatcgaccaggagctcgccgacctcgccgtcggcgacgtcctggccggcctcgttcacaagccgcaccgcgtagcccggcaccggcttgccggaggagccgtacttgatatcgccgggcgcattcgagagaaaaatgtgcaagagctcggtcgagccgacgccgtcgaggatgtcgacgccgaaccgcgctttccagctgttgccgacggattccggcagcgcctcgccggcggaggtgcaaatgcgcaacgcctcgccgcagcgctcgcccttcatcgtctcgtcgttgagcatcgccgcgaacagcgtcggcacgccgtagaagattgacggattgtagcggttcatcaggtcgaacatgcgtgccggcgtcggacgctcgctgttgaggatgacgctcgcgccgaccgacatcgggaacgtcaacgcattgccgaggccgtaggcgaagaacagttttgcggccgacaggcagacatcgctctcgcgaatgccgagcacctgcttggcgtaggtgtcggcggttgcctgcatgttcgaatgcagatggcgcacgcccttgggcatgccggtcgagcccgacgaatagagccagaacgccggctcatccggatgggtcacggcggtggtgaactggtcgctctcgccggccatctcttcggccagctgcttgtggccgttctgcttggcaccggagacgactacatgctcgagatcaggcatgcggccgacgacgtccttgatgacgggatagagcgcctcggacacgaacagcacgcgggcacgacaatcggcgaggatgtaggcgtattggtcggcggtcaaaagcgtgttcagcggcaccggcacgatgccggcgcggattgcgcccaggaacacgaccgggaagtcgatcgtatccagcatgatcatcgcgacgcgttcctcgcggcggacgccgagccggcgcagcatgttggcgacgcgccgggtctggcgctggagctcgccataggtgatgcgcgagacggtgtcgtcgaaggcgagcttgctgccgcggtcctcctcgacgttacggtcgagcagccaggtcaccgcgttataggatccctcgctcacagacatctcccccgaatttagaattataattcatagaaagacatcgcattggcttgctgtcaatgccagcaggcactatgtttcattaaaaccgccgcaggacccctgtaaagctgtctcatgagcgaaagtcccgacgccgaatcccgcttcctcgaacagctcggccagcgcgtgcgcaccatgcgcgcgctgcgcggcatgtcgcgcaaggtgctcgccaaggtatcaggaatatcggagcgctacatcgcgcagctcgagagcggcaagggcaatgtctcgatcgtgctgctgcgccgcgtctcggacgcgatgggcgcgcatctcgaagacctgctcccttcggccgatccaacgccggactggcagatgtttcgcgatctcttgcgcaaggcaaccccggcgcagatcgctcaggccaaggagctgctctccggcggcagcgcctccgccccgcgacgcgcgccattctgcggcatcgcgctgatcggcctgcgcggcgccggcaaatccaccctcggcaagatcctggcgaagaagatcggctggagcttcgtcgagctcaacaaggaggtcgagcagcagaacgggctctcggtcgccgagatcatcgcgctctacggccaggaaggctttcgccgcatggaacaggcggcgctgcaacagttgctcgcgcgcaacgagctgatggtgctggcaaccggcggcggcatcgtctccgagccgctcaccttcgaccaggtgctatcctcgttctacacgatctggctgaaggccgagcccgaggagcatatggcgcgcgtgcgccgccagggcgatctgcgccccatggccgatgaccgctccgccatggcggagctgcgcaacatcctgctcagccgcgagccgctgtattcgcgcgcggcggcggtggtggataccgcggggctgtccgtcgatgccgccgccgtgcggctgatcgatgcggtgcggcccgtgctgcagaacgaggcgcgcagcttcggcctgcgcagcgtggcgctgtgagctcggttttcgcatgaccaatatcgacgcctcggtctcgctgttcgatcggatcggcggcagcgcaacgatcgacgccctcgtcgaccgcttctacgaccgcatggacacgctaccggaggcgaagatcatccgcgcgatgcacgcggaggacctcggtccgatccgcgacgtcctgaagcgctatctcaccgaatggacgggtggcccgaagctctattcccccgagaaaggtcatccgagattgcggcagcggcacttcggctttgccatcggcgatgccgagcgcgatgcgtggatgctctgcatgcgcggggcgctggcggagacgatcaccgatgccgccgcgcggcagcatctcgatcgcgcaatgtcgggcctcgccgactggatgcgcaaccggccttagttccggacgccgtctcttggtgcgatcccgtcgtccggctaagctgtgcaggacaacggaggcttctccatggacgcaagcatcgcgccggaagtcatcagacgtcctgttcccgcgcatatgacgcacatcgtctcgtcgatctcctgctatcgcgagcgcggggccggcctgaccaattttcgccacgccgcgccgctgtcgctgccgtttctgatcaaccttggcagcccgttccgcatcgcgctcgggcgtgagcccgatcggtcggatatccagccgagcttcgttgccggcttgtttcccggacccgtgcagatcgaatccgatggccgcgccatgtgtgtccagatcgacttcacgccgctcggcgcttaccggttctacggcggcgccgtacctgacctcaccgcgcgcatggtcgatatcggagatttgctcggccgcgacggtcgagaactgggcgagcgggtggcggaagcagacaattggcagcgacgcctcgacatcatcgagaccttcgtgcttgagcggacggtgcacgagccctcccccgcaatcgctgcggcgctcagccggctctggcgcagcgctggcgcggcgcgcatatcggacatcgcatcggacatcggctggagccgtaaacatctcgcgcgccggtttcacaacgagatcggcgtttcaccgaagacattggcgcggatgctgcgctttcaccgcgcctgcgaactggcgcgcaacggggataggcgaggctgggccggtattgcgatcgaggccggctttgccgaccaggcgcatctcgcccgcgatttcaaggagttcagcggcgagaagccgaccatctgggccgcgcggctggagcagcttgatccacgcctgatccgcgaagccggcggatagtttcaggtcccatttgttcaagccgcgagacgacggctcgcctaggctgagcgcacaatccaagtggagaatgccatgtccagtccaaccggaaacgaaccccctcgcctctatcacacgatgcgctgcaaggacgcggaggcgatgatcgtgtggctgaaggacgtcctgggattcaccgagcgggtggtctaccggcgcgagaacatcgtcgcgcatgcggagttgtcgttcgggtcatccattctgatgctcggagcgcatcggcaggatagctatggcaagagcgtcggcgaactcgacgggcgccgaaccgacgcggtgtacatggccgttgacgatcccgacgcgctttatgccagggtgaaggcatccggagctcgaatcgaaacggaattgcaagacaccgactacggcagccgggacttctcggcgcgggaccccgaaggcggcctctggagcttcggcacctactggccgaaagccggcgaagatccgttgccggcctgacctcgagccaaacggaatgcgcaagcctgatatcggggcggagcaagcgcgcagcgtggacaaccggcgcgcccgcattagactggcgggcatgaccgacaccctccccgataccatccgtcgcctctacaccgatcccggcgaatacatcgacagcgatcatcccgcggtgcagcgtttcgccgaaaccagcgtacgcccggaggcggacgcacgcgagaaggcgagcgtgctctacaaggcggtgcgcgacggtatccgctacaatccctatgtcagcatgcgcgtcgccgagacgtttcgcgcatcgagcgtcctcgctgcggggcagggctattgcgtcggcaaggccgcgctctatgccgccgcctgccgcgtccacggcattccggcccgcgtcggctttgccgacgtgaagaaccatctcaccaccgagaagctccgcgccagcatgggcaccgacatcttcacctggcacggtttcaccgaggtgcatgtcgacggcgcctggcgcaaggcgacgccgacgttcaacgatacgctctgtgcgaaggtcggcgtggcgccgctcgatttcgacggccacagcgatgcgttgctgcatccgttcgacggcgaaggccgcgcctacatgcagtatgtcaacgaccgcggcacctatcacgacgtgcccgcgaagttcttgatgcgcgagatggcgcgcgtctacgccgacatgcagggcgaggatctcacgggacgcgatatggagcgcgaagcggagcagtgagaccgggagggtgggtcagcgaggcgcaatccaccgcgtctcgtgacaggacacgatggtggatgacgccttcggccaatccacccgacgatcacaacaatagcgagcgcacagagcctgccccctcccgcagcagcggcaggaagcgatcgaccaattcctgcgccggcacccggtcgatatgcgcgcccatgttgatggcggcgacgatcacgccgtcatagcggcggaccgggaccgagatcgagcggaaatggggttcagcctcgcggtcgacgagcgagtagccttgcgcgcgatcggctgcgatgcgcgcgagcagcgccctcgggtccgtcaccgtctgcggcgtcaggggctcgcgtttcatcatcttcaggcgcgcggtgagctcagcatcatcgaactggccgagcatggcgcggccgaccgaagtgcagaaggccggcagccggtagccgatttcgagcccgccggaaaacacccgcgccggactgccgcgagcgatgaacacgacctcatcgccatcgagcaccgcgagcgaggagatttcctgcgccgcggtcgcgatgcgatcgagcacgggttgaagaaccgcgacgagctggttggatcgcagatatgaggccgccaaggtcagcacatgcggcgtcagcgagaacagttttccatcgccaatgacgaagccgccacgctgcagcgtgaacagcatgcgccgcgcggtggcgcgcggaagctccgcggcgcgggcgagatcgctcagcgtcgtgggacctgccgtggtgccgaagcattgcagcaggcgcagcccgcgatcgaggctctcgacgaaatccgtggctcgttcctcgcgctcgtctcgcttcagcttgggcatgagtgtgggacaatcctgcaaaatagtgcttgctgccgctccaaggcatgtcataattcgcccattcgttcaatagacgaacaaacgctactccacgaggatgcacgcgccatgatgagccaggagcagaacgacctgatcacccgcaccgggcccaaggatccctgcggcaagctgatgcgaagctactggcagccggcggcgctggtggacgagctggagggcgcgcggccgatccgccccgtcaggctgctcggcgagaacctggtgctgtttcgcgacgagaccggacgctacggcctgatcgaccgccattgcgcgcatcgcggcgccgacctcgccttcgggcggctcgagcatggcggcctgcgctgctccttccatggctggctgttcgacgcgaccgggcagtgcatcgagaccccggcagagccgaaggattcgaagctctgccagaacatccgccagcgctcctatcccgtcgtggagaagagcggcatcctctgggcctatctcggcgagggcgagccgccggcatttccggagatcgactgcttcgttgcgccgggcacgcatacgttcgctttcaaggggcacatggcctgcaactggctgcaggcgctcgaagtcggcatcgatcccgcgcacgcttcctatctgcaccgcttcttcgaggacgaggacacctcgaccgcctacggcaagcaattccgcggcgcctccgccggctccgatctgccgatgacgaagatcctgcgggaatacgaccgcccgatcatcaacgtcgagcacaccgaatacggcctgcgcctcatcgccctgcgcgagatcgacgaggagcgcacgcatgtgcgcgtcaccaaccagctcttcccgcacggcttcgtcatccccatgagcacggagatgacgatcacgcagtggcacgtgccggtcgacgacgagaactgctactggtacgcgatcttcaccagctacacgaacccggtcgacaagcagaaaatgcgcgaccagcggctcgagctctacgagctgcccgattacatctcgcgcaagaaccgcagcaacgattacggcttcgatccgcacgagcagcagaccgcgacctataccggcatgggcaacgacatcaacgttcacgaccagtgggcggtggaatcgatgggggcgatccaggaccgcaccaaggagcatctcggccagagcgacaaggcgatcgtgcaatatcgccgcctgctgcggcaggagatcgagaaggtctcgggcggcgagaagccgatgctgttcctggacgaggccaacgcgcgcagcatccagggtcccgcgaccatggacggaatcgggccgacgcggggctgggagacctactggatggaggtcgacgtcaagcgccgccgcggcgcgccatggacggcaccggtgccgaaggagatcgccgccaaggtgcatcggctgacggcggctgaatagcgcgaaactctctccatcgtcattgcgagcgaagcgaagcaagccagaaatgtatctgcgggcagactctggattgctacgtcgctacgatcctcgcaatgacggcggatgtggcagatatcttgcacgagttgagcagcggtgattgaggagttgatgaagtgactttcgtcgcgcgtcatgcgctgtggtcggatgagcaaagggacgccgcctcgcgcatgcgtcgtctcgccgaggagaagaacctcgaagtcatccgcctcgccttccccgaccagcacggcatcctgcgcggcaagaccatcatcgcagcggaggcgctcgcctcgctcgagagcggctgctccatcaccacgaccatgctcgccaaggacacctcgcaccgcacggtgtttccggtgttcaccgcgggcggcggcttcggcatgaaggagatggagggcgccgcggacgtgctgatggtcgccgatcccaccacgtttcgcgtcttgccgtgggcgccgacgacggggtgggtgctgtgcgatctgtatttcaacgacggccgtcccgtgccgttcgcgacgcgcgggctctacaggcgcgtgctcgatgaactcggcacgcgcggttacgatttcgtcgcgggcctcgaagtggaattccacatcttcaggctcgaggatgcgcatatgcgcgccgaagatgccggccagcccggcacgccgccatcggtcagcctgctcagccacggctatcaatatctcaccgagcagcgcttcgatcagatggagccggtgctcgagatcctgcgccgcgacatcgtcgcgctcggcctgcccctgcgctcggtcgaggtcgaattcgggccgagccagtgcgagttcaccttcgcgccgaagaaaggcctcgcgcccgccgacaacatggtgctgttccgcagcgccgtgaagcagatcgcgcgccgccacggctatcacgccaccttcatgtgccggccgaaactgccgaacgtgttcgcaagcggctggcacctgcatcaatcggtcgtctcgcgcgcgagcggcgacaatctgttcatggcgaaagacggcgccgaaccgctcagcgcgttcggccaggcctatctcgccggactgcttgatcacgcccgggcgtccaccgtgttcaccaccccgaccctcaacggctacaagcgctaccgctcctattcgctggcgccggaccgtgcgatctggggccgcgacaatcgcggcgtgatgatccgcgtgcttggcggcgcgggcgatgccgccacgcggctggagaaccggatcggcgagcctgccgccaatccctatctctacatggcctcgcagatcctctccggcctcgacggcgtcgagcgcaagctcgatcccggcccgtcggcggacacgccctacgagaccaaggcgccgctgctgccgaagagcctccgcgatgccgtcgccgcgctgaaggacgatccgttcttccgcgagaagctcggagccgagttcgtcgactactacacccacatcaaggacgccgagatcgaccgcttcctgtccgaagtgaccgactgggagcaccgcgaatatttcgagatgttttgagctgacgcagcgctctccccgtcattgcgagcgcagcgaagcaggccagaatctttgcgcggagggattctggattgcttcgtcacaagggctcctcgcgatgacggggagacagcgggggctagatccccagatacttatgctgcagatccggctcggccatcagctcgtcggagctgccgctccacaccgtcttgccgcgctcgatgatgtagtggcggtcgcagatgcgggcgaggtgatcgacgttcttgtcgacgaccaggatcgattgtccgcggctcttgagcagcgacaggcagctccagatctcctcgcggatcagcggcgcgaggccctcggtggcttcgtccagaatgagcagcttcgggttggtcatcagcgcacggccgatggcgagcatctgctgctcgccgnnnnnnnnnnttgcccatgttggacgcgcgttcggcgaggcgcgggaacatcacgtagatcgcggccagcgtccagggattgccgctgccgaagcggtcggcggcggcagcaacgaggttctcgcgcacggtgaggttcgggaagatctgccggccctccgggacgaggccgacgccgagctttgcgatcctgtaggacggaagctgccgcacctcggtgcccgcgaagcggatgttgccggcgcgcgccggcgtcaggcccatgatggagcggatggtggtggtcttgcccatgccgttgcggcccatcagcgagaccatctcgccgggcttgatcgacagcgacaggccgaacagcacctgggacaggccgtagcaggtctcgatgccgtcgacctcgagcagcgtgtcagccatggtgcgtcaccacatgctgatcgccgagataggcgcgcttgacgtcctcattctggcggatcgcggcaggatcgcccgaggcaatgacgcggccatagaccagcaccgtgatgcggtcggcgagcgcgaacaccgccggcatgtcgtgctcgaccagcacgatcgagacttccttgcgtagctcctggagcagcttcaccatgcgctgggattcggtgaccccgaggcccgccatcggctcgtcgagcagcaacagcttcggcttgcttgcgagcgcaaccgcgagctcgagctcccggcgttcgccatggctcagcctggacaccacgacgtcggcgcgatgcaacaggccgacacgatcgagcgcggcatgcgcggcatcccgcaggcccttctccttgcgggcattggcaaagaagcggaacgaggtgcccgcatgcgcctgcgccgccagcgccacgttgtcggcagcggtgaaatcgagcagcagcgaggtgatctggaacgaacgcgcaaggcccagcgcgcagcggcgataggccggcagaaaggtgatgtcgcgtcccgccagcgagacgctgccggaatgcggcgcgagatgtccggtgagctggctgatcagcgtggtcttgccggcgccgttcggaccgatgatggcatgcagctcgccgctggcgacgtcgagcgatatgttgtccgtcgcgatgatgccgccgaagcggcgcaccagcttctcgacgcggagcaggggttcagccacggttggccctccccagcgcacccatgatgccgccgcggccgaacagcacgatcagcagcagcagcgggcccaggatcagcgcccagtattcggtgatctgcgacagcagctcttccagcagcaggaacaccaccgcgcccatgaccgggccgaacagcgtgcccatgccgcccaggatcaccatcaccatgaggtcgccggaacgcgtccagtacatcacggccgggctgacgaaatcggtgttgttggcgagcagcgcgcctgcgaggccgcacatcgtgcccgagatgacgaagcagaccagctggtagcgcttggccgggaagccgatcgcctgcatgcgctgctcgttggagcgcaggccctgcacgacgaggccgaagcgggagttgacgatgcgccagatcaggaagatgacgccgaacaggcaggcgaggcagagatagtagaactgggtgcggttgccgagatcgatcaggccggagaagtcgctgcgcttgtagatcgtgaggccgtcatcgccgccgtagcgggccagccccgaggcgacataataggccatctgggcgaaggcgagcgtgatcatgatgaagtagacgccgcgggtgcgcagcgacagcgcgccgatcaccagcgcgaaaatcgcggaagcggcgagggcgaccggaaactggatgaacccgcttcccacgccttcctgcgcgagcatgccgacggcgtagccgccgatgccgagataggcggcgtggccaaagctcatcaggccggcaaatcccatgatgaggttgaggctcgccgccgccagcgccaggatgatgatgcgggtgaacagcgtcaggatgaagatgttgccggacaagtgcgaatagagcggcagcagcacgaggcccgccagcatcagggccgtgacggccttgctcaccgtgaaagccttcatcgacgattggccggaaacagcccctccggccgcaccaccagcacgatcgccatcacgagatagataagcatggacgacagcgcgggcgcggcggtggaggcggcggcgccgctcagcacctgccggagcaggttcggcaggaaggcacgaccgagcgtatcgatcatgccgacgaagatcgcggcgaggaacgcgccgcggatcgatccgatgccgccgatcacgatgatgacgaaggcgaggatcaggatgttctcgcccatgccgatctgcacggtgaggatcggcgcctgcatcaggccggcaaggccggcgagcgcggcgcccaaaccgaacaccagcgtgtagagcaacttgatgttgattccgagcgcaccgatcatctcgcgattggaggcgccggcccggatcagcatgccgatgcgggtacgcatcacgccgagatagagcaacagcgcgaccagcagcgccacagcgatgatggcgaggcggtaggcgggatagtgaatgccgggcaggatcggcaccggcacggtgagccaggctggcagcggcagcgcaaggcccgccgggccccagatcagccgcaccgcttcgttgaagaacaggatcaggccgaaggttgcgagcacatggtcgagatggtcgcggccatagaggtgccgcagcgccgtcacctccagcacgatgccgagcaccagcgtggcccctaacgccatcagcgcgccgagcaggaagctgccggtccaggccgcgaacgtcgcggcgaaataggcacccatcatgtagagcgagccgtgcgcgagattgacgagatccatgatcccgaacaccagcgtcaggccggcggcgagcaggaacagcagcaggccgaactgcaacccattcaagaattgttcgacgacgagcagcatcaagactctctcaggcgcacgcagcgtcacgccgatgttcgaacacagtcgccatcagtgaaagagctccccctgcctcttcaaggccgaaaaatgggtaatggcagtatcgttccgaggcaagagcgattcgacaccaaagatgcactttgttgcatgcgggtgcatgcggtcgaaacggccctgcaagaaggctgccggaacggctggggcaacctgccgcagccaagggatcaccctcccgcgcttgcccaagcggatctcatgtgaggtgccagttggagcaccccacaggatcacagcgtcacggccgggcctgtcggggccatccaaccttgcctgcagcacgaagaacgtggatgcccgggacgagcccgggcatgacgacctcttgtgaacgttgaatgcgagcaccctcccccattgccggggcgagggcgctccgattgtcggatcgagtggctgcgtctagtgcgacgtcacctgccggggaagctggtccggctcggcgagcacgctgctggccgtcgaggcctccagcgcggccatccggaacagataagcgagcgtcatcagtccggaatcctccgccatctgagcaagctccaatgccatgtcggacatgtagccgagattctcgtccttgatttgcaccatgagctggctgtcccgcatcatgttcgacatctcaggcactctttcgttgcgcggcagcgaggccgcagaggttggcacgggcgacggcatccagacgcgggccgtcctggcgaacgaccgaggccatgccgatccgatcacgcagggcatcgagcgtctgccgacgaatgtcgatggtcgccgccatggtccatgcgttctccaccagagccggcaggccaagcggcgtcacgacgaacccggcttcgtgaaagcgcggcaaccaccaggtttccatgatcgcgctgacctgcgcgatcccctgattgaggcagaactcctgcaccgccgccatcagttgcgcgttgagtgcgccgtcgcggcgatcacgaacgacgaagaagcgcgaccattcccaaatcagcggatcggcggggcacccgcgcatcgacgccagatgcgggaacacctcgctcatcatcgacggcttggtcgtcgggtagagccggtgaccgccgacgacgcggcgcccttccagcgccagcagatagacggtgtcctcgtcgtcataggaatcgatctcgcggccatccggcctgcgcagagtctcccagcgacgctcctcgacgaagatgtcgtgacgcagccggaaatgctgctcgatcacgtcttcgtaaaggtggcggttgatcgcggaaattgcgtgaatcatgaaagcccccattgatcctcaacggagacagggtctgcgaaaaggcgcaggtccggtattgggaaatttcccagtacggcgcttagggattgatgatcttgttccgaatcgccagcgccaccgcatgcgtacggttgacggcaccgagcttgcgcgcagcactagcaagatgctcttcggctgtgcgctgcgtgatatgcaggatctcgccgatttcccaggctgacttcccctgcgaggcccaggcgatcacctcgcgctcgcgtggggtgaggcgcgccggcgaatgcggcaccggctggagcagacggcgaatgtggtcgaagccatacatcgccatcaggtgcagcgctggcttgctgcggggattgaggtcgaggtggacgccgccgagcgacactgcggcctcatagccggtgagcccgtggattggcacgatgaagccgcgcgacatgcgaaactcgctggcgcgattcatcacctcggccgcgtacggctcgagttcggcatcatacggcgcttccgaccattcgaacgggttgatcgattgccggcacagccgcaccaccggatcgaagcggtcgtaattgttctgggtgtagaggctgaaccatccagccggccagcgcttggcgagcaccatttgtgcaaactgctggtcagggtttggcaatcccgtcacgatgatggtttcgaagccgaagcgaccgaacgctgtttcgagcgcattcatggcgtcaggtaccttgcgataggtctccaggccttcgatgaagtcgagcgcctcccggccataatccacgacggcagacatcagtgcgtttcctgaccctcgctgtccgctatagcacgtatgtggcagctgcctcaattcgctgcacccgtagtttgccggtgttcctctgctccgaaagtttaatctacttgtggaagaaacgacgtcaggttacacctgaacgtgtccgaagcgggaaagccacgatgcaagacgaggacatcgccctcaacagcgtgctcggcctggaattgaaccgcgtgttttttgctgtccacgcaacggcaaacaagcagaagatcatcgagtttgcgcgcgaggtgctgcgaggcgagcgcgcagagctggccgaaagcatattgcccgaggggccggcaagttaagctgcgctatgctgtgacgattgccgtcagcgtgagcgactccgcacgtcgattcaatcgtcgtgcatatatccggtccatctcaccggacgacgtcagtcacgcgctttgggcaagtgccagctgaacgaactggacggcgggtcgccttccgtcaatcagacgaactgtttgtgagatcgatcagcgcacggcggccgactgacgtcagttcctccaaagccgtcgtcccggaacgggctgcttccatcagccgcgcggcaatcagcttcctgctctcatgatcgccgccatgcctgacgtgactgaaggccgcatcgagtgccgcatccagcatggtttgcatgcggccttcgaactcgctcatcctgtcccgtcccgcctcagcactccgcctgagcgcacttatggacctgcgcggtaaaatcgtatgttcacaagtgaacgtacggcgattgattgggcttggtcgcgaccagcggaggagatcagcgcgaccgcgctgccccaaaacggcagcgagacgaatagctgacctcagctgctgatagctgcacgaagaagaggcaatacaaccgatatcagcgaggtttgttccgagggtgaggcggcaaaattgcataagctcccctctatgcggcccgccattctttgcttagaaaaaatgcccggaaccaggacagggcatgactgaaggcatcacgaaatctgcaaccggcatcgaaggcttcgacgatctcacacttggaggccttcccaccggacggccaactctggtctgcggttcggccggctgcggcaagacattgttcgcgtcgacattcctcttcaacggcgcgcggctccacgacgagcctggggtcttcgtaaccttcgaggagcgccccgtcgacatcgtggccaacgttgactcgcttggctttgatctacagggactgatcgatcagtcgcggattcacatcgagcacatcgagatcgatccagcggaagtcgcggagatcggcgactatgatctcgaggcccttttcctgcggcttgaattcgccgtcgaccagatcggcgccaagcgcatcgtgctcgacacgatcgaaagcctgttctccgcattttccaacccagcgatcctgcgtgccgagatccgccgcctgttcgactggctcaagcagaagggcctgaccgcggtcatcaccggcgagcgcggcgacggcagcctgacacgtcagggcctggaggaatatgtgtccgactgcgtgatcctgctcgatcaccgtgtcgacaaccagatctcgacgcgccgcctgcgcatcgtcaaatatcgcgggaccgcccacggcaccaacgaatatccgttcctgatcgacgaggacggtttcagcgtgctgccggtttcctcgctcggcctcggccacaaggtattcgacgatcgcatctcgaccggcgtgcctgacctcgacgccatgctgaccggcggcggcttctatcgcggcagcagcatcctgctcaccggcgtcgccggctcgggcaagagctcgctggcctgcatgatggccaacgctgcctgcgaacgtggcgagcgcgcactctatttgtcgttcgaggagtccgaggctcagaccgttcgcaacatgaagtcgatcggcaccgacctcggcaaatggctgaaggacgggcagttgcgttacatcgcgacacgcccgacgttctattctctcgagatgcatctcgcgatcatgttgcgcgagatcggcaggttcaagccgcagctcgtcgtgctcgatccgatctccgcatttaccgggtcggctgacatcagcgaggttcagacgatgcttttgcgcatcgtcgactacctcaaatccaatggcgtcacggccgtcttcacccatcttgccaacgtccagcaggcggaaaccgatgccggcctgtcgtcactgatggacggatggatcctgttgctaaaccgcgaggcgaacggcgagttcaacagagagctctatctgctgaaggcgcgaggcatcgcccattccaaccaggttcgcgagttcgtgatgtcgagcagcggcattcacctgctggagccctacctcggcgaaggcggcgcattgaccggttcggcccgccgaaacgaggaagcgcgggcccggcggacagaagcgacgaggcggtccgaggtcgcgcgcctgcaggaccaggtgacgcagcggcggcggcgtgccctcgcgcagatcgaggccctcaaggccgatattgatgccgacgaggctgaactcaaccgcctcgtttcggccgagacgcattaccttcagcagagccgggacgacgccgcagcacttgcgcggggacggggaatggaagccccctccggcaagacaagacaggactgaaccatgtcccaagcaagcaacgagcccgtgaagctcgtcctctacgtcgccggcgagacacccaaatcgctcgccgcgatccgcaatctcgaaaagatctgctccgaacatctggcaggcaagtacaaggtcgaggtggtcgatctcaagaagcagccgcagctggcgcgcgagcacggcatcgtcgccatcccgaccctggtgaaggagcttccggtccccattcgcaagatcatcggggacctttcggacacccagaaggttctagttcatctgtcggttgagggatgatgacggtggtgtcgctcgtatccgcgttgacccgggatgagctcgaagctcggctttatgaagccgaggagacgctccgggccatccgcgagggcgagatcgatgccgtggtcatcaagggcggagccaccgaacaggtcttcacgctcgaaggcggcagccagtcctaccgcaccttcatggaggcgatggacatcggcgccgcggccttcgacgccgagggccagctgctctatgccaaccaggcgctgtgcaaattgctggaccggccggccggcgcattgtcggggcaggcgctgctggacatcctcgatgccgtcaatcagaccacgttccgccgcctgctgacacaggcgttgaaggaacgccaatccgccgaaatccacgttcgcgtgggtgacagcgagcgcagctttctcctcacgggagccccgatcgatttcggcatcgtgagcggggtcgcgattaccttcacagacatcagcgaacgggagcagatcgccgccgccaaggaatcggagcggttggcacggtcggtgctcgcctcagccaacgaggccgtcatcgtttgcgaccgctccggcagggtcactcacatcaatgctgccgccgagcggatctgcgccgaggctccgatcggaaagccgttcgaggaggcgatcgagctgaccttcgccgatgcgtccgagctgatgtcaggcgccgatatcgtcgcgatggcgaccagcggcacgccggttcagggactcgaagccgccgtgaagacatcggcgatcgacgtcacggacgtcatgatcagcgcagcgccgctcatcgtatccggcgaccggacacagggctgcgtggtcacgctgatcaacctgtcgcagcgcaaggccgccgagcgccgccaggctcttctgatgggcgagctcgaccaccgcgtcaagaacacgcttgccatggtgctggcgatctcggcccgcaccgcagctcacgaacgtacgatcgaggacttccagaaatccttttccggccgcatccaggccttggcggccacccacacgctgctgtccaacgcgtcctgggagaacctgcagatcaaggatgtgcttcgcgtcgagcttgcgccctatgcaacgctatccagcggacgcatcaccatggaaggactggacatttccgtggattccaagacggccgtctcccttgggctcgtcttccacgagctgacgaccaacgcggtgaaatacggcgcgctttcgacccgatccggcaagctgtcggttcggcgccttggcctgctcgaggacggcgccctgcagatcgaatgggaagaacgcgatggccccctggtgacgccgccgacgacctcaggcttcggacagaccttgatctcgcgcagcctgggtagcggtcccaacggcggcacgaagctcgaataccgtccgagcggcgtggtttgccagatcgtgattccgaaatacggccacttcctttcctgataccgccgctgactgcgccgttgtccagcactcgcac

SEQ ID NO: 261 - DNA, 1253 bp, Bradyrhizobium colbertium
caatcaaatgggacaaaagcttcgcttacgatgcgcctgtcggcggcgcaattgtcggcgctgctggaagggctcgactggcgacttgtgcacgaggcacgggagacgccggcgccagcgcagccgggatagctgttggcagtgctgcggcgaagtgaatcaggagcgtcggacgcgtcgccagatggcggcgaatatgctctgatttgggtgtgaaggacgccctgcctgacgatcccgagacgctgaaggcgatgctgctcgccgagcgatgcgagagcgaacggctgcgtcagatcatcaaggaaatgcagcgacaccggtttggccggcgggcggagacgctgcccgaacatcaaatgctgctgggcctggaagacgttgagcaggtcgcagcgtacggcgagacggcgcaggacgtcagcgcaactgaaggccgtgaggcgcgggctcgcaagcgccgcggtaaccgtggcgccttgccggtgcacctgccgcggatcgaggtcgtcgtcgacatcgaggaaagacctgtccctgctgccaaggcgagttacaccggatcggcgaggatagaagcgagcggctggacttggtcccggcgcagttccggatcctcgtgacgcggcgtcccaagtacgcctgccgggcctgcgaagatggggtcatacaggcgccggccccggccaggctgatcgagggcgggttgcctaccgaagccacggtcgcccaggtcctggtctccaaatatgccgatcacctgccgctctaccggcaggcgcagatttacgcccgccagggcattgagctcgatcgttcgacgttggcggactgggtaggacaggcagccttccatctgcgtcccctgcatgagcgcctcctcggcaagctcaggcaacggccaaagctgttcgccgacgagacgacgatgccagtgctcgatcccggccgtgggcgcaaagaccggtcagctctgggcctatgcggcggacgatcggccatggggcggcgtcgatccgccgggcgtcgcctacgtctatgcccccgatcgcaaagccgaccgaccaatcgcccatctggcaggcttcaaggggatcctccaggttgatggctatgctggctatggcaggctcgccgagcggggcaacgttcagcttgcattctgctggtcgcacatgcggcgtaacttctacgaactggccacccccggtcccgcgcccattgcgagcgaggcgctcaagcacatcgccgag

SEQ ID NO: 262 - DNA, 4936 bp, Bradyrhizobium colbertium
  misc_feature (533)..(584): n is a, c, g, or t
tctgagtgcaggttttccgcgggtttcgggaccgccgcgctccgcataatatcgtgagagaagcagcggcgcctcgccctgcgcgaggcgccgcaagcttgcgggtcagcgcgaccagaccagcgcgtagccgtcatcgaccgcgacgaggttggcgtagatcggcgctgagaaggacgggtcgtcgagcttcaccgaatgatagacggtgttctccttggaggtccgctgccacgcggcacctatctcgacgttgccggccatcacgcgcaggctcggagccttctcgttctcggacggttcggccggaaggaagcgcgccttgatgttgagcgagagcgtcttgatggtgccgctgtaggatccatcttcggcgcgggtgaaggtgccaatctgagccatagtgatctcctgttgctgtttccaagcccgcgaccatcgcggccttgatggcgatctttgagcgccgcaacgaccggcccgcagccttggcccgcagcgaagcggaggatggcgggctgagcgatcttgtnnnnnnnnnnnnnnnnnnnnnnnnnnnnnnnnnnnnnnnnnnnnnnnnnnnntgccagcaaaaggccgctatggtttaggcggaagcagccccacaggagagcatcggctcaaaggcacttcacaactgcggcaatgacggcggcgtcacggcagcattccgctctcccggtgcaattgagcgccattaagcctcacccgtaagaacgcgaagaaccggcctatgcgcgctggcagcaacagcgagaatgcggcacgcgcaggacaaaatgacgccgccgagtgaggtgcgccgactcggtccaaacagccccgatcttctgtggacagacggccttgtcgtgacgccaagcgctcggaccgtcgcagaacgccgcatgctgtggcctccaagcaacaaaggaggcaatcatgtcgaagcagaaacgcaagcattggaacagcgtagagagtcggctgcactttgcgaaaccgtatgtcgatggcttcgagaactggcttcaagaccatggatacacgccgagcaccattgaagagaaggtgagactactcgcaggctggaccgactggatgcatgcggcgggttttgcgctcgacaatgttttggacgggctcactgcatccgcggctgccttcaaagggaagaagagcatccgcgcctacgccggcgcaggtcggctgttcatccgctatcttcaagatcgagaaacccttcccagatcggcaccaccgccatcgccgacagagatctggccgctccttgcggcattccggcgctggatgcgcgaccagcgtggtgtggtcaactcaacgctcgatacctatcagtcgaccctggtcgatcttctcgaagcgctcggcgacaatccaacagcctttaccgcccatgcaatccgagcctttgtccttgaacgtgccaagccgcacagccgcgggcgcgctaaatcgattgccgctgcaacacgggcgttcctccgcttcctggtggcgactggacaaagcccggtaggacgcgattatgccgtccccggcttcgccaactggcaattggcgtcggttccgagattccttgccgcagacgatatcgcccgcgccatcgcagcttgcgagggcgaagggcggttgcgcgacaaggcgatcgttctgctgcttgcccgtctcgggttacgggccagcgaggtggccgatctgaaattggccgacgtcgactggcggaatgggcgcattaccgtcgccggcaaatccagacgcgaggagtggcttccgctgacccaggaggtcggcgatgcgatgattgcctacatcgagcgagtcaggccaccgttgtcgacgccccgtttgttcatcaccgaagccgccccggttcgaccgctgacccgcatcgccatcaaatgcatcgtgcgtcgcacgctgctccgagccgggatcaaaagtgcccatcaaggagcccatgtgttgcgccattccgcagccacgacgatgcttcggcatggcgtcagtttgacaggcgtcggcgccgtcctgcgtcaccgatcgccggcaatgacgatgcactacgccaaggtggacttcgccctcttgtcggagatcacgcagccctggatcgggaggctgccatgctgagcgatgacgcggaacgttacatcgagcttcgccggactcttggcttcaagctccgaaagccgtcgcgacaccttcaatcctttgcgcgctttgcgacggaaaagggcgagagttatgtcagcgccgccacagcgctggaatgggcgacgatggcgccaactcggtgcacccggcatcgccgcctcggtgacgtggtgcggttcgcgcgctttttgcgggccgagaataccgctcatgaggtgccggtcattctctttgccgaacgcgcatcgcggcccgttccctatatctacacgccggatgaattgactcggatccttgagggcgccggccaactccgccggcaaaagcccaaccccttacgtcggcagctctatgtgatgctgttcggattgatcgccgccacggggctgcgcgtatccgaggcgctcgaccttcggttcgacgacttactggccgacggtgtcttgcatatccgcgacaccaagttcggcaaaagccggctcgtgccgttgcacccgaccgtggtggaggctctcgaccgctatctcgacaggcgccgccttgtcgcgggatcggacgatcacctgttcccctcggcgaagggcaagagactcgcctccagcacggtgaactatacattccgctgtgtcctgcggtttgcgaatattgctccggagcggccccggcggccgcgcattcatgaccttcgccatagcttcgcgacgcatgttctggagcaatgcaacaccgagcgcgacgcggtcgcccgacacttcgtcgcgctggcgacctatctgggccacgtcgatatcaagcacacttactggtacctacaggcgacaccggaactgatgaccgacatcgccgccgcggccgaaacgttgatcatgggggagcccatatgaccctccttgctcctctgatcaccggcttcctgcgcgactacatgccccgtcagcggggctatagtccgcatagctgcgaggcttatgcctacagcttccggctcttgttcgccttcgcggcgaagcgcatccagacaaaaccctcgcagcttcttatcgaacagctcgacgcggcattgatcctggactttcttggtcacatcgagcgcgagcgcggcaatggagccgccacccgcaatctgcgccttgcctcgatcaagacgttcatgcgctacgttgaataccaggtgccttcggctctggagcagatcggtcagatccacgccatccccgtcaagcgccacgatcagaagcttatccgtcacctggtcatggtggaggtgcgcgcgatcctgaatgcgccggacctcacgacacgtctgggcgtacgcgatcgggcgatgatgcatctttgcttcgcggccggactgcgtgtctcggaactggttggggccatgatggcgaatctatccctgcagcggccgccgagccttctggtcctgggcaaaggtcgcaaggagcgatgtcttccgctttggaaagaaaccgcagccgatctgcgggcgtggttgaccctgcggggctcggttcgtgtgcccgagctcttcgtcaatgccgaaggagcgccgatgacgcgggccggcttcgagtacgtgctggagaagcatgctcgggcggcggccgagacgtgtccgtccctatgcaaccgttcgatatcgcctcatcagctgcgccacagttgcgcggtgatcatgttgcaggccacacacgacatccgaaaggtcgccttgtggctgggccatgccgatatccgcaccacggaggtctacctgcggatggatccctccgaaaagctggaggcggttgaagcggtcgttccgccggagctgcggcgcggacggttcagagcgccggatgcgttgatcgcctctctgttagcggacacatcgccgccgccggcgtgaaaaagccgagcttcaccgagtggtcgcggtccgtcgatatcctcggtgcagcccttgctcgcttgcattgcccacccagttccggcagttgtcgttcgatcgcaaaccggcgagcgaatgccttgagccgtgcgtgatcgttgacgatgcggcagcgccatcatcgccgtggtgttggtatactgggccatcatctccgttgctgtgcgcagcctgcgaacacgcggaccttttgatgtcggatcacgccccgggatgcggtcgctgcgcttcccggcctgatccccgcaacgcttgcagcaacttctttccccgctgctgcgcagcttcctcgcgcgacaaacaagttgccttcagccgtcctgcgctgcgctgcgggccttacggctgcgggtcggccgtcccggggcttcggatcgccatcaaggccgcgatggtcgcgggcttgaaacagaaaacggagattatcatggcccagatcggtaccttcacccgcggcgaagacggcgtgttcgccggcaccatcaagaccctctcgctcaacgtcaaagcgcgcctcgtcccagccgacgaatccaccaacgacaaggccccggacctgcgggtgctggtgggcaacgtcgagataggtgccgcgtggcaccgcacctcgaaggagaacaccgagtaccactcggtcaagctcgacgatccgtccttcccggcgccgatctacgccaacctcttcaagggcgagaccgactacaccctcgtctggtcacgctgaccgaccgctaccgcgacggttcgcccgccgagccgtcgcggctcttccctcgggattatgtggagcgcggcgagcccgaaacccgcggaaaacctgcactcaga

SEQ ID NO: 263 - DNA, 59170 bp, Bradyrhizobium colbertium
  misc_feature (27673)..(27682): n is a, c, g, or t
  misc_feature (28172)..(28181): n is a, c, g, or t
  misc_feature (36895)..(36904): n is a, c, g, or t
  misc_feature (43749)..(43758): n is a, c, g, or t
gccggcggcgcggccgccggcggtcccttcggcggctgcttcggcctcccgtcaggcccggcctccggctgggcctgtgcgagcacgagcggcggcgcactttgcgcatgcgatgcggagcttgccaattgcatcgcggtcagcgccgtcgttgcaagcagcacgaaacgaaggttggtcatggtggtgaacttccccggaaggttctttgacgaagtgttgggatgaacagctaggcgttaggccgcattgtggcgggtggtgtcgtcgcggccgaatttatttctgcaccgaaatcatctcactacggcaacgttcattgcgcattcagaccctgcttgcaatcgcctcacatgcgatgagccagcctcaagcgtaaccgcgcgacgaactcgcgtccgtcgcagggttcggcgtcagcggtccattcggaccgcgcgatggaatctcttcgggcacgcggcccggcaattcgtcggggctcggtgattcgcccggctcgcggaccggcggtgtgatttcgggctgcggattgccgggcgggactccgagtggcggctcggtcggcgtgcctggtgtcgagggtggaatctcgggcggttcaatcggcatcacatcgagaccttgcggttctcgccgagatcggggcgcgtattcgtgactgcagcggccgccatcttcacataggagatcaccgtccccggcgagtcccagaattcggcgtcatcaggcgtgatcttgagcacgcggatgttgggatcttccgcggagtcccaccatgccttggcgggtgtcgagaacagctccttgatcttggcacggtcgttggagatgacggcggtgcccgtcagggaaacgtacttctggctgccggcctcggcgaacgacaggttgatcgacggatcgcgcgcgatttcctcgtccttgtgattgcgcgcatcggtcaggaagaaaatcgtgttcgcggcgcgatcgagataggcgctcatgggccgggcacggagcttgccgccgtcgcgtgtgacaagcattgcgaatccgattgtcttcatcaggtcccagacgcgatcgacgtcgcgggcattgtcgttggccatgtcgtgctccttgctggaaggaacaataacgacctgccgggaacgatgttcccctgggaatcctcgctattccggcgcgtggcagacggcctcgatgttgtggccatcagggtcgagcacgaatgcgccataatagtccgcatggtaatgtgggcggatgccgggcggaccattgtcgcggccgccggccgcgatggccgcgttgtagaacgcatccaccgtagcgcggtccttggcgcggagcgcgatatgcaccggcttgttcatggcgccgtcgccgccgaaccagaagtccggcttgccgtccgctccgaaacctgcggctgcggcgtgaccggtctgctccgccgtcacttccatgattagcccatagccgagtggggccagcgccttcgcatagaacgctttgcgcgttcatagtcggagaccgagatgcccaaatggtcgatcatcgcaacctcttttgtctgccctcgtcagcgcgacaggaacgtattgcttcgtgtcttgcgcgcgatcgtaaagccgcgcgcgaccatgtcggcaatacaatcctgctgccattcgttttgtgacagatgctcgatcacgacagcgcgtggccacagcgatggcggcgcgtcgcggaagaatccgatcagcacgcggtcctcgaatccctcgacgtcgatcttgagcgaatcgacctgcgtaacgccggcctcgccgaggatgcgcgtcagccgcagcgacgggactttgatcgcgtcggtgctcgcggtgccggtaacgacatgcgtggcgccgagattgccgccgccgctctcgatcatcagctcgccatctttgtcgcccgcggccgcctgcaacaggcgcacctgcgccgctttcgatgcggactggttgaacgagagccgtgcgaacgtcagcgggtgcggctcgatcgcgaccaccttacccgtgggcccgacctgccgcgccatcaccagcgcaaaggtgccgacattggcgccgacatcgacgaacacgccgccgccggacgtgtgctggcgcaggaaatccagctcgtcgagattgtactcgggattgaatagcgcgccgcgctcggtcgcgctgccctgatgatagaaccggaaagaggcgccctgatattgcacgtccacagggccgctgcgcacgaggttcaccagccgcgacatccagggccggaaggcgccgcgcttcagtcgcgatcgttgagcgaggcggatgatcgccgcctgcgccgcattcggcgcaaacgtgccgaacggcgcggacgaagaattgttgtcggtcgtcaaacaggcggtcctcattgcaagcggcgcatgcatagccggttttgcgaggggccacaatttcagtgtcggtcgggacgcgaaccgagccccgggacgagggcgagaaaggcccccggcatggtgcgatgcgcgacgccgacgatgggtgccttcggcagcgcatcggtggcccaggagcgcgtcctcggatagtccttgcgcgcctgcggtccgtttgtgcatgagcgggcaacgcgaagggaactcagtcggtccgcccgcgagttccccagggcacacctattcggcggcgccgtcgcgcacgcgccccagccgcgccgcgtggtgcagaacgcgcgacaattcctcgatcgaatagggcttttgcacgaggtcgcagccggcagtgccctcttgtgaaagggcctgactgtagccggtggtcagcacgacggggacgccgatgccgcggtcgcgaactgccttcgctaggtcgagtccggtcatcccgggcagcgccacgtccgagaacacgacgtcaaagcggtccgcgtccatgacgagctcggcgagtgcgtcgtttgcattgtcgaccagcgtaatgctgtagccgagttcggtaaggccatcggcggcgaaattggcgagctcgatattgtcctccaccaccagtacggacatgccgctgccggctaccgccggcgctgtgtggggcgcctgctgttgcggcagcaggtcaggcgacacgcgcggcagatacagcgagaaggcgctgccgcgccccacctcgctcgccacggtcacttcgccgccggactgccgggcgaagccgaacacctgggacaggccgagaccggtgccgtggccgacctgcttggtggtgaagaacggctcgaagatgcgcccgagcctggctgcgggaatgccgacgccggtgtcgctcacggtcacgcagacgaagccatggtccgccaaggcctggttcgccgaaagctgcggcagcgtctgcggaacggttgtcgttggctcgaccctgaagacgattctgcccttgccctgcatggcatcgcgcgcattggtcgccatgttgatcagcgcggtctcgaattggccggcatcggcattgacgaggcaaggctccgccggcagccgcatcacgatttcgatcgcagaacctagcagcgtggcgagcatgtcgtgcagcgagtgcacgcgcgccccgacgtcgaacacctccggtttgagggtctggcgccgcgcaaaggcgagcagctgcgaggtcagcttggccgcgcgcgcgaccgagtccgcaatggccgtgatgtagcgctgtcgccgctcctccgtcagttgcggccggttcaagagatcgaccgaagcgcggatcaccgtcaggagattgttgaagtcgtgcgcgacaccgccggtgagctgcccgagcgcctccaggcgctggctgtgcttgagcgcctcctcggcctcgcggcgcgcggcggcttcggcatgaagatgctgggtgcggcggaaggcgaaggcgagcagcaggaacagcagcgcggtggcgggaatgccgaacaccagatgctggccgatggtggcgagccagcgcgcgcggatcgccgaggtctcgagcccggcactgacatagatcggataatcggtgatgcgtcggtagccgatgcggcgttcgatcccgtccggcggccaaacgatcgtcatcagcccatgctcggggctcgacgcaatcttttggccgaccgggccgcccggatcaagccgcaggtcgcggtcgagccgcgggaaatgcgcaagcacggcgccgtcggcgcgtcccattgcgaagaagctgccggggtcggagccgatcctggcgtagaagctctcgaagtattccggcaggacagaggcctggatcacgccgatgaaattgccgtcgtcggaatcgcggcggcggctcaccccgaagaagcgcgcgccctgatagggtggacgcggcgccagggccgtgccgatgaacgtgccgatgctctggtcgacatgggcatagaaatagtcacggtcggcaaagcccaggtccggcggcggcgaggcgaggctgttgaccagcgcctttccatccgcgtcgaaaatccatgccgatttgagctgcggcagcgaatcggccaggcgcttcaggcgaagatgcagcgtcggctcgcgcgcgcggatgacgtcgtcggaaaggccgcgcacgacctcgttgagttcggcgaggctgcggtcgatcgtctcgaacaccttgagtgcgtgctcatgcgcgacgtcgagcgtgcgctcgatctcgcggtcggcgatgtctgtggtcgaggtgtaggaaatcgcggaagtgatcgcgaacagcgcaaccggaagcgccagggatgcagccatcatccactgcagcagtctgagcgatttgcgttgcgcgccctgcacggctcctgtccctgaccgcgagcttagctgaatttcgcgcaaagaaggaagccgattatcgctggaacccgtggttgtatcgtgatgagatcacgcgcgcgggcgtcctgcagcgccatgtcgcgctgcccggcaggcccctcgattcttggttcgaggggccaatgacacgagccagcactttggctgtcgctctcgagggcggcggttcagatgccgtgctcgctgcgcatcgcacgggcagccttctcgccaatgatgacgcaaggcgccatcgtgttcccggtggtgatccgcggcatcacggagccgtcggcgatgcgcaagcggtcgatgccgtagaccttcagcctgctgtcgaccacggacatggcatcgcgtcccatctttgccgtgcatgtctggtgccagtaggttacggcggagtcgcgcacgaaacgctccatcccggcagcgccgagagggccgggcagactttcgcgcgcgaccagcggctcgaaggcgcgggtattgccgagcgtacggcaaagatcgacgcaggcgactgccgtcgtcacatcgtcaggatgcgacagcatgttggcttcgatctgcggcagtgcaagcggctcggcgcttcgaagcctcaccctgcctcggctcttcggcaaggcaaggccggcgaacatcgtccagccatgggccggcgcccgccctgccgtctcacggctcggcaccggaaactcgacttggcagaacagcaggtcgggagtcttgagcgtggaacgggatttccagtacagggtcgccgcattgccggtgttgcgcggcgcgatcggctctcgatactcccaaatgcatccgaacgacacgtgatcctgcaggttctgtccgacaccgggcagatgctggaccaaagatatgtcaagtcttccaagctccttctcatcgccgatgccggagcgcatcagcactgacggcgtctggatcgccccgagcgcgagcacgacttcccggctcgcattgatccgcaagggacggccgtgacgtatcgcctcgacgccgacggccctcccgcgctcgagcaggatgcgtgagacgtgcgtgccggtgagcagagtgagattgggccgatcgagaaatggataagtataggcgcggaagatggagttgcgcctgccgttacggacaaggatgtccgtgactgcgcagccgccttcgccctccatcatctcgccgttggggctttcgaaagtcggaataccgatctccctcgccgcggcgagcatggccaacgcggccggcccgggatccggtgacggctgcacgaagacgggcccgccggtgccgcggtggcgcggatcaggcggtccttgccagttctcgatgtcccggaagattgtcgagaccgcatcgtagccccaggattgatcgccggtttcgtcggcgaagaaatcccagtcgctgcgatggccgcgcgcccacagcatcacgttgatactcgatccgccgccgagaaccttgcccatcgacatcgctagcgctcgcccgttcaagtgcgggttgggctctgcgacaaagccccagtccatcgcgctgccgagattgccgggccacgccgccgggtccatgacggtcggcacgtcgtcgctgccccccgcttcgatcagcaggaccgtgaccgccggattttcggcaaggcggcgtgcgacgaccgagccggagctgccggcgccacagacgatgaaatcgtagctgccgcgagaatcttcgttgagccggcgctggttggcggcaacgcggtccgcgaattccggcaggtcggagggcaggaagtcgttcatggtcatactccggtgaagctggcgatccggcccgtgcgacgttccgggcggatgccgttgagtgaaggaaagggggctagcgccggcgagacggccggcaagggcgccagggatcggaccgttgctgcagtttggatcgcgtgggatgcctgaccgagccagggttcggatcggctgctggaggctcgtgggcttggctggaagggggcggtccagaacatgatctcctccattcaagcgggcgcctccgggcagctcgcatatgccaagcggctcgaagacagtttatcagatctatcaaatctatcataatcatcgaatttatcaaaatagcactgaagtccccttgtcaacacaggcgggagcacgacattgtgaggtctggggcaaggccggccggcacgcggccgggggcaagatggacagcatggccaaggaaattctgacaacggcgggcgctgccaagatcctgggcgtctcgatccgcacggcgcagcttctgatcgaaggcggatcgatcccgtcctggaaaacgccgggaggccatcgccgggtctaccgccgcgacgttctggggctgatctccggtcccggcgcgttaccgccccttgcctccgcgcgggtggtcgtcattgcgcgcccggaacgcatcgttgattacgaagcagcgctggccaacgtgaaggcctgtgtcgtcgaaagctactcggatccctacgcggcgctgctcgcgataggcacccggttgccggccgcagtcgtggtcgaagccgaggcatcgggcgcgagcagacgggccatgctggagagcctgcgcggcgatcctgcgctgggacgcaccaaaatcctggttgtcggggcttcggcggcagatcggacggtcgacgggatcggacctgacatcagaacgacagtgttcgtcgacggattgccggcgttgcccgaagcgatcgacaccattttcagagccgccatcgagcacccggctccgttcgagacgccgccctcgtttccctttccggacaatgagggcgagcggcttctcgcgctcgaacgctccggtctgatcgacacgccgccggaggattcgttcgaccgcctgacctggctggcggcgcgcagcctcgacgctcccgtcgcgctcttgacgctgctgactccaaaccggcaatggttcaagtcgcgctatggactcgacatgtccgatacgccgcgcgactgggcgttctgcaactacaccatcttgcagaagggcgtcatggtcgccgagaacctcgcgactgacccgcgcttctcggaaaatcccgccgtgttgggcgaactgggatttcggttctacgctggctgcccggtgagcgatcccgacggcttcacactgggctcactctgcgtgatcgacacccggccacgcacgctggacgatacccagaagcagacacttgccaatctcgccgcgctcgcctcggacgagatcaagctgcgcgcaacggaccgccaattgcgctgggcaatcgatcaaggagtttcaaaagcgggcgtggcagtagcgcagcccccgcttggtaccaagcgtctcgcggagcatcactagaccagggccgccgcgagacgaggtgcgtcccagacgcaatcagatctgccgctcgaccatcttgagcttgagctcggcgatggcttcggccgggttcagccccttcgggcaggccttggcgcagttcatgatggtgtggcagcggtagaggcggaacgggtcctccagattatcgagccgctcgccggtggcctcatcgcgcgaatccgacacccagcggttggcctgcagcagcgcggcagggccgagatagcgctcgctgttccaccaatagctcgggcaggaagtcgagcagcaggcgcagaggatgcactcgtagagcccgtcgagcttctcgcgatcctcgtggctctggcgccattccttctgcggcgtcggcgaggtcgtcttcagccagggctcgaccgaggcgtactgggcgtagaagttggtgaggtcggggacgaggtccttcaccaccggctggtgcggcagcgggttgaccttcaccgcgccgtccttcacctcgtgcatcgacttggtgcaggccagcgtgttctggccgtcgatgttcatggcgcaggagccgcagacgccttcacggcaggagcggcggaaggtcagcgacggatcgatatggttcttgatccagatgaggccgtccagcaccatcgggccgcaatcgttggtgtccacgtaataggtgtcgacgctcggattcttgccgtcatcgggattccaccgatagaccttgaactcgcgaagctcggccgcgcccgcgggcttcggccaggtcttgccgcctgaaatcttggaattctttggaagtgcgaattcaaccataagtcctgcctctggttttccgcgtcattgccgggcttcacccggcgatccatcccttttcgaaagatggatgcgcgggtcatcaggtttgaagacgtcgcttcgcgccctttgcccgcgcatgacgagccctgatcaatacacgcgcgccttcggcgggatgtactgcacgtcgttggtcatggtgtagttgtgaaccgggcggtactcgatcctgaccttgccggcatcgtccagccaggccagcgtgtgcttcatccagttcttgtcgtcgcgttcggaaaagtcctcgcgggcatgggcgccgcggctctcggtgcggttggcggccgagttcatcgtcaccaccgcctgcgagatcagattgtcgaattcgagcgtctcgacgaggtccgaattccacaccagcgagcggtccgacacgccgatgtcggtgatgccgctgtggaccttcgcgatcagattctggccctcgctcaggacatcgccggtgcggaacaccgcgcaattgttctgcatgacgtgctgcatgccctcgcgcagcttcgcggtcggcgtgccgccggaggcgtagcggaaatggtcgaggcggccgagcgccatctcggccgagttcgccggcagctccggctgcttgccgttcggcgtgagcttctcggcgagacgaagcgcggcggcgcggccgaacacgacgaggtcgatcagcgagttggaaccgaggcggttggcgccgtgcacggagacgcaggcggcttcgccgatcgccatcaggcccgggatcaccgcgttgtcgtcgccgtccttcttggtcaggacttcgccgtgatagttcgttggaatgccgcccatgttgtagtgcacggtcggcacgatcgggatcggctcgcgcgtcacgtcgacattggcgaagatctttgccgattccgagatgcccggcaggcgctcggccagcacggcgggatcgagatggtcgagatgcaggaagatgtggtccttcttcttgccgacgccgcggccctcgcggatctcgatggtcatcgcgcgcgagacgacgtcgcgggaggcgaggtccttcgccgacggcgcgtagcgctccatgaagcgctcgccctcggagttgacgagatagccgccttcgccgcgcgcgccttcggtaacgagacagcccgaaccgtagatgccggtcgggtggaactgcacgaactccatgtcctgcaaaggcaggcccgcgcgcagcaccatgccgccgccgtcgccggtgcaggtgtgcgccgaggtgcaggacgcataggcgcggccatagccgccggtcgcgagaatgacggtctgggcgcggaagcggtgcagcgtcccgtcgtcgagcttgagcgcgatgacgccgcggcaggtgccctggtcgtccatgatcaggtcgatggcgaagaactcgatgaagaactcggccgcatggcgcagcgactggccgtacatcgtatgcagcatggcgtggccggtgcggtcggcggcggcgcaggtgcgctgtgcctgggccttgccgaactcggtggtcatgccgccgaacggacgctggtagatcttgccgtcctcagtgcgcgagaacggcacgccccaatgctcgagctcgtagaccgcctcgggcgcgttgcgcaccatgtattcgatcgcgtcctggtcgccgagccagtccgaccccttcacggtgtcgtacatgtgccagcgccagtcgtccttgtgcatgttgccgagcgaggcggagatgccgccctgcgccgcaacggtgtgtgagcgggtcggaaacaccttggtgatgcaggcggtgcgcaggccggcctcgctgcagccgaccacggcgcgcaggcccgcaccgccggcgcccaccacgacgacgtcgtaggtgtggtcttcgatcgggtaggctttgccgttggtggcgggagcgccgttgcccttgccattgatctcagcggccatgggttacactccggaggaaagtttcaggatcgcgtaggtcgaggcgagcgccacggcgaccgagaagaaattgttgagcatgatcgcggtgagcttcagcttctcgttatggacatagtcctcgatcaccacctgcatgccgatcttcatgtgccaggcgctggcgaagatgaagaggagcaggatcaccgcaacgggaatggaactcagggtctgcgcagcgtagacttggttgcggccgagcagcatgacgatgatcaccagcgccgggatgatcagcagcgtcatcgcaacgccggtgatgcgctggcgccagaaatcggacgtgccggaatgcgcggcgccgagattgcggacgcggccgagcggcgtgcgcatcgaggggcgcttcggagagccgtgggattcgtcgaaactcatcggccgcctccgttcgcataggcgatgatccagatcagcaccgtcagcgcgatgccgccgatcagggcgccccaggtcagtgcttcgcgctcgttgggtttgaagccgtagccgaggtcccagacgaaatgccggatgccgctgagcatgtggtgcatcagggcccaggtgtagccgaacacgatcagccggccgatgatgctgccggcaaaggcctgcacgtgggcgtaggcggtcgggccggaggccgcggcaaccagccaccagaccagcagcagcgtgccgacatagagggcgatgccggtggcacggtgaacgatggagagcgccatcgtcagggtccaccgataggtttggatgtgcggcgaaagcggtcgttcgatccgtgcggtcatgggcggcttttgatgtttgttgcggcccagcagggcacgcggggatcgcgaaagggtcggctctatttacggagtcgattgggcctgcgcaatcaccaaatcgccataaatcgaacgcgcgttcagctctatggccttgatgaaacagggtcaatccccgttctggtataccagaaggcaggtccgccaacgaacaaatgatctcaagatcacttcttgtgccgtgctgcgagacacattgaaattactattggaatgcctctaatgcacggggtcgccgccctgggccgccgctgacgcagccctgcccctgattccccggctcgagtctcgcacgcgcccggcggcaatgcgcaacggcgaccgatatgcgcgacccgcaatccacccccgccagcaacctggcctgtcgaccggatcaagcagatcgcctactgctccgcacagcaagttccgagctgacgtcacggacgagctgcgaccagtgggggggagggggttgattcctgctcttgatctcaaggaaatcgtcgagctgaccctgctgctgatcgcaacgggcgcggcctcgggctttctggcaggcgtgttcggcatcggcggcggcgccattctggttccggtgttctacgaatgctttcgcatcgccggcgtgccgctggaggtgcggatgccgctctgcgtcggcacctcgctcgccgtgatcatcccgacctcgatccgttcgttgcgagctcactacaagcggggcgcggtcgacatgacgatcctgcgcgtctggtggctgccgatcctgatcggtgtcgtcatcggtagcgtggtcgcacgctatgcgccggagcggctgttcaagatcgtgttcgtcgcggtcgcctggtcggccgcggtccggctgatcttcgcgcgcgagacctggaaactcggcgacgatctgccgaagggtccattgatgcgcgtctacggcctctgcgtcggtctgctctcgaccttgatgggcatcggcggcggcctgttctcgaacctgctgatgacgttctacagccgtcccattcatcaggccgtcgcaacctcctccgcgctcgcggtgctgatctcgattcccggcgcgctcggctacatctatgcgggctggccggcggcggcgacctatcccggtgtcgcagcgctgcaagtgccgttcgcgctcggttatgtctcgctgatcggtgccgtgctggtgatgccgatgagcctcgtcaccgcgccgctcggcgtgaaagcggcgcatgcgatgtcgaagcgcacgctggaagtggcgttcgggtgttatctgttgatcgtcggcggccggtttgtgctgagcctgctgggcgggctgtagccgccacatccaccgtcattgcgagcgaagcgaagcaatccaggctgtctccggggaacgattctggattgcttcgccgcaagtgctcctcgcaatgacggggaagagagaagagcccagaaatcgcaaggcggactgatccttcagtcgcacttcgctacccaaccaatcccggagattgccgatgccttcgatgcgatcggagccggaaagcaccttcaggccgcgatgctcactcgggcccggtctagggcgctataagcatcgaggagatgatcgttgatccgggcagcctgctcgcgctgcatgcatttccccagccctggagcttttgcccctacttcttcgcgtaaatgtccttgtacgtctcgcgcagaatgttcttctgcaccttgcccatggtgttgcgcggcagctcgtccacgacgaagacccgcttgggcatcttgaatttcgcgaggcgcccgtccagtcccttcaggacagtcgcttcatcgatgctcgcgccgggctggcgcaccagcaccgcggtgacgccctcgccgaaatcggcatggggcacgccgatcaccgcggattcgacaacgccgggcatggcgtcgatctcgctctcgatctccttggggtagacattgaagccgccggaaatgacgagatccttgccgcggccgaggatgtggacgtagccctttgcatcgatcttgccgaggtcgccggtgatgaagaagccgtcgggccggaattcggccttggtcttctccggcatgcgccaatagcccttgaagacgttcgggcccttcacctcgatcatgccgatctcgtcgcgcggcagctctttccccgtttcgggatcggtcacgcgcacggagacgcccggcagcgggaagccgactgcgcccggcacgcgctcgccgtcgtaggggtttgacgtgttcatgttcgtttcggtcataccgtagcgctcgagcacggcatgtcccgtgcgcgccgaccattcgcgatgggtatctgcgagcagcggcgccgagcccgagatgaacaggcgcatgtgcttggtcgtctcgtgcgacagggccgggttctgcagaagacgcgtgtagaaggtcggtacgcccatcagcaccgtcgcgcgtgccatcagcttgatgatcaggtccggatcgagcttcggcaggaagatcatcgaggcccgcgcgaacagcgtcacattcgtcgccacgaacaatccgtgcgtgtgataaatcggcagcgcgtggatcagcacgtccttgtcggtgaagcgccagtaatcgaccagcgagagcgagttcgaggcgagattgtcgtggctgagcatcgcgcctttggagcggccggtggtgccggaggtgtagagaatggcagcgaggtcgtcgctcgcgcgcggcacggtcgtgaactcgctgcccgccttgtctgcggcctccgtcagcgaacccttgccgtcagccccgagcgtctcgaccttggccttcaccttgcctgcgatcggcgcgagcccttccgccttcgatggatcgcagaccacgagcgacggctcggcatcgccgatgaaatagtcgagttcgttgagcgtataggccgtgttcagcggtagatagaccgcgccggcgcgcactgtgccgagatacagcacgatgttggcgacggacttctccacctgcaccgcaacgcggtccccgggtttcacgccgcgggcggccagcacgttcgccatctgcccggcgcgtgcgatcagatcgccatagctgatatgggcgccgtcatacgtctcgatcgcgagccgtttcggatcgtccaggccgtcgaacaggcgggaaaacaggttggcgttggcagcttggttcatgcaacattcctcgccggcagaagccggtcaaaaccgagggctggattagcaaaaaccgccccgtagaagcaacggagacagtttgcatgtcaaaaagcgggaaacgcgtggcctgggtcacgggtggcggcagcgggatcggggaggcgggcgcagaggcgctcgccgccgatggctggacggtggtggtgtccggccgtcgcaaggatgcgctggatgcagtggttgcgaagatcacgaaagcgggcggcgcggccgaggcgatcgcgctggacgtgtccaacgccgccgaggcgcagaaggcggcggatcagatcgtcgcccgacacggccggatcgatctgctggtgaacaacgccggcatcaacatccccaagcgcagctggagggacatggaactggaaggctgggacaagctcgtccaggtcaatctcaacggcgtgctctactgcatgcgcgcggtgctgccgacgatgcgcaagcagcaggacggctcgatcatcaacgtctcgtcctgggcgggccgtcatgtctcgaagatgccgggcccggcctacaccacgaccaagcatgcggtgctggctttgacccattccttcaacatggacgaatgcgtcaacggcctgcgcgcctgctgcctgatgccgggcgaggtggcgacgccgatcctgaagctgcggccggtggtgccgagcgaggaggagcaggcgaagatgctgcaacccgaggacttgggacgcaccatcgctttcatcgcgagcatgccggcgcgcgtctgcatcaacgagctgctgatcagcccgacacacaatcgcggcttcatccagacgccgaacagcagggattgagacgcaaagaccgcgcggcaaaatctcctcgtcgtcccggggcgcgacgcagtcgcgaacccgggacccataaccacagggagtagtttggcgaagactcggagtgaccatctcgtgtcacgacatctgcctggggctatgggtcccggatctgcacttcgcttgtccgggacgacagcggagcgcgagaggttcgccaacacgaacatcgcccccgatagtttcaagcatcacaaagaatttttccccgaaaccgcaacgcaaagcctcccgtagttcggtccaacgacggcactgcttcatcacctcaactgtcgcaggtgccgttgttgccaactcaacgccggccgtcgccggctacggttcaatcgggagattctccatgtccaagcgcattgcctatcttgctgccgccgccttcagcgccctcgccatcaccgcgaccgtcgtcgcgcctgttagcgccgaggaaaagaccgtcatggtcggcggcgccgcgatgtacccgtccaagaacatcgtccagaacgcggtcaactcgaaggatcacaccacgctggtggcggcggtgaaggcggccggcctggtgccgacgctggaaggcaagggcccgttcacggtgttcgcgcccaccaacgcggctttcggcaagctgccggccggcaccgtcgacaacctcgtcaagcccgagaacaaggcgacgctgaccaagatcctcacctatcacgtcgtgcccggcaagctcgcggccgccgacctctccgacggcaagaagctgaagaccgccgagggcgaggagctgacggtcaagaagcaggacggcaaggtctggatcgtcgacgccaaaggcggcacctcgatggtgacgatctccaacgtcaaccagtcgaacggcgtgatccatgtggtcgacactgtgctgatgccggcgacgtaacaccacgcgatcctgtttcttccccgagcaggatgcttccagaccgcgagccggggatacccggctcgcttttttgtgaccacaatagcctcgcggtatcgattccatggcggacagggcgtaacgaaaaccgaaatacaggcgtataattgccatcgcacggaccttcaggacggaaccatcatggcgagcctcacagtcaccgacgagcaggtcggagccaccccggccaaagtcatccagccggcctgggtccggatcatgcactggatcaacgcgcttgccatgatcctgatgatcctgtcgggctggcagatctacaacgcctcgccgctgttcgacttccgcttcccgcgcgaatacacgctcggcggctggctcggcggcggcctgctctggcattttgccgcgatgtggctgctgatgatcaacggactcgcctatctcatcaccggtctcgccaccggacgcttccgaaaaaagctgctgccgatcacggcgtccggcgtgcttcacgacgtcagggccgcgctgaccttcaagctcggccatgacgatctcaccgtctacaattacgtgcagcgcctgctctatgccggcatcatcgtggttggtgtgctgatcgtgctctccggccttggaatgtggaagccggtgcagctctattatctcgtgatgctgttcggcgattatccgaccgcccgctatgtgcacttcttctgcatggccgcgatctgtgtgttccttgtcatccacgttctgcttgcgctgctggtgccgaagagcctgcgcgccatgatcatcggccgctgaggaggagactatggcgaagcgtccgttcctgattcccggcgtcgacaggcggctcctgatcaaggattccctcaagacgatgccagatgtcacccgccgccgcttcattgcgggcggcgccagcctgggcgcgctgacgctgctcaccggctgcgacgtcatcgactcctcctcggccgaaaccatgctcgccaaggtctcgaagttcaacgacgccgtgcaggcgtggatgttcaatcccgacgcgctggcgccgaccttcccggagagcgcgatcacgaagccgttcccgttcaacgcctactacgatctcgacgacgcgccggacatcgacggcaaagactggaagctcgaagtgcgcggcctcgtcgacaacaagaagtcctggacgctggatgaactctatcaattgccgcaggtcacgcagatcacccgccacatctgcgtggagggctggagcgcgatcggcagctggaccggcacgcccttgcgcgatttcctgaaactgatcggcgcagacacgcgcgctcaatatgtctggttccagtgcgccgacaaggatggctacaactcgccgctcgacatgcgcagcgcgctgcatccgcagacccagatgacgttcaaatatgcgaacgatatcttgccgcgcgcctacggtttcccgatgaagatccgcgtgcccaccaagctcggcttcaagaatccgaaatacgtggtctcgatggaagtcaccaacgactacaagggcggttattgggaagaccagggctacaattcgttcagcgggagctgagagggcgaatagcgaataggggcgaggccgattctatcgctactcgctactcactgttcgccttcggccccaccttcctctggcacagcgccgccacggcacccagcgccagcagcgccgccgacacgttcagcgcgtagctcaggctgcccagcgcatccgtgatcgcgccgactgcgatcggaccgagcgtctggccgacgccgaacgagatcgtcatcgccgcgatcgcggtcggccacacctctggcggatagttgaagcgcacgaaggccgtggttgagccgaccacggcgaagaaagcgacaccgaacacgaccgccgacaccgcaagccatgccggcgaatgcccgagcatcggcagcgctgctcccagcgcgttggtgccgaggatgatggcggtggcgagtccaccccgatcgagcgccagcacaccgcgccaggcccagggggtcacgaacgcgctcagaccgatcaggccccagaacgcggcctgcgccgcggccccgccgccgccgtcccgcacataggcgatcatgaaggtcatgtaggcgatgtagccggcgccgaacaggaagtagccggcgaggtagatcagcacgggtcggatcgcgaaggaggcgtggccgccttccgagaaacgcacgccgctctcgatgcggatcagaaaaaggggaatcgtcatcgcgatggacagcagcgtcagcgcccaccacacgatccaccacgagccggagccgaaatattgcagcgtgaacggggagatcagccccgaggccagaatgccgatgccgggtccggcatagaacaggctcagcaggaaattggcccgctcggggcgcgactgcgcgatggtcgcagccagcgcgccgccggcgacgaagccggccgcggcgccgaggcccagcacgaggcgcgcgaggctcagcgcgacgaaatttcccgtcagggcgcacgtggcgagcgcggcgacgcaggccaaagttccgccgcggatcgccgccgaccagccgacgcgctggatcagccgggacgccatcagcgcgcccgcgagatagccgaccgcgttgatggtgttcatgaaaccggcagccgagtaggaccagccgaggttctcccgcatgtcgggcagcaccaaagcataggcgaagcggccgatgccgagcccgaccgtcgccgccagcgacagtgtcaggatcagccgcgcgggatgcgcgtagggcgggcggtcaggggcgtgcaaggggtgctccggccggcgcagtgtggcaggccctgctcgtcttgcacagcggcgcggcggcaatggtgtcttgccaagcgcgcaacgccgctctagcactccggccatccgtcattccggggcgcgcgagctatggtgcgcaattgcgcacctgagaatccatttccccgcctgcgctgtggcctgatggattccgggctcgctcgctttgcgcgcgccccggaatgacgagagaggatcgaagaggacacgaccatggcgacccacaaactgctgctgctccccggcgacggtatcggccccgaagtgatgggcgaggtgaagcggctgatcgactggctcaattcggccgggatcgccaggttcgagaccgacaccggcctcgtcggcggctccgcctatgacgcgcacaaggtctcgatctccgagggcgacatggccaaggccaaggaggccgacgccgtgatcttcggcgcggtcggcggtccgaaatgggatgccgttccttacgaggtgcgccccgaagccggcctgctgcgcctgcgcaaggacctcgcgctgttcgccaacctccgccccgccgtgtgctacccggcgctggcggacgcttcgagcctgaagcgtgaggcggtcgaggggctcgacatcatgatcgtgcgcgagctcaccggcggcgtctatttcggcgagcccaagaccatcaccgatctcggcaacggccagaagcgcgcgatcgacacccaggtttacgacacctatgagatcgagcgcatcggccgcgtcgccttcgagcttgccaggaagcgcaagaacaaggtgacctcgatggagaagcgcaacgtcatgaagtcgggcgtgctctggaacgaggtcatgacccaggtccacaagcgcgaatatcctgatgtcacgctcgagcatcagctggccgattccggcggcatgatgctggtgaagtggccgaagcagttcgacgtcatcgtcaccgacaacctgttcggcgacatgctgtccgacatcgcggcgatgctgacgggctcgctcggcatgctgccgtcggcctcgctcggcgaggtcgacgtcaagagcaagaagcgcaaggcgctgtacgagccggtgcacggctcggcgcccgacatcgcaggcaagggactcgccaatccgatcgcgatgatctcgtccttcggcatggcgctgcgctattccttcgacatgggcgatctcgccgacaaggtcgatgctgcgatcgccgcggtgctcgccagtggtctgcgcaccgccgacatcaagtcggaaggcaccacgtccgcttccaccacgcagatgggcgaagcgatcctgaaggaattgcagaagctgcacgcgtaagcggcggcgtcattccggggcgatgcgcagcatcgaacccggagcgacgtgtcccaaacaaaaaggccgggcgagagcccggccatttgattcgcgacgtccgttcagtacagcgggaaggtctgcgggtagccgccgacatcctgcggcggcgagagcggctggcgatcgatcggacggttcaggttctcgcgggcgaaggacggatagcccaccgccggcgggaaggcgtagtcggtgaacttgcggtcgcccggattaacctcggtgccgccgtcgagccaggagcgcttgctcacgtagatgcgggtgcggccctgctgatagacggcattgggaccgctcgggccgtaataggggcggccccgctcgtcataatagcgcttggtcttggtgtcggccgaggccggagtcgcgaacgcgatggcaattgcggcgcccgccgcaagcaatgtcgccagtttgttcgcggcagaaaatttcgagctcatcacgtccccttcaggcggcacgccgccagtcgatttcaccccatactagcccggcgggggtgaccgcaactaggtcaattgggtcacaccggcccggaataatcgggcgcgccgtcaaaagttgcatcaataccagccacttgagcttgatgcggctcaaagcgtcccgcgcaattgcgcgttcgcatgaccgagcagccagtccgccgcagccgcggggtcacagccgcggcgcttgagctcggcacgggcgaacaattccgccagcttcggctcattgccggacgtgagcagcgtcagccggttcagcgtgcaggcgatggccgcgcgccgggcgggcagggtgtcgccccggcaggagaagccggagatctgcagggcaggttcttcgctgcgcttgaggtagccgaggcacgcccgctcaccctccatcgttccggttggccggaacagggcgaccgggccgaacttggtgtcgatcaagccggccagctcgaacggagtggacgcctccgcgcccatctggacggccagatccgccgttgccggacgcgccacgtcgaattcggcgccttcccggtaaacctcgagctcggccacgggcttgcccgccgcgtcggcccagcgcagcacatccttgcggccgccttcggggtgccgcaggatggtataagacattgttttgtcagccgaatcgaatcggctgagggtgaaggccggatgcgagcggccggcgacgccccagcccggcctcggagccggctgatcgccccgaagctcgggcagatggccgagtgcggcaacgcccaggatggcaaacagggcgagcgcccccacataggcaatcaggtgcgccagcgtgccgacgacctcgtcggcgaaagctagaagcgtcagatggatctgagtggggcttacggccgtgctggcctcaggcgactgcatccacggccttcaggcatggtccaacgttgtcttgaggccggttctcgcatagaagcgctgctcttcctgtttaagcgtcagctgcaggaacgggctttttcgtcggagagtgaacgatgggttacaaagtcgcagtcgtcggcgcgaccggcaatgtcggtcgggaaatgctcaacatcctggacgagcgcaaattccccgcggacgaggtcgtggccctggcgtcgcgccgcagcgtcggcgtcgaggtgtcctatggcgaccgcaccctgaaggtcaaagcgctcgagcattacgacttctccgacgtcgacatctgcctgatgtcggccggcggcgcggtgtcgaaggaatggtcgccgaagatcggcgccgccggcgccgtcgtgatcgacaattcctccgcctggcgcatggatccggatgtgccgctgatcgtgccggaggtgaacgcaggcgcgaccgagggcttcaagaagaagaacatcatcgccaacccgaactgctcgaccgcccagctcgtggtcgcgctcaagccgctgcacgacaaggcgacgatcaagcgcgtcgtggtctcgacctatcagtcggtgtcgggcgccggcaaggacgccatggacgaattgttctcgcagaccaaggccgtctacaccaatgacgagctggtcgcgaagaagtttcccaagcgcatcgccttcaacgtcatcccccacatcgacgtcttcatggaggacggctacaccaaggaagagtggaagatgatggcggagaccaagaagatccttgatcccaagatcaagctctccgcgacctgcgtgcgcgtgcccgtgttcgtcggccactccgaggccgtcaacatcgagttcgagaatccgatcagcgcggacgaagcccgcgagatcctgcgcaaggcgcccggctgcctcgtcatcgacaagcaggagcccggcggctacgcgacgccgtacgaggcggccggcgaggacgccacctatatcagccgcatccgcgaggacgcgacggtggagaatggcctcgtgctctggtgcgtgtccgacaatctgcgcaaaggcgccgcgctcaacgcgatccagatcgcggaagtgctgatcaaccgcaagctgatcagcgcgaagcagaaggcggcgtgagaggtggcgagtagggagtagcgaatggcgaatggagttccccattcgctactcgccattccctattcgccgtttgccttcttgaattccttcgacgccttgtccagcacgaacagcgacccctccgcgacgccgaaataggcgccgtgggtctgcatatggccgctctccacggccttgcgcacgaacggaaaggtcatcaggttttccaggctgcggaacaccgcggccttctcgatgcgctcgacgaactgcgccatggtctcgtgatcgcgctgctcgaccacttcgcccggcttgatgaacatctgcatccagcggccgatgaagtcgccgggcgtcagcggctcgatcttgtcgacgaaggcgcggatgccgccgcattgcgcgtggccgaggatgacgatgtgcttcaccttcagcaccgtcaccgcatattccagcgcagccgagacaccatgggcgttgccgtcgggctgatacaccggcaccagattggcgatgttgcgcacgacgaacaattcgcccgggccgacgtcgaagatcacctcgggcgagacgcggctgtcgcagcagccgatcaccatcacttccggggcctgtcccttcaccgacagttcgcgatagcgggtctgctcggtcggcagccgctgggtggcgaaggccttgtagccttccagcaaatgcttcgggaatgtcatcatacctatgcctaatcatagaccgcaggggcgaacaagcctttcgaacgggcaggccaagtgctatccgctcagccggaagagagacgaggaaggaacgctcgcatgacccgcccgcgccgcagccatctgttcatgcccggctccaacccccgggcgctggaaaaggcgcgcaatctcgccgccgacggcttgatcctcgatctggaagactcggtcgcccccgaggccaaggcagcggcccgcgacggcatcgccgctgcgatcgcggccaagggctttggcaagcgcgagattttgatccggaccaacgcactcgacacgccctggtgggtcgatgacgtcgcgatggccgccaaggcttcgcccgacggaatcctggttccaaaagtttcaagcattgaagatctcgggacgatcggccgcaagctggccgagctgggcgccgcgccgaccgtgaaggtctgggccatgatcgagaccgcgcgcgccgtgctgcatgccgaggagctggctgccgctgggcgcgatccatcgtgccgcctctccggcttcgtgttcggcccgaacgacatctcgcgcgagacgcggatcaagatgctgccgggccgcgccgcgatgatcccgatgatcacccactgcatcctggcgacgcgcgcccacggcctcgagatcctcgatggcccctacagcgacatcgccaatcccgacggcttcgctaccgaatgcgcgcaaggccgcgatctcggcttcgacggcaagaccctgatccacccttcgcagattgatgcctgcaacgcgatcttcacgccacccgaagaagagatcgcgcgcgcccgaaagatcatcgccgcgttcgagctgcccgagaacgcatcgcgcggcgcgatccgtcttgacggcgcgatggtcgagcgcctgcacgccgacatggcccggcgcacgatcgatatcgcggacgcgatcgcggcgatggggaagggctgaaaaaggaacgtctcgctcctcgcgggctgcgcagcggcattgctgccgtctatgggctgcgactactttcgcctcgcgttcttcagagtctccgacggcagctcgccgatcgcccgccgatactcggatgcgaagcggccgagatttcggaagccgcatttgaaggccacggcgagcacgctggtctgctcgtcgggccggcgcagcagctctgccgcgtgctgaagccggacgcgccgcgcgaactggccgggcgatcctcgcccggtatctgagaactcccggaagacagtccgcacgctcacgttggcgatctccgcgatcctttccagatcgaggggttcgttccaatgcgcctcgatgtaggactcgacgaggtcgatcacggtccggttggcgctcggggcggagcgctgaagccgatcggaaaaattgtgccggtgcgccaggagaattcggaccatcagcgcccgctcgagctcggcgatagcgatgggtgagtagtcctgtccgaatctttccagctcctccgccaacctgaagacttcctgccgcacatgcgtcatgaccgcaggatcgccttcgtccccgacgaagcgcagcttcatgtcgctgccgtcgccgatcatgatcttcagcaagcgctccagcgcggcggcatctatcctcaccaccagctgccggtagcccggcgcgaagtcgagatcgagcctggcgtctccggagatgattgggctccaggcttcgatcggctggctatttccattggtgctgaaccgcgctcctccctggatggagaagaactggcggaggatctgcgattcaggaaaggaaagcgatgccgctccgtcgtaggcgcagaaggcgaggcccatcgaattcaagcgggcaagattggcctggatgccgaacgcgttgtcatgcgtgtcgaagcggtcggcgccatacaccgcgaacaggcggtcgcgcgcgaactcgctgtcgcgcgaacgaagtaaaggatagcggtcaagataagagacggcgcccaaatcagattcctaaaacgttcaaactactgaatccgaatcgcagcgctaccaatttcagattgcatgtaacgtcgtgcaggcgcggctggatttttgcgcgaagcatgtccgttgaattactgctgcggcgaaatgtccacgcgctgggcgtaggtgcggtcgccggcctttcgccggccggtccgtcgcaccagcggtacatcgatgctgccaccgcggccgctttgccgaattgcgatagtggtcttagggccaccttcgcggattcttggccgctgccatccgcgacaggctcgcgcgtcgctgtcaggttaatcgtcctggcaaaatccggccattgtgtcttcgatcggacaaacactctgataattcgattcagatacctccttggtgcacgaggatggcgtgtcggacgagaactcggccctcaccaaatcctggcaacagacatgaatgctgaagccgcctcgcgcgaacgcgctgcgagcgggagcatcactttcggagcaggtataatgttcggtcgcagatcccacggcgatgcgcaggcgcagattgatgcgatcggccgttcgcaggccatgatcacgttcaacacggacggtacgatcgtcacagccaacaagcatttcctggacttgctcggatacggcctcgaccagatccagggcaagcatcactccatgttcgtgccggccgatcagcgcgacggcgcagattaccaggccttctgggcggcactgcgccgcggtgaatgcagggccggcgaattcaagcgcatcgccaatggcggccgagagatctggatcgaggcgtcgtacaacccggtgctcgacgatgccggcaagcccgtcaagatcgtcaagatcgccaccgacatcaccgccaagaagattcgcggtttgaccgaggcctccaagatcgccgctatcagccgcgctcaggccgtcatcgagttcaagctcgacggcaccatcgtcaccgccaacgagaatttctgcaaggcgctcggcttttcgctggcggagatcgagggcaagcatcacagcctgttcatgccgccgcaagcccgcgacagcgcggcctaccgcgagttctgggagaagctcaaccgcggtgaataccaggccggcgagtacaagcgcatcggcaagggcggccgcgaggtgtggattctcgcttcctacaatccgctgctcgacgagaccggcaagccgttcggcgtcgtcaagttcgcaaccgacgtcactgcggagaagctgaagaacgccgatctcgccggtcnnnnnnnnnngccgccaacgccaactttcttgccacgctcggctattcgctggccgagatcaagggcaagcatcacagcatgttcgtcgagcccagcgagcgcgacagcgtcgcctatcgggagttctgggccgccctcaatcgcggcgagtaccagtcggccgagtacaagcgcatcggcaagggcggcaaggaggtctacatccaggcctcctacaatccgatcctcgatctcaatggcaagccgttcaaggtcgtgaagtacgccaccgacaccacaaaacaggttctggtccgcatgggcaacgagcgcgtccgcgccatgatggaatcggttgccgccggctccgaggagctcaacgcgtcggtgcgggagatttccgaggccatgaccaagtcgcgcgagaccgcgatgggcgcagtggagcaggtctcctctgccgacgcgcaggcgcagcgtctcaccgacgccgcgcaggcgatgagcggcatcgtcgagnnnnnnnnnnggcaggccggggctttgcggtggtcgcatccgaggtgaagggccttgccaaccaggccaagcaggccaccgacaagatcgctcaggagatcggcagcctgaaccagatctcgggggatgttgtcggctccctgaatgcgatcaagcaggcgatcaacaatgtcagcgagtacgtgacgtcgacggccgcggcgatcgaggaacagagcactgtgacgaacgagatgtcgaccagcatgcagcgtgctgcggcagaggccgctgccatggcgaaccgggcctgatcagtccggctgcgtcctcggagcatcctgccatctgagcggcggggtgaccggggacgatatgagaagcacgccgtgttgcgttgcggtagagcagccgttcgcggctcgaccgaccgacgctgacgatctcgtcccgggtctcccccggaccggatctgccggttgctgcgcactgcagctgccgctggctcgttatgcggacattgctgtgatccaggtcacacattccgcagagttgctccgataaatttgcgtcgcttaaatgctgctttcagtcccccggtcataacgagtgggaattcgcatgcttcgcaaattcatctattgccttgcactccttgttctcgctggtcccgctgccgctattgaccgcgtcagaggcgacgcgaacccggcgattgctgctgcgtcggatgccatacggcgagatcccagggacgcgaacgcctattacaatcgcgggaatgcctatgccgcgagcggcgataacgagcgcgccatagccgattacaccgcggcgatccgactcgatccggcgcacgcgaacgcctactacaaccgaggcaacggctacagcaacaagggcgacaacgatcgcgccatcgccgactacacggccacgatccggctcgatccggcctatgcgaatgcctactacaaccgaggcaacgccttcagcaacaagggcgacagggatcgcgccattgccgattatgccgaagtgatccgcctgcagcccgcgaatgcgaacgcgtatttcaaccgagggaacgcctacgccagcaagggcgatacggaccgagccattgccgactacacggacgtgatacgcgtcgatcccgcttatgccaacgcctacgtcaatcgcgggctggcttatgagaagcgcggcgatttcgccaaagccagggctgacttcaatgccacgctgggattgcggcatggtgtcaccaaatgggcccaggacaaggcgcgcgagcggcttgccgtcctgccttcaccgcggccgtcgacaatactggtcgagaaacccagcgccgccccggccgtcgtaacgtccgacgcgtcgacgggagaccgtcgcatcgctctcgtcatcggcaattcggcttacgagaacgtcgccgcgcttccgaaccccgtccgcgacgcaagcctcgtcgccgatgtcttgaagctcaccgggttcgaatctgtgacgctcgtgaccaatctccgcaaggatgccttggtgagcgccttgcgcgagttcgcggctcgtgcggaaacggcggattgggccgtcgtgtattatgccggacatggcatggaggtcgggggcgtcaattatctcattccgatcgatgccaggatcgcggccgatcgcgaaatcggattcgaagccgtcccggttgatcaggtcctcaatgcggcagagcgcgccaggaagctgcgcctcgtcatcctcgatgcctgccgcgacaacccgttcgcggcccagatgaagcgcacgatgacggtggcgtcgcgttcggtgtcgcgaggtcttgcgccggtcgagccggaggcgggcacgctggtggtttacgccgccaaggacggcgagaccgcgctcgacggtgacgggagcaacagtccgttcgcggcagcgttcgtcaagaatcttccgacgccgggcctcgaagtccgcaggctgttcgacttcgttcgcgacgacgtcatggaagcgaccggccgcaggcaaaagccgttcagctacggctcgatctccggccggcaggacttctatttcgtggccggcaaatgacgccgcaggagctgcggctcagcgcggcgcgagatcggcgcgattgagcgaatccagcgtcgaggcatttgcgcaatagccgtggtaattctccgcagcggtgccgtcggcgagatcgcggtcgcactggcccttgtgctcgcagagcgaacagacccgctccatgtcgcggagcagcagcggctgcgcgcggccaagcccttcggcattgatgccgagttgctcgagcatcttcggcaactcgtcggcggcatgcttgccgtgacggaccagctcctccagatcgtcaggcgcgatcctgaggtcattcgcgatccgatcgaaatcggcgcgatcgagctgccgcatctcgttcacctcgcggcgatgcttcagccagccggcaaaggagtcgatgaggtcctgaacgatgggatagggcttgcttgcggtgctcatggaaagctccattcggacggcggaactggagtcaattaagcacaatgctgcaggagcgcgttgcgctggatcaaagtgggaaggggtacaaaaaccctgttctctgcccccgatgcggcaagatgaccgcgtgtaaggcgcagatccttcgtcatggccgggctcgacccggccatccacgtctcaatgtgcagtacgaaggacgtgatacccgggacaagccggcatgacggcctctttcgctggcacgcgatcactcgggcagagctacccaaaccgctccgtcgcccacgcatacaggctgcccggaattggcttttcgccgccgcggcccttgggcgagatgtgcaggccgatgatggcgggatcggtcacgaggccgagatagctcgaaggatcgaagaacagtttcggctcggcatgcacggcgtagaacgactgcttcggcagcgcgttctgcaattcaccggtgcggcgcgcgagcgcggtgagcgccgcggggccgtagatcgcaacgcggatgtcggagagccggttcgagccgccgcgcaggcggcgcatcatgaaggtgacgcggtggcgcaccgacaaccagttcggcgtcagctcctcctgctccatcagctcctcgaacgcgcgcacgatgccgtgctccgccggcaggtagatcacggaattgccgagctggcgtggccgctcccacgcgaaatagggttttgccgaatcgatctcgatcggcctcagcagcagcacgtcggcatcgagccacaagcccagtcctttcgccatcagcctcatgcggaagaagtcgctgaactgcagaatggtccagtcgcgccagctaccgtccggctccggcgggcgcaaccgttcggagaacgcatggggcaggatcgcctcggcatcggcattctcgacgccggcaggcaggccgggaatggtgtcgaagctgtagaccgtgaccttgtgcccggcagccaattgcgaacgcaggcaggtctggcgcagcgcgtccatcgggccatgccagaaggtgacgatctcgggcagcatgcgcggagctatacggtacaaccggagcaaagaaatagccccggcgcttgcagcaccggggcttgaacgggaaacggatatcaggcccaggcgcgttcgcgcttgagcttctcctcataagtgtcgatcgaggccttcttctccatggtgagaccgatgtcgtcgaggccgttgatcaggcagtgcttgcggaacggatcgatctcgaacttcaccttgccgccgtccgggccgcggatctcctggttcggcaggtcgatcgtcagcgtcgcgttggcgccgcgctcggcgtcgtcaaacagcttgtcgaggtcttcctgggcaacgcggatcggcagaatgccgttcttgaagcagttgttgtagaagatgtcgccgaacgaggtcgaaatcacacagcggatgccgaaatcgagcagcgcccagggcgcgtgctcgcggctcgagccgcagccgaaattgtcgccggcgaccagaatcttggcgttgcgataggcgggctggttgagcacgaagtccggattctcgctgccgtcgtccttgtagcgctgctcggagaagagacccttgcccaggccggtgcgcttgatggtcttgaggtactgcttcgggatgatcatgtcggtgtcgacattgatgatcttcagcggcgccgcgacgccttccagcgtggtgaacttgtccatggttgcgctttccgcacgtggttcagggaaccggtatttatcgcgatcgggtcggaaatcctaggccgaattgggcagggctagtctgcttggcgggttgaggcgagcccggtgcggcatcgggcttcacctctccccacggggagaggtgaaccgagaccgtcctactccgcgttggcctcgatcgcctccatgtcgtcgtcagacaggccgaaatggtggccgatctcgtgaatcaggacatggcggacgatgtggccgaggctttcgtcgtgctcggcccaatagtccaggatcggccgccggtagagccagaccatgttgggcagccgcgccacgtcgccaagactctgctggggcaggccgacaccctggaacaggccgagcaggtcgaactcgctctcgcattccatctcgttcaggacctcctcggtcgggaagtcgtcgacgcggatgatgaccccctcgcagagcttgcggaactccgtcggcaggcgctcgaacacatcgtgagccatcgcttccatctcggcgagcgagggtgctttcaattccgtccacatgcacacctcttagcgcgggttccgccgcgatgcatccggctatataagcgcggcgaggttgacgggcgccatcaaaacggggagcgtgggggccgtcgacgggacgtttcaggtgggcggaaaaatgcgagcgaaaacggcggtgattctactgtgcatggggttgttttcgcagctttgcgttggcgccgaggcgcagaccgccagttccgggatccaggtggcccaggtggtctcgcctaacgaagttcccccgccacgcaagcggtccccggcgcgactgcgcgtgacgccctattacagccccgacggcgtctatccccgctacaatcccggccccgacgcggtccgcgtctgcaacgccacctatgtgcaggagtaccggccgagcggcacggtgatcgtgccgcgcgtcagctgccactggcgccgcggctgacgtcgttcaatgcccacgccatcgagcgtgcgtggtggccttgcggagcccgccgtgacgagatggatcgcactagctgtcgccgtggcacttgccgccggtttgccccacgcttccgcggcgcaaaggcgggtcattccggaagcttcggcggggatcgcggttttcgatgcacggcgacacacgcgaacccatgacctcgcgcggcctgtcctccgccgtgacccacgctattatgcgcggccggtctactatcgtccctatccttatggcgtgccggcacccttcgtgttcggctatgggccgttctggtgaggcgtcgcgctatcctgcgggtgcaaatcccttgaccagcagcacggtcgcctctgcgccggccttgcgatcacgcgaaatctcttcgtattcgggcgaggtcgagaaggcgaggaacgcggcctcgtcgggaaacgacatcatgacgagcttgtcgtgcggccatacgccctcgagcacgcgcggacgttcatcggcggcgagcagccgtccgttgtacttcctgaacacctcgaagaaccgcgcctgatagcggtcataggccgcgcggtccgtcatcttcaattgcgcaatggcgtagacactcatctgcaaaatccctcgtcgcggcactgcgtcgcatcgcggagcgcagtgccgttcattcatggcgcgttcacgtcgctgtccgcaatttaatcttgggagcgaccgtcattgaaacagcaatgctgcggccgaaaggcatcgcagccctgctgtccggactcagggagaattccatgctgaggatatttggccgtcgggccgggccgatgcgcctgctcgggctcgccgccgctgcgacactgatgctgtcggccggtaccgcgcgtcgcgctgaagcgctgaccttgatcaatccggcgacgtcgcccgccgccaaggccgcgacggacgatctcgtcacgcaggttcgccaaggacccggcggacatcgctttcacggcggaggattccatggaggaggcttccatcgcggcggaggacatgtcggcggcttccatggccgcggattccgcggcggccatatcggcggcttccgcgccgcacccgcgtttcatcacaggcacgtcggctatcgacatcacggcttccgctacggcggatatggcggctatcaccgtcactggggccatcatcgcccgcacttccgccatcgtcacgtctaccggccctattatgtcggcggctactatccgtcctaccactatccccgccgctgccgaatcatctggacttattacggcccgcgccgcgtctgccactggccgcgctggcgctatccgtaccggtactattggtgatgtgagctgttcgagcagcgtcatggccgggcttgtcccggccatccacgtttcctggagcggcacaacgaggtcgtggatgtccggggacgagccgggcatgacggaggctgcggctaaagccagtccctcagcttccacgacgacgccttccagcgcatcaagttctcgagcttccattgccggaacaacgccggcggccagcggctgagccttgaggtctcctccacctccggcttggcgacgatgcgtagcggcgttgcgcgccggcggtgctggcgcgtggcctcgctgatcagatcgacatattccggcttggtggccatgggcgcgtcctcgcgaaatcatcgcgaggacgagagtgtcaggggacagtttaacggcggtttgccgcgatcgctacaattgcaggaactggcttaccgccactccctgacatcgacgaagtgaccggcaatcgccgccgccgcggccatcgccggcgacaccagatgcgtgcggcccttgaagccctgacggccctcgaagttgcgattcgaggtcgaggcgcaacgctcttccggcttcagcttgtccgggttcatggcaaggcacatcgagcagcccggctcgcgccattcgaagccggccttgatgaagatcttgtcgagaccttcggcttccgcctgctccttcacgatgccggagcccggcacgaccatggcgctgacgttgccggagacggtcttgccttcggcaatcttggctgccgcgcgcaaatcttcgatgcggccgttggtgcaggagccgatgaagacgcggtcgagcttgatgtcggtgatcttcgtccccgccgtcaggcccatatatttcagtgcgcgatgcttggagatacgcttggcctcgtccgcgatcttgtcgggatcgggcacgatgccggtcacggagatgacgtcttcagggctcgtgccccaggtcacgatcggcggcagctttgccgcatcgaggcgcagctcgtggtcgaaatgcgcgccctcgtcggagcgcagtgtctcccaataacgcatcgccgcatcccaggccgcgcccttcggggccttcggccggtcgcgcaggaaatcgtaggccttctggtcgggcgcaaccaggccggcgcgcgcgccgccttcgatcgacatgttgcagaccgtcatgcggccttccatcgaaagcgcgcggatcgcctcgccggcatattccagcacgtagccggtgccgcccgcggtaccgatctcgccgatgatggcgaggatgatgtccttgccggtcacgccgtccggcaatttgccgtcgacggtgacgcgcatgttcttggccttcttctggatcagcgtctgcgtcgccagcacgtgctcgacctcgctcgtgccgatgccgtgggcgagcgcgccgaacgcgccatgcgtcgaggtgtggctgtcaccgcagacgatggtggtgcccggcagcgtaaaaccctgctccgggccgatgacgtggacgatgccctggcgcttgtcgaactcgttgtaatattcgatgccgaattccttggcgttctcagccagcgccttgatctgctcgatgctctcgggatcgggattcggcttggtgcggtcggtggtcggcacgttgtggtcgacgacggcgagcgtcttctcgggcgcatgcaccttgcggcccgtggcgcgcaggccttcgaacgcctgcggcgaggtcacttcgtgcaccaggtggcggtcgatatagagcaggcaggtgccgtcctcggcttcgtgcaccagatggtcgttccagatcttgtcgtacagggtggtcggcttggacatgagcttgagctccgaagaatgtgtgaagcggatgtgcgcaaatcgcgcggggcaaaaaaccgtcagcgcagcctctcaggctgcgcgaataagctctgacgttgccgaggtcgcgaagcgtccgaagaaccgcccaggcagccgcgagcgatcgtcgatgacgatgcgcttgacgggtgcgaggctggtcggatctggaaacattctagaggctatatagcacgcagcggtcaaagcgcgagagcttcaacgcgtcattgcgagcgcagcgaagcnnnnnnnnnnatgcacccgcggagaccgtctggattgcttcgtcgcatcagtgcaaaattgctacgcaattttgtcacgagctcctcgcaatgacagccggcgcaacaaaaaagcgcggagccaggccccgcgcttctcgaaacttgccggatggcgaagcttactcgttgacggcagccttggcgtgctcggtcttctcgacgatgcgggcggacttgccgcggagattgcggaggtaatagagcttggcgcgacgcaccttgccgcggcgcaccaccttgatcgagtcgatcatcggcgacatcaccgggaacacgcgctcgacgccttcgccgtaggagatcttgcggacggtgaagctctcgttgagaccgccgccggaacggccgatgcagacgccttcataggcctgcacgcgggtgcggtcgccttcaaccaccttcacgttgacgatcacggtgtcgccggggccgaattccggaatggtcttgccggcggacagcttgtcgaattgctcttgctcgagctgcttgatcaggttcatgggtaaatctccatcggcgcgcccagccttcagaacgggggctgcgcgaaattcgtctatccagccattgcggatgtggccggtcctataaggcaagccggagcgtttgtcacccgtctgtcttgctttttggcgttttttggcgaccggctcgattcgggggcttgcttgggatttgagcccacaaatccggccgccgggccgccgtcagggcctcggattgcgcccgccgccaggccgcgaccttggcgtggtcgccggaggtcaggatctccgggatcgggaccccctcgaacagctgcggccgggtatattgtgggtattcgagcaggccatcggagaagctctcctcagttcccgaggcttccttgcccatcacccccggcagcagccggacgcaggcgtcgatcagggccaaagcggcgatttcgccccccgagagcacgtaatcgccgatcgagacctcctgcaggccccgcccgtcgatcacccgctggtcgaccccctcgaaccgcccgcagacgatcagggggccggggccgcgggcaagttccgcaacccgggcctgggtcaatggccgaccgcgcgggctcatcagcaggcgggggcggtccggaccgatctcggcggcatcgatggccgcggccagcacatccgcccgcagcaccatgcccggcccgccgccggccggggtgtcgtcgacgctgcggtggcggtcggtggcggaagcacggatgtcgcgcgcctcgatctcccatatgccggccgcaagcgcccggccggccaagctcacgccgagcggccccggaaacatctccggaaacagcgccagcacggtcgctcgccagggtgagggatttgccattgcagccagcttagccaaaaccacgacctgtcgttatgggcccccctcttcgcgagggggacttggcgaggcatcttcgtcctcaccctcgatctcctgcgggagcgcgatcacgacgcggccgccggagagatcgacctccggcaccacggcattcgagaacggcagcagcagcgtcgggcccttgggcggggcgatttcgatgatgtcgccggcgccgaaattctggatcgctacgacacgaccgagcgcatcaccatcagtggtgacggcggcgagcccgatcaggtcggtgtggtaatattcgtcctcgtcggtcgcgggcagcttttcgcgcgggacgtagagctcgatgccgttgaggcgctcggcctcatcgcgggtcgtgacgcccttgaacgtggcgaccagatgatctttcgcctcgcgcgccgttgcgacctcgaactggcgccggccgtccttggacagcagcgggccatagcgcttcacggcaaacggatcttcggtgaaggtccacaacttgaccgcaccgcgcaccccatgcgcggcgccgatccgcgcgacgcagaccagcgccgacatgtcgtggccttagctcttcgcggcggcttcggcctgcgccttgcgctccttgcgcggcacggccttctccggattgttgcgcgcttcgcgcttcttgacgccggcagcatcgaggaagcgcgcaacgcggtcggacggctgcgcgcccttggcgagccaggccttcaccttgtccatgtcgagcttgaggcgggtctcgttgtccttcggcagcagcgggttgaaatggccgagacgctcaatgaatcggccgtcgcgcggaaagcgcgagtcggcgacgacgacgtgatagacgggacgcttcttggtgcctgcgcgggcgaggcggataacgacggacatttggttctccttcaaagtacagtttgttcggttgattggtattccgcgtcgcgtgagaccgatgcgatcccgtgcgacgaattcctcatttcttcttgcccgggaaaccgccgaggcccggcagcgtcggcttgccgctcagcccggtcagtccaggaaggttgggcagaccctggcgaagaccagccggcagatccttcggcaggttcggcaggccctgtccgccgccgctctgcatcttctcctgaagcgctttcatctcttccggagagggaggcttcatgccgccgccaaagcccatcgcctgggcgatgccggcgagcgggccgcgcttgcccgagcccatggccttcatcacgtcggccatgttccggtgcatcttgagcagcttgttgacgtgctcgacactctggccgctgcctgcagcgatgcgcttcttgcggctcgctttcaagagatccggatgacggcgctcctcgcgcgtcatggaatcgatgattgcgacctggcgcttcaggatcttgtcgtcgatgccggctgccgcgatctggttcttcatcttggagatgccgggcatcatgcccatcagcccgctgatgccgcccatgttcgccatctgcagcagctgctcgcgcatgtcgttgaggtcgaactgacccttgcgcatgcgctcggcagtgcgcgcggccttttcggcgtcgatgttggcggcggcgcgctcgaccagcgacaccacgtcgcccatgccgaggatgcgcccggcgatacgatcgggatggaaatcttccagcgcgtcggtcttttcgccggtgccgagcagcttgatcggcttgccggtgaccgcgcgcatcgacagggcagcgccgccgcggccgtcgccgtcgacgcgggtcagcacgatgccggtgaggccgacgcgctgatcgaacgaacgcgcgaggttcacggcgtcctggccggtgaggctgtcggcgaccagcagcacttcgtgcggattcgccgcagctttgatcgcggctgcctccgccatcatctcttcgtcgagcgtggtgcggccggcggtgtcgagcagcacgacgtcgtagccgccgagcttgccggcttccagtgcgcgcttggcgatctgcggcggttgctgtcccgccacgatcggcagggtcggaatgtcgaggtcgcggccgagcacggccagctgttccatcgcggccgggcggtagacgtcgagcgaggccatcagaaccttgcgcttgtcgcgctggaccaggcggcgggcgagctttgcggtggtggtggtcttgccggagccctgcaggccgaccatcatgatcggcaccggcggcacggaattgacgtcgatggtctggccttcggcgccgagcgtgttgaccagctcgtcatggacgatcttgaccaccatctggcccggcgtgaccgacttgaccacggtggcgccgatcgcctgctcgcggacccgctcggtgaagctgcgcacgacttcgagcgcaacgtcggcctcgagcagcgcgcggcgcacctcgcgcatcgcggcgtcgacgtccttttcggtcagcgcaccgcgccccgtcagacgatcgagaatgccaccaagccgttccgacagattgtcgaacaatgccgttgtcctttgtcctgctcgctaaagaagcgatcttccaaacacctttgcgcccgagggcgcacagcgctgtcgggcgttgacctccggcctccagggccagtcggcgggtcgaaaagaaagcctttccgagaaagtgtcggggttaaacgccgctcacgtccaaaagtcaaggaaagttaggggggcggggcgccggtgccaaggcaagatgctgaaaatgtgaggctttggcgatgggttccttttctgccgggccggcccatatagccggtgatgtcttaccgtccgggctgccccaggacgcctgctttgccgcccacccgccctccggcttttggactgctccctctggatgtcccgcatgaaaacctatgacggccccgcctccgatcatttcaatggtcggcacttcttcgaccccgacggcgcgccgccgaaatcgcttcgtgaggtgctgcgctggcagttcggcggaaagaggcagcgcgcgaagtggcccgcatgggcgccgagcccccatgcggacacgccgccggcgcgcgtcgagggggacaaggtgcgtctctccttcgtgggccacgccagctggctgatccaggccggcggtctcaacatcctcgtcgatcctgtctggtcgatgcgggtttcgccggtcagcttcgccggaccgaggcggcacaacgatcccggcatcgccttcgagaagctgccgcaaatccatgtcgtgctggtctctcacggacattacgatcatctggatatcgcgacgctgtcgcggctggccaagaattttgccccgcgcgtggtcaccccgctcggcaacgacgtcacgatgcgcggcgccgatcccaccatccaggtcgaagccttcgactggcacgaccgcatcgagctcggcggcggcatcgccgtgcatctggtgccgacgcggcactggaccgcgcgcggcctgttcgaccgcaacaaggcgctgtgggcgagcttcgtcctggagacgccggccggaaaaatctacgtcgtctgcgattccggctatggcgacggcaggcatttccgtcgcgtcgccgagcggcacgggaagctgcgtctggcgatcctcccgatcggggcctacgagccgcgctggttcatgcgcgaccagcacatgaatccggaagacgccgtgaaggcgttgctcgattgcggcgctgaagccgcgctcgggcatcatcacggcacgttccagctgacggacgaggcgatcgacgcgccggccaaggcgctgctcgaggcgctggatgcggcagagattccgcagcagcggttcgtcgcgatgaagcctgggcaggtggtggagatctagctccgctcttgccaccatacagctcgtcgttcccggtcgcgacgaagtcccgagtccgggaccaatagccggagggagatgtttggcgaagacgcggaattgccagcgttgcgccacaccgccccctgtggctatgggccccgccgtcgcgggggcgacaccgatggtgttgcggcaccgtgccccctacggcctacggttccttcggcttgatcgctcagctcacattgacagtcaccgacagcgtctcctcgccgggtgcgactgcggcctgcggtgctgcggccatccgttcggccatccgcgtcttgaacagcggcaccggggcgccgccttccgagacgctgagcggcgcgcccagcgtgacgccggtagccctggcgtagatatcggccttgcggcgagcgtccgcaactgcctgctcgcgcgcgtcgtcgagcagcttcgaggcctgtgttacctcgaacgagatgttgccgatgtcgttggcgccggcgccgaccagcgtatcgatgatggctgcgaccttggccacatcgcgaatcttcacggtgacgcggttgctcgcgcggaagccaaccacgggcgaggcgccggtggctttgttctggccgtactgcggctgaagcgacagccgcgaggtctggtagtccttctcggcgatgccggcccccttcagcgccagcagcaccttgcccatcgcggcgttgttggcatcggaggcttccttcgccgtcttggcgtcgttggcgacgccggcatcgatttgcgcgagatcgggggccgcggaaatcatggcctcgccgctcaccgtaatggcggatggaaaatcgtcggcgcgtgcgggcgccgtcagaaggacagtggcgaagacggtggcaagcagggcaggctttttcatcagtctcacttcagcggtacgaaaacattgatcacgagcttgtcctcggccgtcttcaggggatcggtgaggtactcctcgatgaacgtgtccttggcttccagcctcttgtcgtcgaggtgattggtgatcgcctcataggtgttgtccatgttgtcgtaggagccgcgatggacgaatttcagcgccttgccttcgggcgacttgccgatgctcatgtccttgggcagattcttgggatcctggtcgaccgggatctgggcgaggaaggtgaaaccggtgtcgtcggtcgaggtgtagacgatcatcgaattccctgcgggcttgatgccctgcttgtccagcagcgtgttcagcgccttgaaggcgtcgatcagcgtatcgaaggccgagtcccaattggccgtgcccttgaccatcacgaccttcctggattcgagcgtggtttccagcccgaagggatcggcggtctgcaccggcgcaggcgtggcggccgcggcaggcggtggcgccgtcgggctgggcgaggcgctggcggcaggtgatggcgatcccgcaggagcgggggaggcgctggccgctggcgaaggtgtcgcaacgggggcgggcgaggcgcttgccgccggcgagggcgannnnnnnnnnggacaggccaagcgacaaggcggctgccgggatcagtgcggccagagcgagacgacgaaacctgaacattttattctccccaagaccttggctgccaagaccttgcccatcaagaccctgcccaccaaggtcaaaatccatcctggcgcccgcccgtgcgtcccggttcgcgcgaactgcgccgttctaacacgcgggcgccgaattcgtcccatgacagatgcgtcatggcaggcgtctcggcagcgccgcaaatcactggccaagccgccgaggatcgccatataaggcaggcgaaattcgggaattttcatgagcgcgctggccaaccacgcatttgccaagatgaatggcatcggcaacgagatcgtcgttgtcgatatgcgcgattccgctggcggggtgacgccggaggacgcccgcgcggtggcatctgcgcgaggtggcatcgcctatgaccagctcatggtgctgcagaagccacggctggacggcaccgaagccttcatccgcatctacaacaacgacggctcggaggccggcgcctgcggcaacggcatgcgttgcgtggtgcgccgcatcttcgagaagaccgggcagaccaccgcgaccttcgagacggccgccggcctgctcaatgcctggcagggtccggcggccgatctctacaccgtggacatgggcgtgccgaaattcggctggcaggatattccgctggcggaagaatttcgcgacacgcgctacatcgaactgcagatcgggccgatcgacaatccgatcctgcattcgccctccgtggtgaacatgggcaatccgcatgcgatcttctgggtcgaggacgtcaacgcctacgatctcagccgcttcggcccgctcctggaaaaccatccgatcttcccggagcgcgccaacatcacgctcgctcatatcgtcgatcgcgagcacatcacgatccgcacctgggagcgcggtgcgggcctgaccaaggcttgcgggtcggcagcttgcgctacggcggtcgctgcggcgcggctgaagcgcgcagagcgcaaggtcgagatcacgctgccaggcggcaagctcggcatcgaatggcgcgagcgcgacgaccacgtgttgatgacggggaccgcgaccttcgaatatgagggcaatttcgatccggcgctgtttgcgccggtcggatgatgggcgtcgaggtcgtcaccttcggctgccgcctcaatgcgttcgaggccgaggtgatccgccgcaaggcggaaggtgcaggcctttccgacacgatcgtcatcaacagctgcgctgtcaccaacgaggctgtggcgcaggcgcgccagtcgatccgcagattgaagcgcgagcggccaggcgcgcgcatcgtcgtcaccggttgcgcggcacagacgcaaagccggatgttcgccgacatggctgaggtcgatcgcgtcgtcggcaatgacgacaagatgcgcggcgaagcctggcgcgaggcccgcgacgccttcgatctcgacgccagcgagaagatcgccgtcagcgacatcatgtcggtgaaggagatggcgccgcatctcgtcgacggttatgcgagcggcctgccccgcgtgttcgtgcaggtgcaaaacggctgtgaccatcgctgcaccttctgcatcattccgttcggccgcggcaattcgcgctcggtcccgatgggcgccgtggtggagcaggtgcggacgctcgcccagcgcggccatgccgagatcgtgctgacgggcgtcgatctcaccagctacggtgcagaccttccgggagcgccgaagctcggcatgctgacgaagcagatcctgcggcacgtgccggagctgaagcgcctgcgcatctcctcgatcgattcgatcgaggccgacaacgacctgctcgatgccatcgccggcgatgcgcggttgatgccgcatctgcatctgtcgctgcagtcgggcgacgacatgatcctgaagcgcatgaagcggcggcattcgcgcaatgacgccatcgcgttctgcgagacggtccgccggctgcgcccggacatcgccctcggcgccgacatcatcgcgggcttcccgaccgagacagaggagatgttcgcgcgctcgctagccctcgtcgaagaatgcggcctgaccttcctccacgtttttccctattcgccgcggcccggtacgccggccgcgcgcatgccgcaggttgccggcggtgcgatcaaggaacgagccaaacggctgcgtgcagcgggtgaagccgcactgcggcagcggctgcgggccgaggtcggcgcaacgcgcgatgtgctgatcgagagcgccgggcagggacgcacggagcattatctgccggtggccgtggctggcgagcgggtcggaagcatcgtgccgctgagaattgccagcactgacggcgagcgcctcaccacatagtcggctggcctcttccttctccccttgtgggagcaggtggcgcgaagcgccggatgaggggtccctctccaagaattcaaatgagagccggacccacggagagagacccttcacccgcctcgccgcttcgcgacgagccatcctctcccgcatcgggagagggaagaacgcgcgactcccgcgtttgcctcagacgagtctacgacgcccttacctgccagaaccgcagcgtccgcttggcattctccgtcgtcattcttgcgtagagcccctgcgctcttgcaagatccgccggcttcatcgcacccgttgcaaaacggctttcgagcacggccacggtcgtctcccagcggagctgcgcggccttgcaaggcaccagcaggccgtcttcgcgcagactctgcatcaacggacggatcacctcgaccgtcgatcctgacaatgccgccagcgccgccatcgtctcctcgtagcgccgctgtctggcaaatccgagcagcgtcggctcatcgagctggccggcggccttgagatttgcaacggcgcgcttggcgccttccaaatcgcggacgcccgacatttcgcgcgcgacaccgatggtgacggcggcgatcgcgctctggatttcctcgaacagatgcggcggggcgcgcgacaacaagcgggtgcgcacggcatcggttgccgagcgcagcaattggcggcgcagatccgacggcagatcgacgcgaacgccgacgctgacggcgagctccggatcgctttcggcctgtccgacgatgacggcaaatccgttgcccgagacgcgcgcgcccggattggcggcgagccgccggctgacgctggggtagcggcgggccagcagcgcgtccgtgacgatctccttcagccaccaccggccggcgaccgcgagcagatgcgcctcgcccttgctcgaggcgatcttcacgagttcggcgtcgtcgaggcgggcggattcctgcagcacgggaccggcgatgcggatctcgtcattgttggcgaggcggcggatcacggacggcggcgcctgagcgatcggcgccagctgcgcgctgatctcggcgagcgccacgcgcgcgccgatgtcggcgatggcgcgcagctcgatggtgccgatcaggcgttcgagcacgtcatcgaacagcgcgatctgctcgtcgtcgaagctgccggcggaagacaggaacaggtcggtgacgcggcgggccgttgccaggcccttctctgccgagccggcgcgtatcgcggattcgacctcgtcgatgatcgatagcccggccttggtcgtcacgcgcggctcgtcctgagcggttacggaagcttttctaagcagccgctatcattagaggcgagcgctgaaggtttggtaaaccatggccggaggtgttcggatcaggttcgatgaccgccacgaaggccgtcggcgctctctctctctctctgcaagcgggagaggtgaacgacggcggcgcgcgccgctactccccgttccagccgcaggccatgagcttctcgtgcatgtgcggcggggccggggccacgacgcggaccggctccttgttccgggagatcgggaccacgatctcgcgggaatgcaggtgcaggcgcggctcgccgaagcggggtccgttgccgtaaatgttatcgccgaagattggccaaccgctctcggctgaatgcacccgcaattgatgcgtccggccggtcacgggttccatggcgagccaggtcaggccgccgccgcggcccaacaccttccagttggtgatggccctctgcccctccgggtccggcttctgccaccagccgcgttcggcattgagccggccgagcggcatgtcgatcgtgccttcgtcttccgcgggaccgccctcgaccacggtccagtaggtcttgccgatcttgccatgcttgaacagcagtccgagggacgccgtggctttgcggtggcggccgagcacgaggcagccggacgtgtccttgtcgagccggtgggccagcaccggcggccgcggcaggccgaaccgcagcgcgtcgaaggaatgctccaggttggggcctcccttggggccgcgatgcaccggcaggccggccggcttgttgatgaccagcatcaaaccgtcgcgatggagtacgcgcgacaaaatctcgtcagcggtcaattcgggaacatcgagcacttgcaagactttcgtttaatcgccggaacggctaacacaccagtgcggcggatttggcattcgcttggtgtttgccgcaagcgcggagcgaatgccaaatccaaaagccgcaatggcaagaaaacatctctcgtgccgctcttcgatttgaagttcctaaccgaacgcgcggcaagagagtaggaacttcgaatcggcggcacgagcaacatgaacgatacctccgaaacccccaagctgagctggtggcgccgcctgtccaacgggttgaagcgcacctcgtcctcgctcgggactgcggtcgccgaccttgtcaccaagcgcaagctcgatcgcgccatgctcgacgagatcgaggacgtgctgctgcgcgccgatctcggcaccgcggtctcggtacggattgccgatgcggtcggcgccggacggtacgacaaggcgatctcggccgacgaggtcaaggacgtggtcgcgaccgaggtcgagagggtgctggcaccggtggcgaagccgctcgaggtcgacaaggccaagaagccgttcgtgatcctcgtggttggcgtcaacggctccggcaagaccaccacgataggaaagctctcacagaaattcgcctccgaaggccgcaaggtgatgctcgccgccggcgatacgtttcgcgcagccgccatcgagcagctcaaggtctggggtgagcgcacaaggacacccgtgatcgcgggggcgcagggctcggattcggccagccttgccttcaacgcactgaccgcggcgaaggagcagaacatcgacgtgctcctgatcgacaccgccggacgcttgcagaacaaggccgagctgatgaacgagctcgaaaaggtcgtgcgcgtgatccgcaaggtggatgccaccgcgccgcacgcggtgctgctggtgctcgacgccaccgtcggccaaaacgcgctgtcgcaggtcgaggcgttccatcgcaccgcaggggtcaccggcctcgtgatgaccaagctcgacggcaccgcccgcggcggcatcctggtggcgctcgcggagaagttcaagctgccggtgcattttatcggcgtcggcgagggcgtcgacgatctcgcgccgttcaccgcgcgcgatttcgccaaggctatcgcgggaatcgaaagctgaaaaatggacaagactcagccgcacccgatgttcaagctcgcgaccgaactcggtccgctgctcgtgttcttcttcgtgaacgcgaagttcaatctgttcgccgcgaccggcgcctttatggtggcgatcgcggtcgcgatgaccgcgtcctatatggtgacgcgccacattccgatcatggcgatcgtgacgggcgtcgtcgtgctggtgttcggtacgctgaccctggtgctgcacgacgagaccttcatcaaggtcaagcccaccatcatctacggcctgttcgccgcgatcctcggtggcggcctgttgttcggccgttccttcatcgcggtgatgtttgaccaggtgttcaatctgaccccgcagggctggcgcattctcacgctgcgttgggcgctgttcttcgccggaatggcggtgctgaacgagatcgtgtggcgcacccagagcacggacttctgggtgaacttcaaggtgttcggcgtcacgacgctgaccatgatcttcgcggtcgcccagctgccgttgaccaagcggcatcacctcgagccggtctcgctggagaccagcgaagccgaggcgggggatgtgagtaaggggtgacggtctctccgctcgtcattgcgagcgaagcaatccagaatcgttccgcggagagactctggattgcttcgtcgcgccagcgcaaaattgctttgcagttttgtcgcgggctcctcgcaatgacggtcttggttaagaccctgccttcagcgccttctccagctccggcatcagcacggtcttcaggttttgcgccgtgatcggtccgaccagcttgtagacgatgttgccctcgcgcccgacgacgaaggtttccggcacgccgtagacgccccattcaatcgaggcgcggccgttgccgtccaccccgacatggctgaaggggttgccgtagcggccgaggaagcggcgcgcgttgtcggcggcgtccttgtaattgatcccgaccagctgaatgcgtttgtccttggcgagctcggtcaggagcggcgcctcgtcatgacacggcacgcaccaggacgcccacacgttgaccaggctcaccttgcccttgaacgcggcggggtcgaggccgggcacctgcgcattgccagcctgcaatccctcgagcggcggcagtaccgtctgcggcgccggccgtccgcgctgatcggacggaatccgcgagggatcgccgctgccgagccggaaccagaacagcagcgccaatgcgaggaatgcaatcagcggcagcaccatcaggaaggtgcggcgccgcggcggagcggagctcggctgatcgctcatcgcagctccgtcgcgctgcggcccgaacggcgggtgatgccgcgctcctccagctcgcgcaggcgctgcgtctggctgcggtaatcgagcatgacccagccgatcaggatggcgaccacgagggcggcagccgcgtaagacgtcacgatgaaagacgcgtagggacccagcgacattgtcatgcggctttctgactggcctgcatcatctgcagcgagcggacccggcggcgcaggatctcgttgcgcatcgcggccaaatgcagcgtgacgaacagcagcgtgaaggcgatcgccatcaccagcagcgggatcaggaaagacttgtccagcgccgagccgcccatgcgcatcaccgaggccggctggtgcagcgtgttccaccagtcgaccgagaacttgatgatgggcaggttgatcgcgccgaccagggtcagcaccgcagccgcccgcgccgcgcgcgagggatcgtcgaccgcgcgccacagcgccatcaggccgagatacatcaagaagagaatcaggaccgaggtcagacgggcgtcccattcccaataggtgccccacatcggtcggccccacagcgagcccgtgagcagcgcaaggaaggtgaaggcggcgccgatcggcgctgccgctttggctgcgacgtcggcgagcggatgccgccataccagcgtgcccagcgaggcaatgctcatcacgccccacacgaacatcgccagccaggcattgggcacgtgaatgaacatgatcttcacggtcgcgccttgctggtagtcgtccggtgcggacgcggattgatagaggccaatcgcgagcaggatgacggtcgcggccgcgagccacggcaacagccgcgccgtcagcgcgaggaaccgtgtgggattggcgagatcgatcagcgtcatggtatcctgataatcaccgggagccgctcaggcaatcagcacgaaagtccgtcgcgaaagttgatcggggtcaagtcagtcgagaccatctcagtcgaggccatgccgcaggcttgccgcggccgcgaaggggccgatgacgaggctgaccagcgacagcgcgcagaggatcgagaagggcgcgccgaacgtcatggggccgacgatcacggcctgcgaagccgcaaccccgaaaatcagcaccgggatggacagcggcagtacgaggaccgccatcagcagcccgccgcggtgcagcgtcacggccagcgctgcgccgatcatgccggtgaaggtcagggccggcgtgcccgccagcagcgtcagcgccacagctccggtcgcgaccatgtcgaggttgagcaggaggccgagcacgggggttgcgacaatcagcggcaggccggccgccagccaatgcgccagcgccttggcagcgcaggcgagttccagcggcgtccggctcatcgtgatcaggtcgagcgagccgtcctcgtggtcggccatgaacagccggtccagcgtgagcaggctcgccagcagcgcgccgagccacaggatcgccggccccaggcgcgacagcagcgccagatccggccccaccgcgaacggcatcagcaacaccacggtcaggaagaacagcacgccgatcagcgccccgccgccaacgcgcagcgcgatcctgatgtcccggcggacgagggctgagagggcggtcatgggatgacgcttccggcagggcagccatgggagccggattggagctgcgaggatggtgcgctccctccgccgcttgcgggggagggttggggagagggtgtctcgacaacgaagattcccccagaggacagaaccctctcccggcgctccgcgccggtctctcccgcaggcgggagaggcttgggagccggcggcgacgcctgctttccgggtgcgagatgggcgaggggggaaggaacggtgagaccaggggcccgccgctcggaaagctgagggtgggcccgaatcacgccacacccccgatccgcagctcccgcgattcgatccccagcggcgcatgggtcgccgcgacgatcatcccgccgcgcgaaaggtgctggcgcatcaggccgccgaacatgtcctggccggcgacatccagcgcattggtcggctcgtccagcagccagaccgggcggcgcaccgtcagcagccgggccagcgacagccggcggcgctggccggcggacaggaagccggcgggcaaatgggtggcgtggtcgaggccgacggtcgcgagggtctcggcggggtcagcgcgctcgccgccgaggaaatcggcccagaatgtcagattttcagtcacgctcagcgccggcttcagggcatcgcgatggccgaggtaatggcactgctcgggcagcgtcagctcgccgtcgccgccgtccagcacgatggtcccggccgccgggacgagcaggccagcgatcagccgcagcagcgaggtcttgcccgcgccattgcggcccaccaccgacacggcctcgccggcagccgcggcgaaatcaagcccggagaacacctcgcggccgccgcggacgcaaatgagcccgcgtccggacagctgcatcttgccttgtgtcgttccgctcacagccaggcctcaggaaatcttagggtagcgcatgggaatttttggctcgcgaattgctgcggcacgattgaggctgtggcggcgcggttagaaagcttctataagcccggaactacttgatgcagcaactcaacctgcccctgcaagcggcccagcctgatacgccaacggtgttaaaataccctgccgggtataactaacaattgggattcctacatgacctcgctcgacagcttcaaatgcaaaaagaccctcaaggtcggcgccaagacctatgtctattacagcctgcctacggccgagaagaatggtctgaaggggatttcgaaacttccctattcgatgaaggtcctgctcgagaacctgctgcgcaacgaggacggccgctcggtgaagaaggacgacatcgtggcggtgtcgaaatggctgcgcaagaagtcgctggagcatgagatcgccttccgcccggcgcgcgtgctgatgcaggacttcaccggcgtcccggcggtggtcgaccttgccgcgatgcgcaacgcgatgcagaagctcggcggcgatgccgagaagatcaatccgctggttccggtcgatctcgtcatcgaccactccgtgatcgtgaacttcttcggcgacaacaaggccttcggcaagaacgttgccgaagaatacaagcagaaccaggaacgctacgagttcctgaagtggggccagaaggcattctcgaacttctccgtcgtgccccccggcacgggcatctgccaccaggtcaatctggaatatctggcccagacggtctggacgaagaaggagaagatgacggtcggcaagaagaccggcacgttcgaggtcgcctatcccgattcgctcgtcggcaccgattcccacaccaccatggtcaacggccttgcggtgctcggctggggcgtcggcggcatcgaggcggaggcctgcatgctcggccagccgctgtcgatgttgctgcccaacgtcgtcggcttcaagctgaagggcgcgctgaaggaaggcgtcaccgcgaccgacctcgtgctgaccgtgacgcagatgctgcgcaagctcggcgtggtcggcaagttcgtcgagttcttcggccccggcctcgaccacctttccgttgccgacaaggccaccatcgccaacatggcgcccgaatacggtgcgacctgcggcttcttccccgtcgatgccgcagcgctcgactatctcaagacctccggccgttcttccgcgcgcgtcgcgctggtacaggcctatgccaaggcacagggcctgttccgtaccgcgaagtcgcccgatccggtgttcacggaaacgctgacgctcgacctcggtgacgtcgtgccgtccatggccggcccgaagcgtcccgaaggccgcatcgcgctgcccaccgtcgcggacggcttctcgctcgcgctcgccagcgagtacaagaaggccgaggagcctgccaagcgcttccctgtcgaaggcaagaatttcgacatcggccatggcgacgtcgtgatcgcagcgatcacctcctgcaccaacacctcgaacccgagcgtcctgatcggtgccggcctgctcgcgcgtaacgcggctgcgaagggcctcaaggccaagccgtgggtgaagacctcgctcgccccgggcagccaggtggtcgccgaatatctcgccaattccggtctccagccgtatctcgacaaggtcggcttcaacctggtcggcttcggctgcaccacctgcatcggcaattccggtccgctgcccgaggagatctccaaggcgatcaacgacaacggcgtcgtcgcggccgccgtgctctccggcaaccgcaacttcgagggccgcgtctcgccggacgtgcaggcgaactatctggcttcgccgccgctggtcgtcgcctacgcgcttgccggcagcgtcaccaagaacctcgccaccgagccgctcggcgagggcaaggacggcaagccggtgtacctgaaggacatctggccgacgacgaaagagatcaacgccttcatgaagaagttcgtgaccgcgtcgatcttcaagaagaagtacgccgacgtgttcaagggcgacaccaactggcgcaagatcaagacggtcgagagcgagacctatcgctggaacatgtcttcgacctatgtgcagaacccgccctatttcgaaggcatgaagaaggagccggagccggtcaccgacatcgtcgaggcgcgtatcctcgccctgttcggcgacaagatcaccaccgaccacatctcgccggccgtttcgatcaagctcccctcgcccgccggcaaatatctcagcgagcaccaggtgcgccccgccgacttcaaccagtacggcacgcgccgcggcaaccatgaagtgatgatgcgcggcaccttcgccaacatccgcatcaagaacttcatgctgaagggcgccgacggcaacattccggagggcgggctcaccaagcactggcccgacggcgagcagatgtcgatctacgacgccgccatgaagtaccaggaagagaaggtgccgctggtggtgttcgccggtgccgaatacggcaacggctcctcgcgcgactgggccgcgaagggcacgcgcctgctcggcgttcgcgccgtgatctgccagagcttcgaacgcatccaccgctccaacctggtcggcatgggcgtgctgccgctgaccttcgaggaaggcacctcctggcagtcgcttggtctgaaaggcgacgagaaggtcacgctgcgcggcctcgtcggcgacctcaagccgcgccagaagctgactgcggagatcgtctccggcgacggctctttgcagcgtgtttcgctgctctgccgcatcgatacgctggacgagctcgactactatcgcaacggcggcatcctgcactacgtgctgcgcaagcttgcggcgtaagcgcggatttgtgaacgatggctcactgcgaagtgagtagaagcctgaacgaaggcggcctatcaaaggccgccttcgcgcgtttgcggtgcgcttcagatgggcccgcccggcggaaaacctccccttggacggttgcctggacggaggaatgtgccgcgcccgtaagactacggtgaccatccggcgataagatctcccttctcacgagcaacggtgtgcggcgttcgatatgacgacaatgacggcttctcatctgattccacgttggtccggtgccctctggtcgggagctctcggcatctgtgcgatcatcgccgtcatccgtcccgcccacgctgatccgcgtgctgttgtcgagttgtttacctcgcagggctgctcgtcctgcccgcccgccgatcagatcatcggcgatctctccaaggacccatcgatcatcgcgctaagcatgccgatcgactattgggactatctcggctggaaggacacgctggcggactcgcgcttctctgcacggcagcgtgcctactcgcgcatgcgcggcgaccgcgaagtctacaccccgcaggtcatcgtcaacggctcgacgcacgtcattggcagcgaccgcgccgggatcgagcgtgcgatcggcaaggcagacaagggcactggcgtgatgagcgtgccggtgacgatgtcgctttccggcaagcagatcaacgtttcggtggcggcgagcaaagagcccgcggtctcgcgcggcgaggtctggatctgctcgatcgcgaagtcggtgccgatcgccatcacccgtggcgagaatcgcggacagcaggtcacttaccacaacgtggtgcgcaacctgctcaaggtcggcgactggaccggccgtccggaaagttggacggtgccgatcgagaacctcacccgcgacggcgtcgacggcgcggtggtctatgtccaggacggcagccgcgaaaagcccggcccgatgctgggcgcggcgtacacctcgctgcattgaagccggcagaacgtctcggtaattggcgtcatttcggggtgcgcgaagcgctggcccgaaatccattcattcatcgcacgagtcgagaaatggattctcagacgcgcaattgcgcatcatagttcgcgccgagaggcgcgctccggaacgacagcggccggaaacatcccgacacaaacaaaaaaggaccaacttgcgctggtccctccttgccgtgcgtacagacccgatcctgttcgaccccggggggctgggggctgaggaatccggaaccgaaaggaccgggtcaacgcacgcgaatcttctcgcaattcagggcggcagtcgctaggcggaaaagcggcgacactatgattcctgctaacgatcccgtgacggtttgccgcgacagagttccaccactgcgtgtgtctcgatgcacagccgattcgacgggttgaggggaaccccttgcggccacgaacggttggcgcgatcatgcaatcgtcatgaacgcggttcccgggggcggtcttcgcggacgcggtcattgctggcgatgaggaggcgcttccatgagcctgatgtcggaggatgccgatccgagcgagcagcgcgcggcggcgcgccccgccgccctgaatgcgcaggcaaaccgggtgacgttcaaccggctcgagctgcaccggattctcaatctctacggtcgcatggtcgcggatggcgaatggcgcgactacgcgatcgacttcctgaaggatcgcgccgtgttctcggtctatcgccgtgcctcggaagtgccgatctaccgcatcgagaaggacccgcgcctcgcgcgcaagcagggcatgtacagcgtgatctcggcgaccgggctcatcctgcgccgcggccatgagctggagcgcgtgctgctggtgatcgatcgcaagctcgcggtggtgtgacgacctctgcccgtcattccgggacgcgacgaagtcgcgagagctcgcgcggcgcgtgccccggaaggacgggagccgttacgtcaccggcacggtgcttgccccctcgccgaggtcgcgctgcatcatcacggtatccagccaacggccgaatttcagcccgacatttggatgggtgccgatcatcttgaagccgctcttggtgtgaacgccgatcgagccggcattggcggaatcgccgatgaccgcgatcatctggcggaagccgcgcgcctcgcactcgctgatcagccgctccagcagcaacgagccgacgccccggcggtggaaggagggatcgagatagatcgagttctccaccgtgaaacggtaggccggccgcggccggtaggcgcccgcataggcatagccggcgacgcgtccatcgagcatggcgaccagataggggtagccgccgtccaccagcgcacgatagcggcgcgtcatctcggcaaggtcaggaggctccagctcgaacgtcgccgtgccctcgcggacggcttgctggtagatcgcggtgatggcggggaggtcggcctcggccgtgggcctgatttcgggtgcggacatggggcggagattaaggccttgccgcgggccctggaagaggccgcaccgcctccacacccgtcatttgcgagcgcagcgaagcaatcctggaatgcagccgcggagggaccctggacgcttcgtcgcaagggctccgcgcaatgacggcgttcgtggctgccgcaggcccaaacaaaaaccccggcctctccaggctgtgtggaaacgattggaggctccg

SEQ ID NO: 264 - DNA, 104146 bp, Bradyrhizobium colbertium
  misc_feature (10048)..(10057): n is a, c, g, or t
  misc_feature (16524)..(16564): n is a, c, g, or t
  misc_feature (28219)..(28228): n is a, c, g, or t
  misc_feature (66737)..(66746): n is a, c, g, or t
cggttccggcgccagcggcggggcatcggcaaccggcgtaacggcaccggccattgaacctgcagccgttgaaccggcagccatggccgccatgccctgctcgaccatcgcttccagcttgtcgatgaggtcgcggtcgttaccctcgggctccgcttcggtcgcctccaggcctgccaggatctccttgatgcggtcgatcgaggacaggatcaccgtcaccgcctgcccggtcaccggcatgccgtcacggaatttgcccatcaaggtctcgccggcatgcgccagcgcttccagccgcggcaaacccaggaagccgcaggtgcccttgatggtgtggaccaggcggaagatgttatccaggatcttggcgttgttcggctcctgctcgaacttcaccagctgattgtccacggtgtccaggctctcgctggtctccgtcaaaaactcccgcaacagatcatccatgaaaacaggccttcatacaggaagggcgcgcacgaggcgtgatgcgccatttcggaatgaggccagcttcaccgcaaagcgtttaatattggttgagtatgtgcaaaagaacggaaccaacaaagatataaggcgccgcggacaagccgaagcgcctcgtaaagattcaattaacgtgccgagcgcaacgttgcttcacgaagcggtaacggtgatggcttcgccttcaggcgcgagcttcacggtgagtccgcaagcctctgccaacaaccgcgtataataaggctggatcgcatgcgcatccgcggcaggcccgcgctcgccgctcaggagctcggagatgttctgcggcaggcgcgcattatgcccgctcgcagtgatccggaagctcatcgtctcaccctcgccgatcgggtcgaccgtcagcatgccgccgcgcgggatcgtatgttgagcgacgaccagcatgttgagcagcagcttgacgcgattcttcggcagcaggagccgcggcaaattccaggtgatcgagcacttgccgtcctcgatatggccgcgcgccatggtctgggcatcaccgagatcgatctgtgcgccggatgagccggccgcgccgaatgcaaggcggcagaactggagccgggccgaggcggtcttggcgctcttgcggatcaggtcgagggcaaactcgcggtcctcgggcttgggatcgtcgtcgagcacttcgagcccattgacgatggccccgacggggctgatgagatcgtggcagacccgtgagcacaagagcgctgcgagttcgagcatatcgggagcagtagcggtcgcgggcgacgaggcgtcagacatataatggggtcctggagggttcttggaattgcacggcgccgggcgccgcgaatcacgcatgcttgacggatgctgcgggttctaacactcgcaagcccgcggcagctagcttgcgatcggttcgagcgggccataatgccccagtcgaatcgatcggggcgaatcagtgacgagggacggatcgccgatgaatgaggcatgcaagtgaatcggatcgttgacgagtcagccgcctttggcctgatggagccgctgacggcgctggtggtgaaggcgggcgaggcgatccttgccgtcaaccgcgccgccatgcagatcgaaggcaagcaggatggctcgccggtaacggaggccgaccttgccgctgaccgcatcatcgcagacggcctcgagcagctcgcgggcgaccttccgacgctgtcggaagagcggacccagctcgcctcgccgccgtttcagggcagcttcttcctgatcgatccgctcgacggcaccaaggagttcgtcgccggtcgcgacgagttcaccgtcaaccttgccctggtgacggaaggcgtgccgctgctcggcatcgtcagtgcgcctgctctcggactgctctggcgcggcatcgtcggccgcggcgcggagcgggtagatttcaacggcgcgaccatcagtaccgccaagcccatcaacacccgcaagctgccggcgcgcggtgagccctggatcgcggcggtgagccgctcgcatggcgaccccaagagcgaggcgttcatcgacagcagacccaatgcggtcagacggaccgtcggctcggccgtgaaattcggccgaatcgcggaaggcagcgccgacgtctatccccgcttcggaccgacctcggaatgggacgtcggagccggcgctgctgtcgtggccgcggcgggcggcagggtgaccgatggcaagggcggcgagctccgcttcggtcagcgcagcgatacaggcttcatcattccggacttcatcgcctggggcgatccgcaggcggtaggctgctactgaccgagctgttcccgaagcgccggccagcgcttgcgtacctcatagaggaagcgctccggattggcgacgaaggcgtcgcgattggcttcccggctgaacagatagagccgctgcgccacgatcgcgaagaaatagggattgccggcaatggtgacaccgcgggcgatatcggccggatcatagccgccgaattgcggcccgtagatctcgggatgggccaggaacgaggcccggttgccctcgttgcgaaagcgccagaccgcgccccagaggttcgcctcgaactccgccgtcccctgcatggccaccccatcgacgaaataggccacggggtcgaacccctcgatggcagtgccggtgaagcgattgacgacgatccgctcggtggtggcagccttggccggcaccaccgcgccggcgatccagaggcccgccagcagacacacgaggcggccgatcaaggcaattccggggcgcaaagggctatcttcctgccgttgtgccgtcatagttgctgcggataacatccgagtcgaggggacatccggcgcaacctagagccgtgcctattggcgtcaggttaaggaagcgaccggattcggtaccaggggttctttatgactttcgcatcacgccttgcagcgctcgcgcttgccgcgatggtaggctggatcgtgccggcctcggcccagaatgcgccgccgcctgaccttccgccgccgcagcgaacccctacgcccaatacctacggcccggacgaactcgtcggcgccggacaccgcttcttcggcaacgtctcgcgcgggctggcctcgatcatcgagaaggcagtcagccaatggggcctccccaacggctacatcctgggcgaggaaggctccggcgccttcgtcgccggccttcgctacggcgaaggcacgctctacaccaagaacgccggcgacctcagagtctactggcaggggccctcgctcggcttcgattggggcggcgatggcgcgcgcaccatgacgctcgtctataatctgcctgcgaccaatgcgatctatcagcgctttgccggcatcgacggctcggcttacatcatcggcggcttcggcatgacggccctcactgccaacgacatcgtgctggtgccgatccgctccggcctcggcctgcggctgggcgccaacatcggctatctcaagtacaccccgcgcgcgacctggaacccattctaggatcgtcgcctcccattcggtgacggatcaaggttaacgacagtccagggctggctttttgccggccccgcatgcattgtcgttggtaaatttttccttagctctgggagttctggcccatggtcgagccgatcatgtacctggcgatcggtttcctgctctcgatgctgtgcgggctcgcgatcgtgccgctggtgcataaccgcgcggtgcgcctgaccacgcgccggctcgaggccgccacgccgctgtcgatggccgagatccaggccgacaaggaccagcttcgcgccgaattcgccatgtcggcccggcgcctcgagatgagcgtcgagcagctcaagaacaagacaacgagccagctcgccgagctcggcaagaagagcgacgccatcaaccgcatgaagatcgagctcggcgagaagaatgccacgatcttcgcgctggaggcgcgcgagaaggcggtcaaggagcagcttcgcgccaccgaagaggagttcaacgccaagaccgcagccttgcgcgaggccgagatcgcgctggccgacaagcaggccgagcttgccaagatcaacaccgagctgtccgaccgctcgatgatggcggagagccggcaggtcgagctgatcgccgtgcgcacgcagatcgaggaactgaagagccgcgtcggggatgccgagaaggaatttgccgccacgcaagcacgcctcgcgcaggagcggattgaatccgagactgcctcgcgcgagctcggcgaggcgcgcggccgcgtcgagaatctgagccagcgcgtcaccgagctcgatcgccagctcatcatacaggtcaaggaagccgagatgctgtcggcgcgtgtcgccgatctcgaggggcgccttgccacgcaaggcaagctgctcgccgagcgcgactatgagaacaaccagctgcgccaggccaatgacagcaacgagcgcaccataaaggagctgcgcgttgagatcgccgcgctcagcggcggcagatcgtccgctgcgatggaacagctacgcgcggaaaagtccgcgctggaggagcagctacgcaccgcgcgcgacgagcgcgccaagctccagcgcgacatcaacgcaattcagcagcaggcggagagctcctgggcgaccgagcgcatggagaacgcgcttctgcgcgagcgcatcaacgacatcgcggcggaagtcgccaagctcgcgatgcagctcgaaggcccgaactcgccgatcgaggcgctgctcgcggccgaggccggccagccggcgaaaccggcaccgcgcccggccaatgatgccgcgaccaacggcgcccccgcggcccgcctgcccgaaggcggcggaacgctcgccgagcgcatccgcgcgctccaggcccacgcctcccgcgcccgccagcagggcgcgtaaccggccgaaaccccggcctcgcttgccgagggcgtgtcctgccgcaggttttccgccgctgcaccgcctgaaaacttgacacctccggcccgcacttctaaatcgcgggctccgatgtgccggccggccgaaagtcacggccagctgtacgatggtcccgggcgcatagctcagcgggagagcgttcccttcacacgggagaggtccaaggttcgatcccttgtgcgcccaccattcatcttcgtgaaccagaccggctgttgatgaccgccgacgggcatgcgggctgccgggtgaaccgccccaagcaaaagcgcgaaaacaaccccatgcacagtagcggcatcagccggatcaatgggtgatatgcattctcttttcccgaatatgcgtttgacgcgtcgggcaaagcagcggcagaatgacacgatggtcggagtgccaacgtggatcggctggaacgcgaggcactatcaggatcggcagtaatgcgcgggcggcgtagagcgcgtccaggaacacttgaaggagcagcgcatggcgatcgtattcatcaccggcagcacggacggtctcggccgcgcggcggcacaatcgctcctcgatcaaggtcaccgcgtcgtattgcacgcgcgttcggctgatcgtgccgcagcactcggcgggctcgcctcgcgtgccgcggggctggtagccggagatctcggaagcgcagcagagacgaagagcatcgcggatcaggtcaacgcgatcggacggatggacgcggtcatccacaatgccggcgtctatacgcggccaagtcgcggctcgacgccggaaggtcatgccgaaaccctggccatcaacacgcttgcgccgtacatgctgacggcgctgatcgagcggcccggccgattggtgtatctcagcagcggattgcaccgcggtggcgaaggctcgctcgacgacctcgattggacgaagcgggcctgggacccggccaaagcctatgccgagagcaagctgcacgtcgtcgcacttgccttcgcgctggcgcgacgctggcccgacgtcctgagcaacgcggtcgatccgggttgggtgcgcacgaagatgggcggtgcgggcgcgccggtcgatatcgacaccggacagcggactcaggcctggctcgcagtgagtgaggactcccgtgccaaggtgagcggccgctactggcatcatctcgagcagcagcagccggccggcgaggcaaccgatgaagaatttcaggaccggctgatcgagaaattgagcaagctgacgggcgttgagctgccggcggtctgagcgggcaccgaataccgacgatccgattgtcgcctctctcaggcaacccgctgcgctcgcaaggccgcatagagaccgacgagcgtcccgatcgcgaccagcgctgctgccagcagcagctgcaactgcccatcatcggtggggcccaccgccgacacgagtcgcgtcacgatgacgaacagaactcccacggctgccgtagcacctacgcagagatagacgagctctcgcatcaggttgccgccgagaagtccgagcgcggtgaaatacatcgcgcaggcgttggggtgaacgaacagggcaatgcgcgcgtaaggaccgtaggcgtggaggagtgactcacatcggcgcagcgccgctttcgaggcaacccgctgcaagagcggcctgaagaaacgcgcctgtccgtagctcaagacggcacccaggatgatggcgagccacgccacggcaaagacggagacatccgcggacttcggattgagcgccacggacatcaggatgagggccgtgccgggaaaatagccgaaatacgggaagaccgactccaggagcacgcagacgaacatgaaggccggaaaccaccacgaaccgttcgccccctggacgatggcgttcaagtcgaagaggttcgtcttgtacaggacgaggtacatgcatacggccagcccagccagcgcgtagaacggcaacgctcccgacagaaaccgtctcattcgaccgagctttgtttcgcggacaaggcggagaccatcgagatcaggacaagagaaggaaacccgtggcggatgctttaggcgaatgagatcgctcctgtcgatagcaatcctcgcgatccgtctgaccgcgcctacgcgatcgacagaatctcgatctcctgcgcacccgcgcccacgacatcgccaaccgcccttcccatcagcgacctcgcgaccggcgagacgaacgagatcgatcccgctttcggatcggcctcatcctcgccgacgatgcgataggtctgcacgcgaccgtcagcgcggctgaaggtcacggtgctgccgaacgcgacgacgtcggtcgagactgaggtgggaacaacctgcgcggtgcgtaagcgttcggcaagatagcgggcgtcacgcaagggcaccgccgactgccggcgtttttcgttgacgtcctcgatggcttgcgcggcttcataggccgcgcgcgcgtcggcaagctgcgcctgcagcgccttgaagcctgcctccgtcacgaggtttggatgcggcgagatcggacggtccggcaacagcgtctcggacgcggtttcggcgctctcttccttggtgaaggcaacgctcaattgaagatcctgtcgagctgtctgacgacgacccaaacgccgccgattgcccgagattatatctcaagttcgacgaaacggcggagcttgaaaaacacgtccggcagggcctggcggaaccgggtcgcgttctggaaagtggtcgagaacggcgcgaaggtgagcatcgcgttccaattccggtagccatagaccgtgaccgacacgccggaggccggaaaatcctccagcttgcgcagttcgccaagcacgagatcggcgatcgcttcggccggcagcaattgcttgccgtcacgcgtggtcgcaattttcgatggcgcttcgaccgcattcgttgcagccggcgcggcatcgggcgcaggctcggagctggcgggcgcaggatcggctggggatggctcgaccgcctcgtccgccggtgctgtcggtggaacctcggtgagcagcggcggagtgatattgtctgcgcgcttgttgcctcccaggatgctgctgatcatggcgaccaggccagcatccttcccgtcgtcgctcgtcattccccaagcttcccccaagacatcggcctattgtagcaccggacttgccgatcgccacaatcgagcctcggacacgcctggccaaggcccctattccataggccccctcgaccacatcagcggcgcaaacgctcatggcgtcgcgccgccgcgcgatccgctaccgcttatcgaacggaatatactgatggtactgcttcgggaccgagctgcggtagcgcgcaggcacggtgccggtctcgaccgaatgatcgatctcctgctgccgcgtcatcttcttcttcgccggcttcttcgacgcgctcttcttggtgtcggtgggctggctggcgctgtcggtggtcgcggttggcgccgtcgtcgccctggccggcggagcggttgtcgccgcaggcgtggaggttccaccggcggccggtgcgccctgcgccagggcaagcggcgtttgcatcacgagcaccagcgctgccgtcgcagccagcaagtatgacttctgcatcagaacctccaaaattgccctgtccgaatgaggcaagcctagtcccgcgggatcgaggcgtgcaagttggccgagaataggtcggaacatggggcccaactgtggtggagatcacattgtctgtcgcgggctgcgtcacgatgtacctcacctcgaacgcatccggcgtcgcggacaccaacactggcatgaccgtgcatcagacagtccactgggaacgccacggcacggccgttccaccccaatcgaaggagattgaaatgcgtcgcaccatcctcacgcttgcatcgtttgcaaccttgatcgccgcgtcattgtcggcggcaccggcccaggccgcgaacgacagatactgcctgcaaggccgcagctggggctatcccgggaactgccagttcgccacataccagcaatgtgccgccacggcttccggcacgtcggccttttgcggcatcaacccgcgctacgcctattcgcagccttactactactgacgaaagggcggctgaagcatagcggcgtgcgtgaaggcgcacgccgcgcgccttgggcggatccgctcacgcggcgctctacactttcactcaaactccatcgcgagcagctacatcgccagcgcgctgttcgcgcgaggtgccaagttgccacaaccggccgtcaatctcctgcgcaggcgagattacggattgcctcgcttgcagcaagccccgacaatccgcctcgagattctcattccgattcgcagacatcggaacaggcaggctgagggcgtcgtgcacagggcagcattcttcgcatccggcctgttcatgctcatcgctccggcaatcgccgccgatctgccggtcaaggacgtcaggactcccgagccgcccaatctctggcagatcgaggtcggcgcacggtactggtacagcatcggccgcaccgcttacgacctgcacaccaccggctcgcggtcttctccggtcatctcgcggctcgactatcacaacatgagcacgcattcgggagaggtcttcttccgggtcgacagccccatgaagttcttcgtcaagggctacggcggatatggaggtatcacgggcggcaccatgaacgacgaggatttcccgccgttcttcaacgggccgtacacgaagacgcagagccagacacgcggctttctgagctacgccagcctcgatatcggctattccttctacgaatcgcaccccgtcaacgcggagccgcgcctgcgtctgggtgccttcgtcggctaccattaccgcggcgaactggccgacgcatgggggtgtcggcagactgtgtccggcggtcaaatctgcgaaggagccgacgccctcgccggcagcgtcaaggtcatcacagagcgcgannnnnnnnnntcaagctgaccgtcgatgccgcctacacctattccgacgtgagagctttcgacacgcactactttaccttcgggaccgagccctctcgcggctacggccacggcttccagctcgagacggtgatgtcctatgccgttacgcccaacgcgaatgtgggaatcggcgcccggtactggcacacggggatcaacgacttcaccgagcccccgggcggagcggggcaggcgcagacctatcaggtcgaccgatacggcacattcatccagagcagcttcaagttctgagcgaggaggctcggggtcctcgccaacaggaccgcgggacgtgctgttcgccagcgccctcacgtggccccggcaaggtccgcctcgcccagctgcttggcgaaccacaccgccaatgccgggtcgggggccccgccgaaatagacgtccgacagcgtgacgccgggtttatccagcaccagcagcacgccgatcgtgtaggcgaaccagacatgcgggtcggtgagcgccctcagcttgtgctcgtcgtgctccagcggcgtatgattgcttgccttgcggatctcgatcgcgagcagattgttcgggatctcgcgctgatgcacgacgacgtcggggtagatcgacttgccgagatggtcgtcggtcgagatgatgctgccgtgcggcaggtgcagcgtgcgctcgccgagacggtcgtaattgcagtcgaccgaccagcctgaaaaatgcttctccagatgcacggcaaagcggtgtgtgatcgcgcgctcgccgacgtccttctcgaacagaaagccctcgtgggcatagaagtcccggagcgctgcgatcaccttgttcagctcggtctgcatcgtgcctccgggcccatcacgcgcacgcaagagtcggtagcccggatgaagcgtagcgcaatccgggattctcgcaaaaacacaccagccccgggttacgcggagcctgtcatcgggcggcgcttgcgccgacccgttggctccatccggactacatgaggccggaattggcggcgcaaccggccaggcctatatctggacttcgatcaggcgcggcccgggttcggcgacggcttcggccagcgccttgttgaactcgtcggcattggtgacggcgcggcccggcacgcccatgcccttcgccattgccacgaaatccagcgtcgggcggtcgagcctgagcatgtcgttggcgcgctggccgggctcgccggcgccgacattgtcgaactcgccacgcaggatctgatagatgcggttggcgaacacgatggtgacgacgtcgaggttctcgcgcgcctgcgtccacagcgactggatggtgtacatcgcgctgccgtcgccgaccatggtgatcaccttgcgatccggacaggcgatcgcggcaccgatcgacagcggcgtcgagaagccgatcgaaccgcccatgttctgcagccagtcgtgcggcgcggcggccgccgtcggcgggaagaaggcgcggccggtggtgagggattcgtcgaccaggatcgcattctccggaatcgcgtaggcaatcgactgcgcaatcgaggcgtgggtcagcgcgccggtcggcttgagcaactcctgcaaagcctgcggcttgacatccttggcgctggccttcacggcgtcggcgagggcctcgagcgcggcgaccgagttctcgccccacgaggtcatgcgatgcacgtcgcagccttcgggccgcagcacgctcggcttgttcggatacgcaaagaacgccacgggatcgtcggactcgaccagcacgatatggcggaacttcgccagcatcggcagcgcctggtcgatgacatagtggatgcggtcgatcgagaagcgcccgcggccgcgcgccatcttcgggcggaaggtcggccccatcacggtgcagccggtcttgccggcgatgcgctcggcgagtgccaggccttgctcgctgagcgcgctgccggtcatcagcaggagcgtgccttcgccgtcgccatgcaggatcttggcggcctgctcgaccgcctgcggcgaatagctggcgcgctgctgctcggccggaacctcggcgatgccgtcggcctcgttccaggcggtgtcggcgggcaggatcagggtcgcaatctgcggcggcgcgctcttggcggcggcaatcgcggcggcgccgtcagcggcgaccgatttggcatccggcgaggtgcggacccaggacgacatcggccgggccaggccctcgatgtcggaggtcagcggcgcattgtagccgatgtgataggtggcgtgctggccgacgatgttgacgatgccggaattggccttcttggcgttgtgcagattggcgaggccgttggcgaggcccggaccgagatgcagcagcgtcgaggccggcgttcccttcatgcggaagtagccgtcggcggcccccgtcaccacgccttcgaacaggccgagcacgcagcgcataccgggcacgcggtcgagcgctgcgacaaaatgcatctcggaggtgcctgggttggtgaagcagacgtccaccccacccttgaccatcgttcgcaccaggctttccgcaccgttcatcccaagctcctgcaaccggccataaccagatatccgtcgggatcaatcattgttcgcgcgttccgtcaaagcaatagccgccatcgcggccctgccccgcgcgacggtgcgccggtttggctaatggtttccggcaaattgtggttgccgattcggtaacgccaaaggttaagcatggctcacgggcccgtggcttgcggaatgcctgcaaatgtggcctgtggcattcattgaatcgatttctttccgggggagacaatgatccggttttttgccgcgccgattgccgccatcgcacttctgtcggccacggcagccggcgcgctcgccgaggagttcgacacgcgcgacatcatgggcggcggcccgaacttcttccgttccggcgccaatcccgttccccgcacgaccgtcatgtacaatggcaactacgcccccggcacgatcgtggtgaacacgagcgagcgccggctctacctggtgctccccaacgggcaggcgctgcgttacggcatcggcgtcggccgcgacggcttccgctggggcggggtgcacaagatcaccgccaagagggaatggccggactggaccccgccggcgcagatgctggcgcggcgccccgacctgccgcgccacatgaagggtggtgtcgacaatccgctcggggcgcgcgccatgtatcttggctcgaccctctaccgcatccacggctccaacgagcccgagacgatcggtcaggccgtgtcctcgggctgcttccgcatgaccaatgacgatgtgaccgacctctatagccgcgtcgccgtcggcaccaccgtcgtggtgctgaacaactaggcgcggcacgcgactggggcgcaacccgtacggcgcgtgaatttgcggacttgtgcgcgcggggggaatgcggcagcgtcgcgatacgatgagcgcaatgaatccgccctcgcctcgccttcgcatcgccttcctcgcgctcgccgcgttcacattggtgcctgacaccgcacccagggccgccgcgggcgaattgcccgcgatctcctcgcgccagcgaaccgagaagaagactttcaccgaccgcgagatcgtcgagggcttcctgaagacggcgttcggcgccgaatatcacctcgccggccgtgtcgaccgcattcgcaagttcgacgggccggtgcgcgtgttcgccgagagtgaccgcgccgatcgcaagacgcagctcgccaaagtcgtgtctgacatcggcacacgcgtgcagcatctcgacatcgccatgaccgagaccagggaggctgcgaatgtgcgggtgaagctggtgcgcgaccgcgacctcttccgcaccctcaccagcttctacggcgccgaaaaggcgcgtgagatccgctcctcgctcgatccgcaatgcctgtccggcttccgcaagaacgacagcttcgagatcgagcattccgatgtcatcctcaccgtcgacaacggcgacttcgtcttcctcgactgcgcttatgaggagctgctgcaatcgctcgggcccatcaacgacaccgcgagcgtgccctggaccatgttcaacgacaacgtctcgatgggctatttcgacgtctacgaccagtacatcctcaatctgctctacgatccccgcgtcaaggcgggcatgacggtcgcggaggtcaaggcggtgctgcccgcggtgctcaaggacgtgcgcgcctgggtgaagcgggtaaatgatctgaaggagtgaagtcggtcgtcattgcaaaccgcacggccctattgcacgagatcggcgacggtcgttgcagccttcagcccagtgccggtgaggaccgccaccgtggtctcggtcggcttgatcgcacctgcggcagcgagcttgtccagcgcggccgccgcgctggcgctggtcggctcggcgaacaggccctggcgggcgagacggcgcaaggcggcgacgatctcgtcctcggtgagcgcaatggtgccaccgccgctctcgcgcaaggcgccgatgatctcgcgcaggcgcagcggattcttgatcgccgtgccctcggcgatggtcttgtgcacctcgcgcgcgacgggcgtatcgacaccggccttgaagctcgcatcgatcggcgaacaattgagcggctgcgccgcgaacaggcgcggcagctttgcgatctggccagccttcagcagctcgcggaagccgaaggcgcaccccaagaggctgctgccggcgcctaccgggacgatgacgttgtcgggcgaacggaagccgagatcttcccacatttcataggccagcgacttcgtgccttcgaggaagaagggctgccaattgtggctggcgtaaaatgtctggctggactggcggatggcctcggcttccgattcctcgcgcggtccttcgacgagttgcacctccgccccgtaggcacgcacctgtgcgatcttggcgggcgaggtcgaggcgggcgcgaggatcttcacgcgcatgccgccggcggcgcccagcccagccatcgacgagccgccattgccggaagaatcctcgagaatggccgagatgccgatctggcgcaggaaggacagcatcaccgccgagccgcgatccttgaagctgccggtcgggttgaaccattcgagcttgaacaacgggcgcagatcgccccaggcctgctgcagcagcggcgtgcagccttcgccgagcgagaccgggctcttgatctcgaccggcagcgccgcccggtagcgccacaatgagcgcgtgcggcgctcgatgtcctcgcgcgaaattccggcgcccggcgtcaccagcagcggcgtgcgctcgtccgagcaccagcgcggctggtcgaggcgatagagccgtccgttgcggggatcgacatagctggcggcgggcatggcagtctccaacgcaggcggcccgtacggacccgcccgcacagccaaaccattcagttccttgaaaacacgaaaactgacaatatttcaatctcttgaagtgactgcgcgtgcgccgccgcgagatcggcaggcgtcagggaaccggccgcaggccgccctgtccgcccggcacgattaacttgtctgtcgtcgcagcccgctacactatgttggattgagcttgcgtcgccggcgcttccagtcccgcaacgcaagcgagccaggcccgtccgagcggcgggccgtggctttttgggagcctggacatgagccgcgcgaaccgtaccgaccacatccgcctgacctcacatccggagccgggccggaaggccgcctttccgatccactggggcgccgccgatgcccgcgcccgcgggccgattgtcggcacggtgtcgcgcaccggggatcgcaacgtgatcggcagccatggcggctcctatgcgatgtaccgcgcgctcgcggtctccgccggcgctctcgatccgattcgcaggcccgacctcaccaacacctttccggccgcgaccatcgggcctttcgagcaatggcgcgatcccgcaaagatcgtcgcgctcgatccctgggggcatctggtcgcggaaaactttcgcccggagatcaccgagggcgccgacatccggccaagcatcgcggtgacgcgggcgcggctggacctgccggagatccgcgaggcgctcgccgcaaagcggctgcgtgccgacggcgacgtcgtgcacgccaatggcagcgtctccgttgtgaagatcgcgatcgatccggtctggcatctgccggggcttgcggcgcgcttcggcaccggcgagaccgagctgcgtcgcacgctgttcgaacaaaccgccggcatgtttcccgaactcgtgacacggccggacatgaaggtgttcctgccgccgatcggcggcannnnnnnnnnnnnnnnnnnnnnnnnnnnnnnnnnnnnnnnntcggcgaggtcaccaagttcctggtctacaatgcgcgcaagcgccaggaggatggcgatgcggccgcggcgtacttcgagcgcaccgaatgcgtcgccggcgtgcaggatgcacgcttccagcaactgatgccggatacgatccactggctggggctcaagcggatcgaccgcttcctgtcgatgagcgacatgaaatacgacgcaatgacctcgcagggcatcgacatcgtcgagcgcgtgccgatcccgctggagctcattcccgccgacgcccatgtcgagatcgccgcgaaaaaggccgccggctattactcgaccgacatcgcgccggagaaggacgtgaatggcgtggtcgggcgttcgctggaaaagtactgatcgcgcgatggacgctttggaaatgcaggcacgctcgctgctcaccgcacacgcggtgcgcgcgcgggcgggccagatgctcgaactcggcctcgccggcaggctcacacatttcgcgatcgatctcgaccgtatggacggcgtcgcggaggccgtgctcacggtcacccgaaaagcctatccgacgctggacgttccctttcatgcgcgctggcggcacttcgtgcttggcggcgccgatcgctgggcgcggctggccgacgctgcgtcctggccggatcgcgcggcgcgggcgcgctcagaattcgatcttgccatcgtcagcgtcctgctcgatgccggcgcgggcgctgcgtggcgctaccgcgatgcggtgacgggacaagccatcggccgctccgaggggctcgcgatcgcaagtctcgacatgttcgcaggcgggctcttctcgcatgatgccggctctccgttcagggccgatgcggatgtgctcgcaatgctgcaggccgcggcactcgcatccgcctttcaggcgagcgatgccaatccgctgctcgggctcgaaggacgtaccgatctgttgcggcgccttggaaagctggccgcggatcgtccagaggtcttcggtctgcgcgatacgccgcggccgggcgggctgttcgattacatcgccgcgcaggcctcaggcggggtcatcacggcgcccgccatcctgtcggcggtgctgaaccagctcggtccgatctggccctcgcggctcgaaatcgcaggcattccgctcggcgattgctggcggcatccagcgatcacggcggatgacgcgaccgcaggtctcgtgccgctgcacaagctgtcgcaatggctgagctactcgctgatcgagcccctccagcgcgccggcttcgatgtgaccgacatcgacggcttgaccggacttgccgaataccgcaatggcggcctgttcgtcgatcatgaggtgctgcgcctgcgcgatgccgccgacgcccagcgcgcgcatgcggtggattcgctgctcgtcgtggagtggcgcgcgctgacggtcgcgctgctggatcgtcttgccgaactcattcgcgccaagctcggccgcacgcccgagaggttgccgctcgccagcatcctcgaaggcggcacctgggccgccggccgcacgattgcctttttgcgacgccccgatggttcgccgccgctgagggtgatcagcgacggcacggtgttctagaatggtctgcgatttgcgaccacgcgcgtcattgcgagcgcagcgaagcaatccaggctcttccgcggtgacagcctggattgcttcgctgggctcgcaatgacgactcggtgaatttgaggagcatccgaccatggaaggcgtcacgatcgtcgatcatcccctggtgcagcacaagctgacgctggtgcgggacaaatccatctcgaccaagtcgttccgcgagctcatcaaggagatcggcatgctcctgtgctacgaggtgacgcgcgacctgccactcaccgacaccgtgatcgagacgccgctggcgacgatgcactcggccaagatcgccggcaagaagctggtgttcgtgcccatgctgcgggccggcaccaccttcgtcgacggcatgatggacctggtgccgaccgcgcgggtggcgcatatcgggctctaccgcgagccgcacagctttgccgcggtggagtatttcttcaaatcgccgtccgatctcggcgagcggctggcgatcgtggtgacgccggtcgtggccaccgccaacaccgccgtcgccgccatcgaccgcctgaaggagcgcggcgccagggacatccgtctcgcctgcctgatcgccgcgccggaaggccttgaacggctgcgcggtttccacccggacgtgccgatctggacagctgcggtggacgaaggcctcgacgagaccgggttcatcctgccgggcctgggcgatgcgggcgaccgcgcctacggaacacggtagcgcttcccggcgcagccgcggctaattcgttctgtcgcagtgcgctcgtggaacagcttgcagtgcgcgaggttctccccctgtgcaatggagagcatgatgactcatcagaatgacgaccccaggactgaccgtgcgcgccgcaacagcccggtgggctgggcagtcggcgccatcttcgtgatggccgtggtcgccgtcgtcttcttctacaatgggcgcgagatcggtccgcagaccacgacctcgaacccgaatacggcgccgaacgtcaccaccggatcgaatccgcccgctgcgcctgcgaaatgatgcaatcgcggcgcgtcatgtcggcggcctcggaggcaggtcctttgcgtcggccgacggcggcttctctttgagatcggcgatcaggcgtttcatttcgtcgatctcccgcacctgcgcctcgatgatatcgtcagccagcttgcgaacgcggggatccctgatgcgcgcacgctcgctcgtgagcaccgcgatcgagtgatgcgggatcattgcctccatataggcgacatcggtcaccgtctgttggctgcggaccagccagagcgacgtcaggaacaccgcggcgctgcccgcgagaatggcgatgttcgcggtccggttcctgtacatgctccacatgaagcccagcatcagtgcggccatgacggcgcccatcagcagcgccatccaggttcgggtctggctgtaccagacgtgatccagggcaaacgtgttgaggtacatcaggccgaacatgatgaccgtagaagtcgcgatcatcgcggcgaagcgaccatagctcatgtggaacttcccaatctccgcgtcgaaaggataactttgctcggagagatcgttcctcgccgcggacaaccagtctgtggaccgtcacaccttgccgctgccgcagatccccttcagggcctgccattccttgtcggtcaagagcggcgcgccgctggcgggacgatcttccttggtcatccgcgcgaggcgatcctcggtgagcgggtggctggcaaggatatttgtcagaccagagccgccttccttgcccgtgatgcggaacatcaattcggctgcgggcttgggcgagcggccgagcgcatgcatgatctcgatcgcaaacgtgtcggcaccggtctcggcttcgcgcgaataggaagcctcgaccaggctgcgcgaggtgaagatcacggcggaggagccggtgacgtcgccgaacaagagcccgatcaggaacgaggtgccgccgttgtagatcaggccgcgcatgttgtcgtgatgcttgagatggccgagctcgtgggcgaggatgccggcgagctcgtcgggagtctcggccttgtctagcaggcccttcagcacgaacaccttgccgccgggcagcgcaaacgcattcggcaccgaggttggcagcacgcccgccgtcatgctgtcgtcgaggccggcagcatcgcgcaaccggttgacgagcttcgtgaacgccgccttgcccgcgggatcctcgcacaccttgcggccgaaaagcgccttcatctgaacctcggccgcatcgccgatgcgccgttcgaccggcttgggcaccagcggggcgagccggtcggcggcgagcggcacgccgaacaggacgacgcacacgatggagacggcggcggccaccgaccagcccacgatcttggcgacaccgccgcgcgtcgtccggtgttcgtcgagccgcaagcatcgcgtggtcagatccgcggccagcgcggcatctctaatctccagccgcgccaaggacggcgcggaggtcgaagccaggcgcaagaccccggccggactgtcggcgcggcggatatccgcataggcccaacggacgggcgctgcgccatcctcgaggatttcgagcgcatcaccgagcgtcagcgtcacctcgcgcctgcggctcgaggtgccgtcgaagaagatggtcggcctgaccggctgcgccggagcctcggtcaacaaatcactcacggcttagaaccctgcaacatccagtccatcggcaaagccctcgccgagcgcgcccgcgagctgggcgctgccacgcacatccgcggcggccgcgatgttgtgcacctcgatcgtctccagcaccttggcccagagatcgcgctggagatagacgcgcatgacgatgttgatggcaagggcgagcgcaaaatagccaagcaccattatcaccaccatcgggatgctcttggcagcattgtcgcccccaaagacctcctcggccggaacgccgctcagcgcgacgagcagaaaggcgccacccgcaatataagcgatgaaggcgatcgtgagcagcgtccaccaccccaccaccttccagtacaggccgtagaacgcatcgtgcggcaatcgcgaggacaggctgacgtcgccgatgcgaatgccgtcgagccaccagcgccattgccgcgccttgaactcggcgaagaagaacggcgcgagcggaaagacgacgagtgcaatcgggctcagcagccacagccaccaggcgcgcttgaagaacgtccagccgtcgccttcgaaatcaccggtgagattgccgtaatgggtatgctgcatcttgtagcgctcgagcgcggcatcccgccaaggcaatgccaggccgagcgtcaggagcaccagcaggccccacagcatggcgcggagggagtaggcccagcccgagccgtccatccagaagcggacaccgcgccagatcgtgcgcgtcaggcgatagcgtcgcgcgcgaaagatcgcgaactggccgaaagcgtaaaaggctaggaacaacggcaccgaggcgaaggcctgccagcgctcgaactcgatgccaacaaggaaataggcaagatagatcggcaccaggatcgcgagcgccaccaggaagccgaccaggagctccctggcgcgaccggtatattcagcggaatcgccgtcgagcgctgtgtgcgcccacagatgtcggcggatgtcggtgacgagccagaaccggtagaagccgaaggtgacgagctcgagcagggcacccttggtgaccagtttgcggaactcggagcggttgccggtgaaatcgacccgcgccggcggcagcggcgggggcaggggttcggaaccgacgggggcccattgcatatcgttcacggcagcaacctcgggatgcgggtaccttgcggtcaaactataggttagaggttagtcgatccccaacaggggcgggttcgatttcgctcgattccaggaggtttctggcacgattccaagacaaacggtgtgcgggggatcacgctcgtcgtgtcccgtagcccggatcgagcggagcgcaatccgggacagtgtcgattgcggccgcaatcccggactacgctctcgcttcatccgggcgacgcgccctgcccactcagctggatgtggcaaaactctcccttgccccggcgccgacaaccggctgtaattgcaaatcaaataccgtcgcgcagaattcaacgacgcgcggttcacgcagggagagagtggtcatgcatgggaccatcgagagcgcggccaagcttgacgtgcttcgcgcgcgcgccacgtcactgccgctggagcagttcgatccgggcgatcctgaactgttcaggaccgatacgttctggccctatttcgatcgcctgcgccgggaagaccccgtgcactattgcaaggactcgatgttcgggccgtattggtcggtgacgcgctacaacgacatcatggagatcgagaccaaccatgcggtcttctcctcggcctccgcgctcggcggcatcaccatccgcgacatcgatccggacctgcgccgcgagagcttcatctcgatggatccgccgcgccacgcggcccagcgcaagaccgtggccccgatgttcaccccgacgcatctggacaatctcgcgatcaacatccgcaagcgctcggccgagtgcctggacaacctgccccgcggcgaggtgttcgactgggtcgatcgcgtctcgatcgagctgaccacgcagatgctggcggtactgttcgacttcccctgggaggaccgccgcaagctgacgcgctggtcggacgtcgccaccaccatacccgggcccggcggccttgtggccaccgaggacgagcggatggccgagctgacggaatgcgcggcttatttctcgcggctctggaaggagcgcgccgagcagccgccgaagagcgacctgttgtcgatgatggcgcatggcgccgcgacgcgcgacatggacgcgaagaacttcctcggcaatctgatcctcttgatcgtcggcggcaacgacaccacccgcaacaccatgtcggggtcgcttctcgccctgagccagcatccggagcaatatcgcaagctgcgcgacaacccggatctgctcgacagcttcgtgcccgaggtgatccgctggcagacgccgctggcgcatatgcggcgcactgcgctgtccgatttcgagttccgcggcaagcaaatcaagaagggtgacaaggtcgtgatgtggtacgtctcgggaaatcgcgacgaggaggtgatcgaaaggccctacgatttcatcatcgaccgcgctcgcccgcgcacgcacctctccttcggcttcggcatccaccgctgcgtgggcatgcgcctcgccgagctgcagctccgcatcgtctgggaggagatgctgcagcggttcgaccgcatcgaggtggtcggcgaaccgaagcggatctattccagcttcatcaagggatatgaatcgctcccggtgcggattgcggggtaggctctctcctccgtcattgcgaggagctcttgcgacgaagcaatcctgacttcctccgcggagagattcctggattgcttcgctgcgttggcaatgacggggcccacctgtacgtcaccttggctgccgcagacgccgcagcccccagctataaaattccggcatgacaggtcgcgccagatgcgaaggcaatgcggcgcccgactgttctacgacacgacatctaactcagtttgatgtcccacacgccttccttgcggcaggcggcgacctcttcgcgcaggagcgcggtgatcgcgagagaggccgtcgagaccggccggtcgatcggagaagcgaaaatgagctcgcgcgacatcggcttcgacactgccgtcgtctccagccgcccgtcggcgacctcgccatgaaccgacgacggcggcagcagcgcgaagccgaggccctcctcgaccaggctggtcagcacgcggaacgaatccgcctcgagctggacgttgagcttgatcttgcgctgggcggccgcgtgctcgatcagtgcgcggaggccgtgggaatgagagggcaacaccaggcgctggcgcaacagccagccgatgtcgacgctgctcttgcgcgccagcccacagccgcgcgggccaaccgcaacgatgttgtcgcgccccaggctctgcacattgagatgcagatcggccgagcggccgtagaggatggcgagatccatctcgccgcggtgcagccactcgacgaggtggccgctgtagctctcgacgatacgcagcgaaatgcctggaaatttctcgacgcagcgccgcgcaaagcgcgccgagagcacgcagctcaccgtcggaacaaggcccagcacgacctggcccgagggcgggcccttggccgactggatgtcgtcgcggatctgatcgatctgccgcacgatgccggaggtgcgcgccagcaggagccggccggcctcggtcagcaccatgccgcggccgttgcgggtgaacagctcggtgcgcagctcatgctcgagaagcttgatctgccggctcagcgccggctgcgccacgcgcaacgtgtccgacgccttggagaggctgccgagctccgccacgcaactgaacgtcctgagctgccggaaatccatgcttgccaatcctggaaggctactccatacgctatagcaaatgagcatagggggctggcgttgttttcacaacggcgggggattggccggcgctatcttaactgccgctatcgattggaaacgccatgagtcaagaacaccacaccgaagactacgccgacatccgcgacgccgtcgcaaagctgtgcgcgcagttccccggcgaatattggcgcaagctcgatcgcgagatggcctatccgaaggcgttcgtggatgcgttgactgaagccggctatctctcggtgttgatccccgaggaatttggcggcgcgggcctgaagctttccgcagctgcggcgatcctggaagagatccagcgcgcgggctgcaacggcggcggctgccacgcccagatgtacacgatgggcacggtgctgcggcacggcaatgccgagcagaaggcaaaatacttgccgaagatcgcgagcggcgaactgcggctgcaggccttcggcgtgaccgagccgaccagcggcaccgacacgtcctcgctgaagacattcgcgcgcaaggacggcaacgacagctacatcgtcaacggccaaaagatctggaccagccgcgccgagcattccgacctcatgatcctgctcgcgcggaccacgcccaaggagcaggtcaagaagcgcacggacggcctgtcggtgttcatcgtcgacatgcgtgaggccaagaacaatggcctcgagatccgcccgatccgcaccatgatgaaccacgccacgacggaagtgttctttacggacatgaaggtgccggcggagaatctgatcggcgaggaaggcaagggctttcgctacatcctctccggcatgaatgccgaacgcatccttatcgccgccgaatgcgtcggcgacgccaaatggttcatcgccaaggcgacgaactatgccaaggagcgcagcgttttcggccggccgattggacagaaccagggcattcagttcccgattgccaaggcctatgcttcgatgcgggcggccgagctgatggtgaaggaagccacgcgcaaatacgaggccgggctcgactgcggcgccgaggccaacatggccaagatgctggctgccgatgcctcctgggaagcggccaatgcctgcatccagacccatggcggctttggattcgccgaggaatacgacgtcgagcgcaaattccgcgagacgcggctctaccaggtagcgccgatctcgaccaacctcgtgctctccttcgtcgccgagcacgtgctcggcatgccgcgctcgtactgaggtcacgccatgggagcacttgacgggatcagggtgatcgcggtcgagcaggcggtggcggcgccgttctgctcctcacgcctggccgatgccggcgcggaggtgatcaagatcgagcggcccgagggcgatttcgcccgcggctatgacgcggcggccaagggccagagcagctacttcgtgtggctcaaccgcggcaaacaatccgccgtggtcgatctcaccacgaaggaaggccgtgccgagctggagaagctgatctcaagcgcggacgtgctgatccagaacctcaagcccggctcgatggacaagctcggcttctcccgcgaacggttgctgaaggattatccaaagctgatctcgtgcaccatcaccggttatggcgatgagggcccctacgcgcaccgcaaggcctatgacctgctgatccaggccgagagcggcctcgcctcgatcaccggcaaccccgacggcgcctcgcgggtcggcatgtcgatcgtcgatgtggcgaccggcgccaccgcgcacgcggcgatcctggaggcgctgatcgcacgcgggcgcaccggcaagggcgccgacatccgcatctccatgttcgacgtaatggcggactggtgcaccgtgccgctgctcaactcggaagccggcaatccgcccaagcgcatgggcctgcgccatccctcgatcgcgccctacggcgtgttcacctccaaggacggcaaggacatcttgatatcgatccagagcgagcgcgagtggaagacgctctgcgcgaaggtgctggaccagccggatctgcctgccgatccgcgcgtcgccaacatggtcgagcgcgtgcgcaaccgcgatttcaccgacaagacggttgcggacgctttcgccaggatgacgcgcgacgagctgctgaagcggctgtcggacgccgacatcgcctttgccgaggtcaacaccatggaagacctcaccaagcatccgcatctgcgccgcatcgaggtcgatacgccgaacgggcgcgtcagctatcccgcgcccgcaccgatcatcgtcggcgagacgcgcagctatggcccggtacccgccatcggcgaaaatccaaagtccaagaagtaacaagagcgaggcatcatgaccgagaagctcgacatcgatcatctcaggcaatggatcggccgcagcacggaggcgaccgatatcgtcaccgcgcagctcgtgaagggtctccgcgcgacgttgttccaggaggtcggcgagcccaaggcgggcgacgccgcgccgttcacggtgcattggtgcctggcgcaaccggtgtttccgatgtcgatgctcggtcctgacggccacccgacccgcggcggcttcctgccgccggtgccgctgccgcgccggatgtgggctggcggcgagatcgaattcctgcagccgctctgcgtcggcgatgaatcgacccggacctcgcgaatcgccgatgtgcaggtcaaatcaggctcgaccggcacgttgtgcttcgtctcggtcgagcacagcatctcctcgccgcgtggcaccgcgatccgcgaacggcaggacatcgtttaccgcgaaatgacgggtacgcaggcggctcccgcaaaggccccgcctccggcgccgaaggcgcagcaccgcgagacccatgtgtcggaccccgtgttgctgttccgctactcggcgctgacgttcaacggccaccgcatccattacgaccgcgactacgtcaccaaggtcgaaggctatccgggactgatcttccacgggccgctgcaggcggcgctgatcatcgagatggcggccaaacttcacggcggcaaggcgccgaagaagttcacctaccgcggactccagccgctgttcgagggcacggagttctccgtcaacgccaacgagatcgaggcgggcatggagctgtggacggccaacgcggaggggcagccgacgatgaagggcacggcggtgtggtgatgtctctcctcgtcattgcgaggagcgaagcgacgaagnnnnnnnnnncggggctggtagcgcggcaataaacgacagggacggaaaccatggccaagaacggcaagagcggcagcaagtccgtcaccgtcaagcaggcgacgctcgacctgctgcgctccttccgcatcgacaaggtgttcggcaatcccggttcgaccgaactgccgttcctgagcgactggcctgatgacatcgactatgtgctggcgctgcaggaggccagcgcggtcggcatggccgacggatacgcgcaggcgacgcgcaatgccggcttcgtgaacctgcattcggcggccggcgtcggcaatgcgctcggcaacatctacaccgcgcaccgcaaccagacgccgctcgtgatcaccgcgggccagcaggcgcgctcgatcctgcctttgcaggcgttcctctatgccgagcgcgcctcggagtttccgcggccctatgtcaaatacagcgtcgaaccggcgcggcccgaggacgtgccggccgcgatcgcgcgggcctattacaccgcgatgcagccgccgtgcgggccgaccttcgtgtcgatcccggtcgacgactgggcgcatgcctgcgcaccggtcgaggtgcgcaaggtcagccgcgagatcgggcccgagccggaggcgatgcaggcgctggtgaaggcactgacgtcaagcaagcatcctgccctcgtcgtcggccccggcgtcgaccgcgcgggcgcggtcgatctgatggtgcgcgtggctgagaaggccaaggcgagcgtctgggtcagcccgttctcggcgcgctgctcgttccccgagcggcatccgcagtttgcgggcttcctgcacgcgtcccccgcgcagctgtccgatgcgctgcgcgagcacgatctcgtcgtcgtcatcggcgcgccggtgttcaccttccatgtcgagggccatgccgcgatcttcgatggcggcgcagccatcttccagatcaccgacgattccgacgccgcggcggtgacgcccgtcggcaccagcatcatcgcgacgatgaagccggcgctttcgatgctgctcgaccttttgccggagagcaagcgcgccatgccgaagggccgcgcgctgcctgcggcgccacaggccgccgatccgctgccggtggaattcctgctgcattcgctatcgcatgcgatgccggatggcgcttcactcgtcgaggaagtgccctcgcaccggccggcgatgcaaaaattcatgccgatgcccggccaggacagtttctacaccatggcaagcggcggcctcggctactccctgcccgccgcggtcggcatggcgctcggcaagccgaagcaacgcacggtgtgcctgatcggcgacggctcggcgatgtattcgatccaggcactgtggaccgcggcgcagcgcaagctgccgctgaccgtcgtcgtcatcaacaattccggctacggcgcgatgcgctccttcagccaggtgatgcaggtgcgcaacgtgcccgggctggaattaccgggaatcgacttcgtgcggctcgcggagggcgtggggtgccacgcggtgcgggtgaccaaggcggcggaactgggcgaagccctgaagcgcagcttggcgcatgagggcacgagccttgtcgaggtcgtcgtggattcggcggtgcctgtgctgtacgggcagaagcattgaggcgcgcgtagtccggacggcgcgaaagcgcaatccgggaatcgcgccacaagcgggtcggcccggattgcgctccgctccatccgggctacgacgccacggcgaactacgacgccaagaatcccccgtccgccgccagcacgtgcccgacgacgtacgacgacgcatccgacgacagccacaccacggcctccgcaacttcctccgggctccccatccgccgcagcggaaggccggcgctgacggtcgcgatgtcgccgacaccggcgcgcagcatcatgtcggtgacgacgcggcccggcgcgatggcgttgatgcggatgccgcgcggggcgttctccagcgcggccgagcgcgtcagcgagatcgcggcggccttcgaggccgagtagagcgagaagccgggattgggattgcgcatgccgctgacggaggcgttgacgacgatgctgccgcggccctgcgccagcatcgcgggcagctggtgacgcaggcacaggaacagcgcgcggacattggtgtcgaacacgttatcgtaaatctcggtgccctgctcttccagcggcgcgcggcgctcctggaagccggcattgttgaaggcgacgtcgagccgaccgcagcgctcgatggctgtgccgacgagtcgcgcgacctcgtcctcgcgcgtgatgtcggtctgaagcgcgatcgcgtccgtgccgagctcacggcacgaagtcgcggtggcctcgatctcggccgcgcgccggccggcgaccaggatcgcctcggcgccttcggatgccatccgcagcgcggtggcacggccgatgccgcttccgccgccagtgatcaggcagaccttgcctctcatccgcatcccggtcggcaaagcttcgctcatgactcactccaagacgcttgcgcgcgccgttgcacgcctatagttgtatgatacaactatatgccgggagtcaagatggccgagctttccttgatcgacgacatccgtgccgcctcgcgcctgatggtgcgcgagctcggcttcatggatgcgacggtcgcggcgtcggattatccgccctcggcggtccacacgatcctggagatcggcatccgcggtccgatgacatcgggcgagctcggcgatttcctgcggctggagaaatccagcgtcagccgtctggtacgcaagctgatcgactgcggcgaattgcgggagacgccggatgagacggatgcccgcagcaagaagttgtcgctgacggcaaagggccgccgcacgctcgaggcgctgcatgcgttcggccgccagcaggtgcgcggcgcgctggcggcgctgacgccggccgagcagcgcacggtgcgcgagggcatgatgctctatgcgcgggcactgcgggcgagtcgggtggagagcgagtcggctgcttgaccaccgctgtcgttccgccttcgcggggacgacagcgagtgtttggcgcaaatgtgcttcaatcgccccgggatgacctaacggtcacttcccgaactcctcccgcatcttggcctggatcttggccatgccgccgatccagcggtcataattctcggtcttcttgcgcatgtagccgagcacctgcgggtgcggcaggatcaggaaggtttcctgctcgaggccggcgagcacgtctttcgccacctgttccggcgtcaggtcgccgtcgccggattgcggtcccttggggatcgagcgcagcatgttggtgtcgacgccctgcggacacaggatcgagaccttgatgttgtgggccttgtgcgagattgcgagattttcggcaaagccgaccgcggcgtgcttggtggtggaataagcggggctgccaacctgggacagcagaccggcggccgagatggtgttgagaaaatagccgccgccgcgcgccctcatgcgggggatgagatgccgcgccgcgtagacatgggccatgacgtggatcgcccagctgcgctgccagggctcgtccgaggcgccgccggcattctccgacatcgggtcgaagccgccgccgatgccggcattggagcagaacaggtcgatggggccgaactgccgttccgtctcctcgatgacgtggacgatatcattctcctgcgagacgtcgcatttgaaggcagcgccatcgaccatggccgcgacggctctcgcattggcggcgtccaagtccgcgacgacgaccttggcggcgcccgcattgtgaaaggcctcgcacagcgccttgccgatcccgtttgcgccacccgtgacgaccacgaccttgccggtcacctgcatgcgacgtctccccctttgcggcttcggaccgcgtctcttattccgtctcgcggcttgctcagctcaacacgaggtcgagcaccgcggtataatggcatgccgcgccggccaagacaaagccgtgccagattgcattctggaaacgcagccggcgccaggcgtggaagatcacgccgaaactgtagagcaggccgcccgccaggatgaagccaagcaccagcgacggcagcgccttgacgaccgggccgtagatcatgacaccgctccagcccatcgcgaggtagatgccgaccgagacgcgatcgaaccggccgggatagaacagcttcagcacgatgccgaggatggcgacacaccagacacccgcgagcagcaccagcgcgaacccgctgtccttcacctccaggatgaagggggtataggtcgcagcgatcagcagatagatcgcggaatggtcgaagcgccgtagcagccacttggcgggcgagaccggccagagattataggtcgccgaaaacaccagcatcgagagcaggccggcaacgtagatcgatacgccgacgacgtcggctgcatcggcatagactgccgccagcacgaccagcacggtcgcggcgatgatgccggcgaggacaccgatcgcatggatgactccgtcggcaatgagttcggcgcgatcgtagttccagccgatcacgtccgcggcggcgtggacggagctggatgcgaattgtttcagctggaagacggtcatggcaatccgttaacgtgaggcagcactcttctatgggtgtttcgggatcggcgcgtcgttcaagcggctgacttgccgacaaaggcggtggaagtatgaagcttgattttcctcatgcaattgccacttttgtgaacagccgcacgttcctcccgcttcagatccgttaacgttcatatggcattcagtttccaggatatcgtcgaagaagcgcggctgtcggcgagggccttgatcgactatggcgagcacttcttcaacccgacggtgcggttaggcgttaccggcctgtcgcgggccggcaagaccgtgttcatcaccgccctgatcaacggtctcacgcggggcggccggtttccggtgttcgaggcctatgcctcgggccggatcgcgcgggtgcatctggcgccgcagcctgatgatgccgtgccgcgcttcgcctatgagagccatctgcacgcgctgatcgaggagcggcgctggccgagctcgacggtggatatcagcgagctcaggctcgtcatcgactaccagcgtccgaacggcgccgaccgcacgctgacgctggacatcgtcgattatcccggcgaatggctgctcgacctgccgttgctgcagaagagctacgaacaatggtcggcggagagtcttgcgctgtcgcgcgaggcaccgcgcgcgcatctcgcgaccgagtggcacgcccatctcgcgacgctcaagcctgaagcgcgcgaggatgaacacgcgacgctgaccgccgcaaagctcttcaccgattatctgcgcgcctgccgcgacgagcgatttgcgatgagcctgttgccgcccggccgtttcctgatgcccggcaatctcgcaggctcacccgcgctgacctttgcgccgctcgatttgcccgctggcggacaggcactggacggatcgctgtgggccatgatggtgcggcgcttcgaggcctacaaggacgtcgtggtgcggccgttcttccgcgaccatttcgcgcgcctcgatcgccagatcgtgctggccgatgccctcgccgccttcaattccgggcccgaggcgctgcacgatctcgaagctgcactcgccggcattctcgattgcttcaacatcggccgcagcaccttgctcaccagcctgttccgaccgcgcatcgaccgcatcctgttcgcggcaaccaaggcggaccacctccatcactcaagccatgaccggctcgaggccgtgctacgccgcgccgtctctcgcgccgttgcgcgcgcggaagataccggggcggagatcgacgtcgtcgcgctcgctgccgtccgcgccacccgcgaggcgcaggtggcgcatggccgcgacagactgccgtcgatcctgggaacgccggctgcgggcgagagcgcgggcggcgagttcttcgacggcaacaccgaggttgcgacgtttcccggcgatctgcccgtcgatcccgagccgctgttcaacggcacggacgcgttccgcggcctctcgacgcaggccgccggcaagagcgacttccgcttcctgcgcttccgcccgcccaagctcgcacgcgaaggcactagcgagccgacgctgccacacatccgcctcgaccgtgccttgcagttcctgatcggagacaagctcgcatgaatgatcgatcccagcagcggcggccggcgacattccggctcgacgatcccgccgtcgtcgtcgccgaagccgacgagacgggacggctcggtcgcggcacgatccagatcacgccggagcatgatccggcgatgctaccggtgccgatcgaggccgcgctgaccgcgcgacgccgttttccctggggaaccctgttctggtccggtctcgccgggctgacgctgcttggcgtggggctgggcgtggtccatctgatcgaggatttgtttgcgcgcagcgaaacgctcggcttcgtcggcctcgccttcgctttcgtcaccgcgcttgcacttgccgtcgtgatcggacgcgaggcatttgggctggcacggcttgcgacgatcgagaagttgcatcagcgcgcagcggccgtgctcgccagcgacgaccgcaaggagagccgagtcatcgtgcaggacctgctccagatcgcgcatcagaatccgcaactcgcgcgcgcccgcgccacgctggagagccacgccggcgagatcatcgatggcgccgacatgatccgccttgccgagcgcgagttgatgtcgccgctggatgccgaggcacggcggctggtgtcgtcggccgcgcagaaagtgtcgatcgtcactgcggtaagcccgcgcgccgcgatcgacgtgctgttcgtgttcgtcgccgcgctgcgcctgatccgccagctcgcctacctctatggcggccgccccggcgcgctcggcatgatccgcctgctccgccacgtcatcgcccatctcgccatcaccggcggcatggccgcgagcgacagcctggtgcagcagatgctcggccacggcatcgcggcaaagctgtcgcaacggctgggagaaggcgtgctcaacggactgctgacggcccggctgggcctcgccgcgatcgacgtcacgaggccgctgccgtttgcggcattgccggcgccgaagctgtcggatctggcgacggatctgctgcgcaagaaggacggggaggagtagtggctcctccttacgctcccctggagggggacgaagagccgcgcagatctcgcgccgaattgcctgccaataccttccaccggaacaacggcgagtccttcggcggggacagctccggggtccagccggtcagcttttcgatcacataggtatccatcacgaggccgcgccagcggcgttcgaccctgccgagcagctggcgcttcgccgggatatgttcccacaccgacgatcgatcatccggctcgcgccctacgtaaattcccgcctcgcctctgatcttgtccatgccgggatcgcggaaatcctggaaacggccgcgctcgttgagctcgatcaccggcacgcgaccgcggaacagccagcgcatcatggcgtaggtgcggtagtccgtggtggcgatccagcgggcacccatttcgtcgagtgcggcctgcgcgcgtgcagcgacctgctcgtagccggcctccgctccgatcggatcgatcttgccgaggagattccagggcgcggcgacataatagaggaacacgatgacgacgaaggcgatgcccgagacgattgcggtcttgacccagaacagcgacgagtggagcatccgggccgaccatccctccttcctcatcagcacaaggttcacggccgccgcggcaaagccgaccggccacatgaacatcggccaggtgtcgccaacacgaagcgtcagcgacttgaagaagaaataaagaaacggcaccagcaccgcggtcgagagcaggatggcgacaggctcgcgcttgcgatagccgcgccatgccgtcatgaccaatcccgtcagcaccaccggcagcatgacgaaaccgacgaggccgaattgcaggccgatgtaatcgccgatggtgcgcggcgagatgccgtaattggcggtggcgcgcacgccctggaaccggaacgaggcccagtcatgctgcgcgttccagatcagcaccggcgagaacaccgctatcgcgaccagcacggcaagataagggtaagggctgcgcagccaacgccagcgccactccggcaccagcagaaaggcggccaccgctggcgcaaacatgatcgcggtgaatttcgacaacatcgccaggcccgcaaacagcccggcggcgagccaccagcggccgtcgccgccttgcgtcagccgcaccagcgaccacatcatcgcgaccgcaaaagggatcatcgcgacatcgggcgcgaccttggccatcagcaggccataatagagcgcagcttccggcatcagcaccgcgaacatgatcgcgcgcgcatcatgcgtgaggcggcggacgatgtcggcgagcagaagctgcgtcaccagcatcgcgacgatgccgccgaagcggacgccgagcgtggtgtcgccgaagattgctgtgccgaagcgaatgagccaggcgatgccgggtggatgatcgaggaagctgagcgccgtctccttggaccaggtccagtaataagcctcgtcggtgcgcagctcgatcgcggaggcgtagacgatgcgcagcacggtcatcgcggcgatgacgaacgtcgcaacaaggataagccggcgttcggcgccgtcgggcttctcagagatgtcgggcgcgatcgtcacggccgcgcttttccccgacttgggaaggggagtcaatgtgaagcaagctctctccaggacccacacagggagggatcggcggtcagtccgagttaccggcccgccacaaacatctcatgtggctctgagtcccggatcggagcgcccgggggcgcgctggcccgggccggtggattgatggctcctccttgttggctcctggggggtatgacctcacagcctgtccacatcggaaattgagcgccaggctggccgttctcgttcgtgaactgatacaaacacgtcatggccaccgctgctgcacccatgtccgaactcgtccgcgccaccggcgcgcggcaggtgcggctcgtctgcggtgtcatcctgttcgcatacgtggtcagccacttcctcaaccatgcgctcggcaacatctccgtcgaagccatggaggccggggtctactatcatacgctcttttggcagttcctccccgtctcgatcatcttttacacggccgcactcagccatatggggctcggcatctatgcgctgtaccagcgtcgacagtttcgctggcgaacgatcgagccgctccagctggtcctggggttgagcatccccgctttggtcatggggcatgtgatcggggtgcggctcggctacacgctgtacgatcatcagaagctctatccgcaggagctttatctgttcttcgttgccgcgcccggccggctctggcagatgaccatcctgcttctcatcgcttgggtgcacggctgcatcggaatctatttctggctccgcctcaagccgttcttcccacgcgcagcgccctatcttcttgcgactgccgtgctgatcccgacgctgtcgctgctcggcatctatcagggtggccgcagcatcgagatcgagagcgacgatcgagactggcgcgcgcaaaatctcggccgccgtcaggtcggcaccgtcgcggaaaacaacgcgctcgaccgtatcgccggtggtctcaacgcaggctatttcggactgctgggactcgtgctggtggcgcgcggcgtgcgcgcctggcgcgaacggcgtggcggcatgatcgcgttgtcctacggcaacggcaagacagtgcgcgttcccaagggtctctccgtgctggaagcaagcctgcgccacaacgtgccgcatgccagcgtctgcggcggacgcgcccgctgctcgacctgccgcatccgcgtcatcggcgatcacgacgccctgcctacaccgtcacagcgcgaagccttcgtgctcacccgcgtcggcacggcagatccctcgatcaggctggcctgccagttgcggccgacgtccgacctctccttcttccagctcttcgcacctcacactcattcgaccgacgaggcctcgacatcagccagtatcggccaggagcgctatctcgtcagcctgttcgtggacatgcgcggctcgacccagcttgcggaaaagcgactgccgttcgacaccgtcttcatcgtcaaccgcttcctcggcgcggtgtcgcaggccgtgatcgaaaacggcggccagccgaaccagttcgtcggcgacggcatgctggcgctgttcgggctctcggccgatccgcaaacggcctgccgacaggcgctgaaggcggcgtccggcattggagtgcatatcgacgagctcaacgacctcctgagccacgatctgcgagagccgatccgcttcggcatcggcattcacggcggcgaggtcatcatcggagacatcgggtatcgcgatcacgtcgtcttcacggcgctcggcgatgccgtcaacgtcgccgcccgcctgcaggagatgaccaaggggctggcttgtgaggccgttgtctcggaagaagtgcgcgacaacgccggccttgccgaagacgccctgccacagcaggaggtcgcgatccgcggccgcgacgagccgcttgccgtgcgcgtggtggcgaatgcgagacagttggccgcgctggtcgatcgaagcgagcgcgttgctgcttaaggcaaccgggcgacgcgctcctctcccgctcgcgggagaggtgaaacgcacgcccgctgacgcagctcggctcaatctgctacaggcgtaacaccggcctgctgtaacgcagcggcatgggctcgctgcgaaagcgcgaattgacttcacgcaaatggttgcgacagatgcgcgcagggatcgtggtgacgaccatgggcccaacgaaaagctccgggaggagaaaagcatgttcgatcgacgcgacctgctcaagggagcaggtcttgccgcgatggcggccgcactgaattccaccaaagcgttggcgctcgacaccgtcacgctgcccttcgccaatggcgagcggccgctggtgaagtatccgcagaagcggccgatgatcggcctcaccagccgtccgccgcagctcgagacgccgtttgcggtgtttaacgagggtccgatcacgcccaacaatgcgttcttcgtgcgctatcacctctccgacctgccctacaatctcgatcccgacaagttcacgctcgaggtcaagggcaaggtcaacaagccgctgaaattgtcgctgaaagacatcaggaagatgaaggcgaccgagatcgtcgccgtcaatcagtgctccggcaacagccgcggcttcgtcgagccgagggtcgctggtgggcaactcgccaacggcgccatgggctgtgcgcgctggcgcggcgtaccgttgaaggcggtgctggaaatggcgggcgtgcaggccggtgccaggcaggtcaccttcaacggcatggacggcccggtcagcgacaagacgcccgacttcgtcaaggcgctcgatctcgatcatgccaccgacggcgaggtgatgctggcctatggcatgaacggcgaggatctgccgttcctcaacggcttcccgctgcgcctgatcgtgcccggctattacggcacctactgggtcaagcacctcaacgagatcacggtcatcgacaacatctatgacggcttctggatgaagtcggcctatcgcattcccgatacgcccaacaacgcgatcgagcccggcaccgcgccgaaggcgacgattccgatcaaccgtttcaccatccgctccttcatcaccagcgtccccgacggtgccaagctgaaggccggccgcacgaccctgcgcggcatcgccttcgacggcggcaagggcatcaaggaggtccaggtctccaccgacggcggcaagacctgggccggcgccaagctcggcaaggatctcggcaaatacgcgttccgcgaatggaagctgccggtgaagctcacggccggcagccacgagttcaaggtccgcgccaccggcactggcggcgagacccagccggatatgccccgatggaacccggcgggttatctgcgcaacgtcgtcgaaaccgtccgcgtcaccgtagcctgaagagaatgatcatgcagcccgccgttctcctgaccattcccctcgcgcttgccctcgcggtgggggcggcacttgcagcgccgatcaattacaagaccccggacgaggtcgcggccttcaagcccggccccagtctcgaagtcgtgcagggcaattgcagcgcctgccattcgtccgactacatcgccacgcaaccgccgatgaaggacaagaaggccttctggcaggccgaggtgaccaagatgatcaagatctacggcgcgccgatcgacgatgccgacgtcggcaagatcgtcgactacctggccacgacctattgacggagcccaagacacgcgcagtcaatcgaccgcgaaacgggcaaaaccggcaaaaacgctgcgaagttgagcggaattcggcgaaatgcggatgtggtttgagctaccaagcccgccacattccgcgtatcctgttaggaccgaaccggccggttggcggggattggcggttcgagatctcggaggaagacccgcggagaagtcgtgatggctaaaggtacggtcaagtggttcaacccgacgaagggttatggatttatccagcctgcgtcgggtggcaaggatgtgttcgtgcatatctcggcagtgcagaaggccggtttgtccacgcttaacgaagggcagacggtggaatacgaagaaatcgcaaaccggggcaagacctccgcagagaacctcaaagtataagcccgcgccagcctttgctgcctcccggatttgtccgggagcggggccaagaagatttcagaagacggccagtgcattcgacgacaggcgttgcgattgcacgaggatagttattttttcctgcgaagaccgcttgttcaacgcccagcaatgacaatcgcgacggcatttcgtcagcccaccggcaacggtgcgtcgcgcttgatctcctccatcaccgcataagtccgcgtctcgcgcacgcccggcatcgacagcagggtctcgccaagaaagcgtcgataggcggccatgtccgccagccgcgccttcacaagatagtcgaagccgccggcaaccatgtgacactccagaacttcaggtgcgagcttcacggcgcgggcaaaccgctcgaaattgtcgggcgtggtcttgtccagcagcacctcgacgaacaccagaagaccgaggccaagccggtgcgggttcagccgggcgccatagccttcgacaaagccctcgcgctgcaaacgcttcagccgctcgccgatcgacgtcggcgacagcccgatgcgctcggccagctcgacattggcaatgcgtccatcctcctgcaaaatcgagaggattctccggtcaattcggtctagacccatattttataaggccatttcgcgtttcaaatcaattttctaaggcaatacctcaaaattgtctatcgaactacgggagcgggcgtcttatcctggattgcagccacgggacacgtcatgccgaatacccccccgcccttctccgctccctacgcccccgatgacgccgagatcgcagcaaagctcctgccggcctcgcagccagcccccgcgctggaggcgcggatcgaccgcaccgcgacgcggctgatcgaggcgatccgcaagcgcgacgatcggctcggcggggtggaggacatgctgcgggagttcgcgctctcgaccaaggaggggcttgcgctgatggtgctggcggaagcgctgctgcgcgtgccggatgcgcagaccgcggaccagttcatcgaggacaagctcggcgagggcgatttcatccatcacgaaaccaagtccacggcgttcctggtcaacgcctcggcctgggcgctcggactgtcggcgcgggtgatccagccgggcgagacgcccgacggcaccatcggccgcctcgtcaagcggctcggtgcgcccgcggtgcgcaccgccacgcggcaggcgatgcggctgatggggaatcatttcgtgctcggcgagaccatcgagcaggcgctggagcggggccgtccgcgctccgggcagaagccgcgctattccttcgacatgctcggcgaaggcgcgcgcacggctgccgacgcaacgcgctatttcgatgcctacgccagcgcgatcgacacgatcggcaaggccgccggcaaccatcccctgcccgaccggcccggcatctcggtcaagctctcggcgttgcatccgcgcttcgaggcgatcagccggaaccgcgtgatgatcgagctggtgcccctgctgctggacctcgcccggcgggccaaggcgcacgacctcaacttcaccgtcgatgccgaggaggccgaccggctggagctgtcgctcgacgtgatcgcggtgacgctcgccgatccgtcgctcgccggctgggacggatttggcctcgccatccaagcctatcagaaacgcgccggtgcggtgatcgactatgtcgacgaactcgcgcgcgcgcatgaccgcaagctgatggtgcggctcgtcaagggcgcctattgggacaccgagatcaagcgcgcgcaggagcgcgggctcgacggctatcccgtgttcacgcgcaaggcgatgaccgatctcaactacgtcgcctgcgcgacgaagctgctggccctgcggccgcgcatcttcccgcaattcgccacccacaacgcgctgacggttgcgaccgtgctcgagctcgccgcgggcagcggcggcttcgagttccaacgcctgcacggcatgggcgaagccctctacgagcaactggcaacagattatcctgacatcgcctaccgcacctatgcgcctgtcggtagccatcgcgatctgctcgcttatctcgtgcggcgtctcctggaaaatggcgcgaactcgtcctttgtggcccaggccgccgattatcgcgtcccggtctcggtgctgctgcagcgcccggcggacgcgatcggccggccgcaggcggcggcccatcccaagattccgctgcccggcgatctcttcgcgccggagcggcgcaattcgcgcggtgtcgaatttggtgagcgcgccgccctcgatcggctgctggccgatgtgaaggccgaggtcgccgacctcgagcccgtcgtggacgcaacgccggaccaggccaatgcggcggtggccgcagcgcgcgccggctttgccgcctggagccgaaccccggcagccgcgcgtgcggcggcgctgcagcgggccgcgcatctgctggaaagccgtggcggtcatttcatcgcgttgctccaatgcgagggcggcaagacgctcgacgatgcgctctcggaactgcgcgaaaccgtggacttctgccgctattatgctgcgcagggccgcaagctgttcggcggcgaaatcgccatgccgggtccgaccggcgagagcaacacgctcgcaatgcgtgggcgcggcgtgttcgttgcaatctcgccgtggaattttccgctggcgattttcctggggcaggtcagcgcggcgctgatggccggcaacagcgtcgtggcaaaaccggccgagcagacgccgcgcatcgcgcgcgaggcggtggcgctgctgcacgaggccggcattcccgagagcgcactgcatctcgtccccggtgacggccgcatcggaggcctgctcaccgcacaccccgaggtcgccggtgtcgtcttcaccggctcgaccgaggtggcccgcagcatcaaccggacgctcgccgcgaagaacgggccgatcgttccgctaatcgccgagaccggcggcatcaacgccatgatcgcggatgcgaccgcactgccggagcaggtcgccgacgacgtcgtgacgtccgccttccgctccgccggccagcgctgctcggcgctgcggctcctgttcgtgcaggaggatgtcgccgatcgcatgatcgagatgatcgcgggcgccgcgcgcgagttgaagatcggcgatccctccgacgtcgcaacccatgtcggcccggtgatcgacgaggacgccaagcagcgcctcgatgcgcacatcgcgcggatgaagcgcgaggcgcggctgcacttcgcaggcgaggcaccggacggctgcttcgtcgcgccgcacattttcgagctggaggacgccggccaactcaccgaggaggtcttcggcccgatcctgcatgtcgtccgctatcgcgccgagaacctcgaccgtgccttgcaggcggtcgagcgcaccggctacgggctcacgctcggcatccattcgcgcatcgacgacacgatcgagggcatcatcgaccgcgtccaggtcggcaacgtctacgtcaaccgcaacatgatcggcgcggtggtcggcgtgcagccgttcgggggccacggcctgtccggaaccggcccgaaggcgggaggcccgcattacctcgcacgctttgccaccgagcagaccgtaaccatcaataccgcggcggccggcggcaatgccgcgttgcttgcgggagaggagtgaggccctgcgccgggcgccgttgcatcccgcggaaacatcggtctaatgcttccatcactcacccgcgcctattccagcgcgcgggaaacgacaagagcgagggagcaacgccgcgatggacaagggcatttttgcggggctgaaggttctggactgcgcgagcttcatagcagcgccggcggccgcgaccgtgctgtcggatttcggtgccgacgtcatcaagatcgagccgcccggcgccggcgacccctaccgcaacctgccgaacctgcccggctatcccaccggcgagcataatttcgcctggctgctggaggcccgcaacaagaagagcatcgcgctcgatctatccaagcctgaagcgcaggccgtgctgtacaagctggtggaagaggccgacgtcttcatcaccaacatgccgccgcccgtgcgcgccaagctcggcatcacctatgaccacctcgcccatctcaacgaccggctgatctacgcctccttcaccggctatggcgaaaagggcgaggaagccaacaagcccggcttcgacagcaacgcctattgggcgcgctccggcctgatggacctcgtccgtgccgacaccgacacgacgccggcgcgctcggtcgccggcatgggcgaccacccctgcgccatggcgttctacggcgccatcgtcaccgcgctctatcagcgcgagaagaccggcaagggctcgcatgtcgcctccaatctgatggcgaacggggtgtgggcggcgagcgtgctggcgcaggcaaagctgtgcggcgccaagttcggcgagcggcgcccgcgcgaacgcgcgctgaacgcggtcgccaatcactaccagtgcaaggacggccgctggctgatcctgtcgctgctgaacgaggagaagcagtttccgacgctggccaaatgcctggggcgcgaggatctgatcaatgatccccgtttcgtcaccaaggccgaccgtcacgcccgctcggtcgagctgatcaagatcctggacgaaaccttcgctacgaaagatctcgccgaatggcgaaaaatcctcgatggtagtggcctggtgttcggggtcgtcgccattctggacgacatccccaacgacaagcagatgctcgacaacgaggtgctggtgccgttcgagaatgacaccatgctcaccatcaacagcccgatctggatcgatggcgcgaagaaggtgcagccgcgcaagccgcccgctgtcggcgagcacagtgacgagatcttgcgcgctgcgggatacgacgaggcggcgatcaggcagcttcggtcgaacggagcggtgggataggccggcgcgcgggcgttacttccgcgcgatcaagccgcccaccagctccaacagctccgccttcgcctcacggcggaagccggccctgggcgtggcgagttgacgaaacagcaagccgatcaacgccgagacgaacaactcggcgtgagggcgtgggtttggcgacttcgcggccttcagcgcaagctccgcactctgccgccacgtgtcaaaccactcggcgaccacgggccgatagcagggttgcctcgcggcagccaggaaagcctcatagcaggcgatatgcgtctcggcttctgtgccgagttcccggacatagaagtcgaccagcgcatcgatccaggcctcgacctcgaatgccttatcctgaaggccgagggccaacgcacgcagccggccgacctcgcgcgccagagcgaactgcagcgccgcctctaccagcgcatcacggggtccgaaatgatgcgtgaccgcaccgagtgaaaccccggcttcggccgcgaccgcccggtgggtcacgccgtccagcccatgtcgcccgatgatgcgcagcgtcgcctgcatcagggaccgctcgcgctcgcccgactccgtctttgaatccctgctcatccggtccagcatccagctcttgaccaacgacagaacaaatgttctgttatgcggatcatatgtaatatcgtcgtccaggccgccgaaggcaaggagcgttcaatgcccagctaccgcctccactatttccccgagtcaggcaacagctacaagctggcgctgatgctgacgatgtgcggcgagacattcgagccgctgtggactgattttgccggcggcgtcacgcgtagtgcggaatggcgcaaagccgtgaacgagatgggcgagatcccggtgctcgaggtcgacggggtgaagatgacccagaccgcgcctcttctgctcaagctcgccgaacagtacgggcgtttcggcgccgagacggagaacgagaagttcgagctgctgcggtggctgttctgggacaaccacaagctcaccggctacatggcgacctaccgcttcatgcgcgcgttcaccgagaagaacgacccgcaggtgctgaaacatttccgccggcggctggaggatttcctcggcattctcgacggccatctccagcacaatgctttcgcgatcggaccacggccgacaatcgccgacatctcgatgatggcctatctgcactatccgagcgacgagcacggcttcgatttcgcggtgagccatccggccatccatgcctggctcggccgcatggcggcgctgtccggctggaagccggcctatgagctgctgccgggaaagcggatgacgaattacgcgaggtgaagtgcaccgctagcgcaatgcgagccagcccagcgcaaacaagatcccgcatacgatggcggccatcgcgatcgcccagatgctgacgcgcgcgctgccgatgacctgcttggcttcctcattgcgcgcgatcttgcgattacgctccttattggcctcgctggtattcatggatcatccaaatcgcttgaggtttagcgcgtcttgatgaagcacatgccgatacggccggaggccgaggcagcctgacaggtgagacctttagcacagctccacgacgtaaaactcttgtccggcgctcccggtccctgattttggagggaacaatgcgcgccccagccgtcctgatattgggtgccggcaagctcgcggctgccgcgggtctgtggcctactggcgaatccgcgtgaaaaatcagggcgtttccctgcggcaaaggcggccaggatgtcgcgccggcggagctggtcgccgaagaaatgcggcgaggccgggacgatcgtggaatgcgacggcttgtcggcgagccagtcgacgcccgggaaatggaagccgccgatgccgcgggtctggtggcagccggcgcaggtgacgtcattgaggcggcgctggaagcctgcgaccgagcggacgttctgcatgtcgacgccgcgtgccgccacctgcttcagtgcgctgaccacgtcattgtcggtaaagacgggatcgcctttagcttcccggtttccttccccctgcatcattccgaactccggctgcaacgctgaggcatcgaggccggcgggggtcggcaccaccgcgcccttggccaggaacttctccgggatcatcaccgtgccgcgatcgaattcgcgcagatgatcgggcgcgagcagccaatccttgaactcacgccggagcgcatcgtcggcaagaatgcggtcgcggtcgatctggttctccagcgtcgattcccagaacgtcttcgtggcgccgtcgtacttgaacaccttgagcagatagtcggagcggaaatcgtgcagggccgatttcggcgcgaccgagatctggatgttggtctcgatgcggtcgagcatggcgtcgtaaggcggggcgcgactgccgatcaagccttgccagtcgccattgtcgagccagcgccgcgcgagctcggcgcaggtgattggtttgccgctcgcatcggtctggcgcggatcgcgtgccttcatcgcgaggttcaacgtcatcggcaggcgcgttgtggtcttgccgccttccgggctgctgtcgaaacgcgccagacgatagatcagccggatctcgccgcaggactcctccgagacaaaagcgcggtccatgcgattgacgatgccggccagcacaaaccgcgtgtcgcgggatttcaggctggcccgatcgaacagctggacgtcaaagccttcgccggcaccgatggtctcgcccggataagtcgccttgtaccaggcgatgtagcggtcaaattccgcatcgatcgcgggcggaatgtctctcagctgcggcagcgacgcgaacatcagctcggtcgagagcgggacgtccgaattccgttccggcgacaagaggcgcgagatcgtcaacgtgtcgccctgatccagctgacgcagcagagcggggtcggtgatcgcggtgccgcgcgtcaattgcggggtctcggccgctggaagcgaaacgccaccgcccagcaatgcggcagcagcaacgagaattcgcaatatccggctcatgcctgagctaacaccgcccggaaacgcctgatcaagcaaaaaggcgcttcacaccctggtgaagcgcctttcgaaaagtcgtgtctgggccgctcagcgaccgacgatcaggcccctgctggtaacgaccacccagcggccgtcctgacggcggatcgcatcgacgcggccgacgccggggatggggtcgccgggatagacctcgtagaggccgtcgcgaccttcgatcagcgcaccgccattgccggcgttgcgcagcctccagccttcgatcgtcggcaaccggccgacctcggtcttgggcgcggcagctaccggagccggagcagctgcggcggtcgcaacctgggtcggcgcgatcgagccggtggtctccctggcgggcgcggcggccgcggcctgggcaggcgcggcgcggagcttgtccagggtctccgacaattttgcgatcttggccagcggctcggcctgcgccttctcgagcttgtcgaggcgatcgttggtccggttgaactggctgaggccggtcttcgagccgtgctcgacattggccttcagtgcggcgaggtcggcatcgatccgcgccacggacgcatccaacgcgcttgtgtcggcgacctgcaccggagcctgggccggcgcggcgaaacgcatcatgcccgcggtcgcgagcgcaccgctgatcgcgccgacgccggcggcaatagccaccaccgcggccatcgccgacaggcggcgtttgctgccggtttcgcgcggctcgtccgccttcacatgcggggcgaactcctcgcgctcccagccgcggtcggaaggcgacatgacgatgagcttgcctagcttcggctcgggcttggcttcagccttggactcggttcgggcctccgcctttgcgtcgaacttcgacacctcgagccgaggcggctccaccttcggggcttccgccttgaccggatccggcttcggcggcgcctcgtgatcaggggcgatcgagggggcgtcaatgccgggggcagccgcgacggcctgcggtgctgcggcgtcgacaacaccggtttcccgggcatcctgctcggacagtggttcgctcacggctcaaatactccagtctcggttgactttttggtaactttcattgcttgcgaaatccttacctcgggacccgctaaccgaaattttaggaagttatccggggccgaattgagccgggaaaatggaaccggtgtggcgggcgggaaacaattcgtaaccggacgaagatgaatggcgacgaaatgggccgtcgccctttccattcgctacgcgcgcgcgtgacggcgagaggacgcgtcaatcgcccgcagctcctgcatcgtcattgccgatgcggcttcatccacatcactgtccgtcacatcaccaccggcgcatccggcagttcgttcgcatgcggaccgtgcggagggaaatgccgcgccagctcgcgcgacaccgcctcgatgccggcgatcacgccgcgctcgaaacggcccgatctgaactcggcctccatcgcgcggcagatggtctcccagcctgcggcgccgaccttcgagtcgatgccgcgatcggcgacgatctcgacgtctcgatcggcgagcaggagatagatcagcacgccgttgttgtgcgcggtatcccagatgcgcaagtgcgcgaacacgtcgagcgcgcgctcgcgcgccggctggttgcggaacagtggcgcgccgtcgagcgcgccttcgaccacgaagcggacctggccggaatgggtggcttcgccgcgcttgatcgcctgctcgatgcgatcgagcacggctggcggaaagatctgcttggctcgccaatgatgctgcacgagatgccgggcgatacgcttgatgctcatgaccgctaccagttccccgaggcgccgccgccgccgaagctgcctccgccgccgctgaagccgccgctgcccgacgatccgctgctccagccgcccgaggagccgctcgaccacccgccgccgcgcgagcggccggtgcccggcggtatcgccgaaaacagatccgcgacaaatccgatgatgaagccgaggacgcccacggccatggcgagcgcggcggagccgagaatcagccaggtcaccgccgcgatgatgcccccggtcaccaacgatccgagcagccgtcccaagaccgcacgaaagaatccgccgacgccgatggaggcaaacagcgccgcggcaaataccggcgcgaggtcctccagattgtgggcgaagttcgcgctgcgcgaaggagacggcagcggctcgccatctatcacccgcatcatgcggtcgacgcctgcgccgatgcccgcggcgaagtcgccgctcctgaacttgggcgtgatatcttcgtcgatgatgcgccgtgaggtcacgtcggtcagcgcgccttcgaggccatagccgacctcgatgcgcaagcgccggtcgttcttggcgaccacaaggatcgcgccgtcgtcgaccttcttgcgcccgatcttccaggcctcggccacgcggatcgagaactgctcgatcgtctccggctgggtggtcggcacgatcagcacggcgatctgggtgcccttgcgattctcgaaatcttgcagcttttgcgacagcgcggcgatgtcggcgctggaaagcgtgccggtctgatcgacgacgcggccggtgagttgggggacggcaacgtcggcggaggccgagaaagcgaggccgagcttgaggagcagcacaagggcgagcacgcacgaggcggccaccgaatatgcccgccacacacccgctgtcatcgcccgcgaaggcagccgatgcagtattccagaggcagcagtgcttgaacggagaggctgcggcgtactggcttccctactttcgcggggaatgacggcgaagtgtggggcgcgcatgggagccgaacgcgcttacttcgacggcgctggtgcagggttgaagtccaccttcggcgcggtcgagattgccttctcgttctcgaccgaaaagttcggcttctccttgtagccgaacatcattgcggtgaggttgctcgggaacgagcggatggtgacattatagtcctgcaccgacttgatgtagcggttacgcgccacagtgatccggttctcggtcccctcgagctgcgacatcaggtccttgaacaaggcatccgacttcagctgcggatagttctcggtgacgaccagcagccgcgacagggcgctggagagttcgccctgggcggcctggaatttctggaacgcggcgggatcgttcaacacctcgggcgtcgcctggatgctgccgaccttggcccgggcattggtgacgccgagcagcacgtccttctcctgctgggcaaaacccttcaccgaattgacgaggttgggcacgagatcggcgcggcgctgatattggttcacgacctcggaccaggcggccttgatctgctcgtcctcgctctggatcgcattgtagccgcaattggtcaggctcagcgaggccagcgccgccagcacggtcaggatcttgcgcatcaaatttctcccggtggaatctctcgcaaactatcagattgcgcgcgcaagacgccagcttgccgatgtcattccaaagcgaactatggtgcgcatttgcgcacctgagaatctcgagatttcgggtctggtcctcggaccatccgggaatggctgcgccgatgaccacacgccagccggctgacgcaagcctcttgcctatcgcgggccgacatagtcaactccgacaaaacaaaagcggaaacgccagggggaacgcaatgagttcgttcgagaccatcctcgtggaacggccggacccggcgatcgcacggatcgtgatgaaccggcccgaggcgcgcaatgcgcagaacctgcaaatgacctacgacctcaacgccgccttcgacgcggcggtgcaggacgatgcggtcaaggtgatcatcctcgccggagccggtccgcacttttcgtcgggccatgacctgcgtgcgggcggcaagaacgaagcaggcaccgattttccgccggtaggaaattggggcggctttgccgaacccaatgcgcacggccgctttgcgcgcgagcaggagatatatctccagatcacgcgacgctggcgcaaccttgccaagccgaccattgccgaggtccacggcaagtgcatcgccggcggactgatgctggcctgggcctgcgacctcatcgtcgccagcgacgatgcgcagttctgcgatcccgtcgtcaccatgggcgtctgcggcgtcgaatggttcgtgcatccctgggaactcggtccgcgcaaggccaaggagttcctgttcacggccgacagctggagcgcgcaggaggctcaccagctcggcatggtcaatcaagtcgtgccgcgcgccgagctgtcctcgcgcgtgctcgagctggcgcgccggatcgcgacaaaaccgtccttcgcactgaagctgaccaaggaagccgtcaaccgctcggtcgacgtgatgggccagcccgccgcgatcgatcaggcctttgctctgcatcagctctgccacgcccacaatctccaggaattcggcatgatcgtcgatccttccggcctgcatccctccgtgcgcaagccgccggcggccgcggagtagcgatatggacctcaatctcagcgacgaacaaaagctgctgcgagaaagcgcggaacgcttcgtggccgagagctacgatgccgctcaccgccgcaagatggcgaacgacccgctcggcttcagtcctgccgtctggaagcagttcgccgagctcggctggctggcgctgccgttgcccgaagagtttggcgggctcggcggcggcgcggtcgatgtcggcatcctgatggaagccttcggccgcggcctggtatccgagccctatgtcgcaacggtcgtgctgggagccgcgctgatcgacagatgcggcaccacggagcagaagcaggcgagcctgcccaaggttgcggacgggtcgctgaagctcgcccttgcccattccgagcgcgcagcccggttcgatcttgccaaggtcgcgaccagtgccaacaagacggcgcagggctggcgcctcgccggcagcaagatcgccgtgcttgatggccacgccgccgacgagatcatcgtctccgcactgatgcacgaccatcacggcccttcggggcgaatcggcctgttcgccgtcccggcaacggcgccgggccttgcgatctccgactatgcgcgcctcggcggggggcgcgcctgcaatatcgagctgtctgacgtcaatctgccccaggacgccttgcttggagacggcagcgactcgctgcccgcgatcgaatgggcggtcgaccgcgctatggccgcgctcggcgcggaggccgtcggcatcatgcagacgttgctcgacacgacgctcgaatacaccaagatccgcaagcagttcggccggacgctgtccgccaaccaggtgatccgccaccgtctggccgacatggcgatgcaggtcgatgaatcccgctcgatggcgctgcgggctgcgttgaaggccgacagcccgccggtcgagcgcgcgcgggccgcctcgggggcgaaggcgaagatcggcagatgcgcgcgcttcgtcggcgaacagtcgatccagctgcatggcggcatgggcgtcaccgaggaactcgaggtcggcgcctatttcaagcggctcgtcgccttcgacacgctgttcggcggcagcgcgcatcattatggccgccacgccgagctgagccgccgggccgcctcggcctgacaggaggagcgcatcatggatctgtcgttcaatgccgaagagcgtgccttccaggacgaggtgcgcaacttcattgcgaagaacctcaccgacgagatgaagcgcgcgaccgcgctgacgccgtcggtgttctccgatcccgacgtcggcatggcctggcagcgcgcgctgcacaagcagggctggggcgcaccgggctggccggtggaacatggcggacccgactggacgccggcgcagcgctggatcttcgagacggaatgtgcacgcgcgggcgtacccaacgtcaacgtgatgggcgtgaagatggtcgggcccgtcatcatcggcttcggcagccctgaacagaagaacttctacctgccgcggattctctccggcgaggactattggtgccagggctattccgagccgggctccggctccgatctctcttcgttgaagacgcgcgcggtgcgcgatggtgatgattacatcatcaacggcaccaagatctggaccacgcacgcccatcacgccaaccgcatgttcgcgctggtgcgcaccagcgacgggccgcggcagcaggatggcatcagcttcatcctgatcgacatgaagacgccgggcatcaccacccgcccgatcctgaccatcggcggcgaccacgaggtcaatcaggtgttcttcgacgacgtgcgcgtgccggtcgccaaccgcgtcggcgaggaaggcaaggggtggacctacggcaaatatttgctcgagttcgaacgcggcgccggcatcgcctcggccaagctgcgcgaggggctgagggcgatcgcggatctcgccgagtcggacctcacgggccgggccatcgatagccccgatatcgcaacacgtatctccgaggtcgaagtcgatatcgacgcgctggagatgaccgagcttagggtgctttcggcgctccagaccggacaaaatccgggcgcggtgtcgtcgatcctgaaattgcgcaacagcgagatccgccaggccgtgacgcggctgggcgccgacgtgattggccatgacgccctcgccgtcgaaccgatgcgcccgctctacaagctcaatcacgagccggcgacgcctgaggagatgctgaccgtgatgccggaatatctcaacggccgcgcctacacgatcttcggcggcacgtcggagatccagcgcgacatcattgcgaagatgatgctggggatttagccgggctggcgctccaccctccgccgtcgtcccggataagcggagcgccgatccgggacgacggcggagatcggaacgacgaggagagttaacccgccgcctttgcgtcccggatcgcctgccagaccttctgcggcgtcaggggcgtgttgagctgggtgatgccgagctcggcgagcgcgtccatcacaccgttggtgacgcaaggcgggccgccgatggcgccggattcgccgcagcctttggcgccgagtggattggtgcggcatggtgcggaatcatccagcgtcaccacgatcggcgggatgtcgtcggcgcgcgggatacagtaatcctggtagctcgcggtgaggagctggccgtcggcatcgtaagacacgccctcatacagggcctggccgatgccctgcgccacgccgccgtggatctggccggtgaccagcatcggattcacggcgacgccgacatcgtcgacggtggtgtagcgaacgacgcgggagacaccggtctcgggatcgatctcgacctcgcagatgtgcgtgccgttcggccagctcggaccgtcgacctcgccttcggaatcgacactgagctttgcgccgctttccttctcggcgagatcgaacaggctgatgcggcggtcggtgccgaccacggtgagcatgccgccctgatattcgatgtcctcgaccgaggtctcgagcacgttcgccgccttctcgcgcgccttctggaccaagtcgttcgaggagaccgcgacggccgtgccgccgacgaacagcgaacgcgagccgacgctgccgaagcccatggccaaatcggtgtcgccctggacgacgtcgatcttatccatggggatgccgagtgtatcggagatcatctgggtgtaggtggtctgcaggccctgccccattgccatggtgccggaatgcagcacgacgcgcccttgcgaggtcgcgtgcaggctgaccttctcggtgtgcgcgcggccgccggtccactcgatataggaagtcaggccgcgaccgtagagcaggcccttctttttcgccgccttcttgcgcgcggcaaagccgtcccagtcggcgagcttcacggcgcggtcgagcatgtgggcgaaggcgccggaatcgtagacctggccggcggcattggtgtagggcagctgtgccggcttgatgtaattggccttgcggatcgcacgcgggtccatgccgatctttcgcgcggcagcgtcgaacaggcgctccacgatgaacaccgcctcggggcggccggcgccgcgataggcaccgaccggcgcggtatgggtcatcaccgacttgacctcgaaatgcaccagcggcagatcgtagacgccggtctgcacgaagggcccgagcacgagcgggatgatgttggccgctccggaagaataggcgccggtgcatccgatcgacttgacgcgataggccagcaccttgcctttttcatccagcgcgaaggacgcggtcgaggtgagatcgcggccgtgggtgccgccgacgaactcgtcggtgcggtcgccgcgccagcggatcttcttgttcagcttggtcgcggcataggcgacgatgccgtcctcgggataaaggttggtcttctggccgaagccgccgccgatgtctccgacgagcacgcgtacgctgtccttcgggcgtttgagcacggcttccgccagcacgtcccgggtcgaggccggcgtctgggactgcacgtgcaggaggaggcgtccggtcttcttgtcgatctctgcgatcgtcgagcgcggctccatcgcggagggaacgaggcgctggctgacgatgtcgagctcgaccgtgtgcgccgccttggcgaaggcctcgtcgaccttggcggcatcgccatagctcatggcgccgacgatgttgtcgggcgcctccggccacaccacgggcgcgccgggcttgaccgcttcgacgggatcgaccaccgcgggctgcacgtcgtactcgaccacgatcgcctcggccgcgctctgcgcctccacgcgcgacgacgccaccacggcggccacagcctcgccagcatagcgcacgacctcatgggcgagcagccggcgcggcggcaccgtcatcggcttgccgtccgggcgcttgaagatgttcagcgtcgggatggtaccgatgtcgtccttgaccaggtcggccccggtgtagattgcggtgacgccgggcatcgatgccgcggcgctggtgtcgatcgagacgatcttcgcgtgggcgtgcggcgagcgcagcacgtgcaaccacagcgcgccgtcctccggcttgtcgtcgatgaattgccccttcccggtgagcagccgctgatcttccaaacgcttgacgggctgccccgccccgaaacgcaaattgccgggaagaatgttcattccgttctgtcctcgaaatccggaaaacgaccgcggcggttttagccgattttacgggccagacaaccgagccgcggcacatctgcactgcgtgccacgcccctaggccacgcagatcgccccgtcaggaacgctcgatgtcgatgatgcccacattcacgtcgcgggtgtcggagccccgcttgagggtgaggcggacggtcttcccggccccggcctgctccagcgcatcggtcagatcggcgaggcgccgcaccggcttgccttcgacggcggtaatgacgtctccgaccgctccagtcgaaaagttgacgccgcgaatgcccgcccgctcggcaggacttccgggggccgtccgcaccacgatcaccccctcgacaccaagccgggtcgaaacatcctcgccggcggccacgatgccgatgccgggagtcggcacccggccgttgcggatcagttcggggacaatccggttcacgacgtcaaccgggaccgcgaacccgatgccggcgttcgaaccggagggcgagatgatcgcggtggtcacgccgatcagccggccggcagaatccagcaatggcccgccagaattgcccggattgatcgcagcatcggtctggatgacgttggcgatctcccgaccgccatgggtcggaagcctgcgcttgagcgcactgatgatgccgctggtcatcgactgatccagcccaaagggattgccgatcgcgaaggccgactgcccaaccttcaggtcgttcgaactgccgagtgcaatcggagccggaagctggcggacgctgcggatccgcagcaccgcgagatcgtagttgggcgccctgccgaccaggtcgacctcggccacctctcccgacgcgaagcgcaccgcaatctcgttgctattggccacgacgtggttgttcgtcacgaggtgcccgtcccggtcccagacgaaccccgtgccggaagcgccggcgccgctctgcccttcctcgcccatgagaggattggccgccgaccggaccgcaacctggacgaccgagggcgacacgcgctcgaagatatcgatggtagccttttcgccatcggatagcggcccgcgttgctcgacggcgcgcgcggttggagccgcccatgggacatacgagatcgggacatgcaggatcttcgagctcgtgacggcgagcagcagggcggcgaagactgccgcggcgatcgcatagcgacgattcattagggatcaccgtctcttgtgctgaatacgacgcttgaggcacatgcatggggcgatagaactcgctcacgcagcaacgtcgtagacgaacggaagtttctcactcaggtaagggccattttgcgtccgacaggggtgccggggcaaattgccgcgtgccaaccagctaggccagctcgcgcaacgccgcctccacgatcttgcgtgcgtcggccgtcagcggtacctgcggcgggacgggatcgccgacgtcgtagccctggaccgaaaggccggccttgatgcaggcggccagattgaaacgcgcgaaggcttcgttgatgcgccacagaccgcgctgcaatgccatggcctcgtcccagcggccagccttgcagagctcgtagagcgcaacgctctgacgcgggatgatgcaggcgggccccgccatccagccgcggccgccgatcagcatcactgcggcgggaatatgagccgaggccgaaaacacgcgcaaagaatcgccgcagcggttcatgatcgagagcagccggccggtgttggtcgaggcgtccttgatatagccgatgcgcggatgctcggcgagccgcgcgatgacgtcgagcgtcaggtcggagcgctggaattgcgggttggtgtagatgacgacggggatgtccacggcatccgcaatggcgcggaaataggactcgacctgggcatcgggaagcggaaaatacgcttccaggatcgccaggatgccgtcggcaccgagcgtctggtaggccttggcttgcgcgaccgcgtctgccgtcgaggtggaggcaacgcctgcgatcaccggcacgcggccctgcgcggcctcgatcgtggtctgcacgattgcggtgcgttgcgcggcattgagataggcaaactcgccggtcgaaccaagcggcgtcaggccgtgaacgccggcgccgaccagatcgtcgcagagcctgccgaggacttcggtacgcaccgtgccgtcggcatcgagaggcgaaacgaggtaggggaagacaccgcgaaaatcggacatggcaggcaatattcccacgcatcgaggcgcgcacggcgccattagccgctgctaacacgccgaaaatccgccagcaagcattccgcgttgaccacttcttaaggacgttgcacatcgagccgtcgtgccgcgcctcgcatccaaccccttgttaggaagatgcagtgatggtgccggcatgccgctgacaatgctgtccaggttcctgcatcccgatccgcgcatcaggcgcgagctcgtcgacctcctgtacacgtcgttgccgcaggtgttcgcgatcggcgtgacttcggtgacgggggccgtggcgttggccgtcatgagcggggacaccggctacgccgtgatctcgatcttcatattcatcacggccacagcccgcatcatctcgctgttccgctacaagtcgcgcgccgcgcaattcaccgatgccgacgtgatccgctgggagcggctttacggtgcgggcgcatctgccttcggcctctcgctcggcatgctgtcgtatcgggcgctccagctcgacgacgcgcccggcgcctggatcgcgttcgggctctcgatgtccttctgcgtcggtatggtctcgcgagctgcgatccgtccctggatcatcctcaccaccgcggcggtcctgctgacgccgaccatcttggccggcctgctccgccccgagctcgcctacaagctcggcgcagtcatgctggtgttcttctggctgaccttgcgggaggcctcaaagcatctcagcgccgccttcgtcgaacgactggaggccaagcatcgtttggcccggcaggcgacccacgacttcctcaccggcctgccgaaccgcgccgcgtttctccaggcgttggcggagacacagggcgacttcgccatcatcgccatcgatctcgacggcttcaaaccggtcaacgaccgtcatggtcatcacgccggcgacgatctgctccgccaggtggcggagcgattgtcgtcgtgcgtcggagaaggcggcctcgcggcacggttcggcggagacgagttcatgatgctgaagcccgttgccgcaggggctggcggccgcgacgaagcgctcgcactggcgcgccaagccatccgcgacctatcgatgccgttcctgctgacagatattccagtccgcatcggcgcaagcgccggcatcctggtcagcaccgggacggcggccgcaggcaaaacctctcagcttctggagcaggtcgatcgtgccctttacacggccaagcgcgccggcggcggacgatggaattggtccgaagaggaaaccgcctcaaacgtgcggcaagctgaaacggccgcacttgtcacgtcctgagcaaccggacccgcgtgccccagggatcgaccgcctcaaagccatccgcgagccccgtgacctgcgcaccactctggcgcaaccgctcttcctgcgcggcgagcagttcctgccttgccatcaccagcgagaaccaggcgaggcccgtcgcctgatggtcgcgccggccggcaccctggctctgccagacgttcaggcccagatgatggtgatagcggcccgacgacaggaatgcggcgccggcgcggctgcgggtcggatcgagcccgatcacaccatgatagaatctctgggcctcggcgagatcgccgacgcgcagatgcatgtggccgatgcgcagaccgtccggcgccttggcatagtcgggcacccgcgtgttggtcagcgacagcaaatcggggatgtcgagctcgtccgtcgccatcttcacgctgccctcgctccactgccatagggagggatcgcgatcggcatagatctcgatgccgttgccttcggggtcgtcgagatagacggattcggagacgagatgatcggcaaagcccgtcagcggcacgcggtgcgtggcggccgcgaccagccagcgagcgaggtccttgcgtgtcggcatcaggaaggcagtgtggtagaggccggcggcattgcgaggctcgattgcagcactggggcgggcctccagcaccagcagcgtgatgccagccgttccgagcttcgcggcggtgcccgagcgctccatgacgctgagaccgatcacgtcgcggtagtagtctgtgacctcgtcgagattcttcacccgtagcgtcaccatgccgatccgcatcggcgtgcgactggcataggtcggcccgccgccttgccgatcaccctcggcgcgcgccgcagctgcggctgccatcgcaagcgaggtcgcgccggcaagctgcaacagggtgcggcgggtgaggtcgacggtcatcgtcagggctcgctgaaaaggttgaagcggtgcggcgcaatgtcgggcgattgctacacgttgccgtgagcggctcccaatcacatgttcgtcggccgcgtcctgcgcaggcgctgcctgcgtcctggccacccggccagtttcgcaaacgatcgcggcaccccagattgagaacagctacaggagcctgccatgaccgacccaaccgctctgacttcgctgtcgtccgcgctcgcggatattgtggggcgcaccgcgccgtccgtcgtctccgtgcactcccatcgctcctacgccaccggcttcgcctggaagcccggcctcatcgttacggccgacgagacgctggccgacgagggggaggtggggatcggccttgccgacggcggccgagcgaccgccacgattgccggccgcgaccatacgaccgatatcgcgctgctgcgcgtcgatgccgccaccgcgccggtcaggctgacggcgactgtgccgccgctgggcgccctgtcggttgtggtggccaccaatcgcgacacgccgagcgccgcgctcgggatggtctcggcgtctggcaagagctggcgctccctgcgcggcggcgacatcgatgcgcggatcgagctcgacgtgcgcctgcgcgagagccagcagggcgggctcgcgctcgatgcaacgggtgaagcctacggcatggtcgtgctcgggccgcgtcgggttctggtgatcccgaccgcgacgattgagcgggtcgcaacgcagctcgaaacccggggtcgcatcgcgcggggttatctcggccttgggctccagccggtgcggctcgaggacggcatcggcgccatggtgatgaatgtcgacacggccggaccttcggctgcggccggcatccgccagggtgacgtgatcgtggcggtcaacgaccagaagctctccggcgtgcgcgcgctagccggcacgcttggaccttcaagcgtcggcgccgtggtcgatgtcgccgcgctccgcggcggcgagccggtcggcttcaaggtcacggtcggcgagaggccggaggcgtgagcgaggacacgtcgcctgagatcgtgctgtccctggagatagacgatccagctttggccgaccgcctggccgccctgctcggtaatatcgccggacttcgcctcgccgcgccgggcgagcaggcggccgcggcgatcgtcggccgcgaccctcgcatcatgcctgaggacatcgcgctgacgcagcgcgagctcgacgtgctggcgctgatggcggaaggagcctccaacaagatgatcgcccgccagctcggcatctccgtgcacacggtgaaattccacgtcgcctcgctgctcgacaagctcgatgccaccggccgcaccgatgcggtcacgcacgcggcgcgccgcggcgtgatcgagctgtaagcgaagctcctctctcccgtcattgcaaggagctcttgcgacatagcaatccagagtctttcgggcgaagcattctggatatgcatcgctgcgctcgcatgacgatgtggagagagctctccataggcccaacagtcacctctccccgcgagagcggacagagagatgggggagctcacgcccgcttgccgccgctcttctcggccgcgcggcgcagcgcctctgcaagggcgccgccgccggccggctcctgcttgcggggtggcgaggaggtcatgcgggcgggattgcgtgaattgttgtcgcgctgcatgccgggtgcctccttcttggcaccgacctcgtcgtcgagccgcagcgtgagcgagatgcgcttgcgcgcgacctcgaagtccagcaccttcaccctgacgatgtcgccgggcttcaccacctcgcgcggatccttgatgtagttcttggacatcgccgagatgtgcacgaggccgtcctgatgcacgccgatgtcgacgaaggcgccgaacgcggcgacgttggtcacggtaccctcgaggatcatgcccttcttgagatccttgatctcctcgacgccttccttgaacaccgcggccttgaacgccgggcgcgggtcgcgaccgggcttttcgagctcgcgcaggatgtcggtgacggtcggcagaccaaaagtctcgtcgacgaaatccttcggcttcaaggtgcgcacgatctcgctgttgccgatcagagccttgatgtcgctcttggtcgccgccagtatccggcgcaccaccggataggcctccggatgcaccccggaggcgtcgagcggatcctcgccacccaggatacgcaaaaagcccgcgcactgctcgaacgcctttggcccgagccgcggcacgtccttgagcgccttgcgcgacttgaacggaccgttggcgtcgcggtgcgccacgatgctctgcgcaagacccgcgccgacgcccgacacgcgcgccagcagcggtgccgaggcggtgttgacgtcgacgccgaccgcgttcacgcagtcttcgactacggcgtcgagcgattttgcgagcttggcctggccgagatcgtgctggtactggccgacgccgatcgccttgggctcgatcttgacgagctcggcgagcggatcctggagacgacgcgcgatcgacaccgcgccgcgcagggtgacatcgagtcccggcagctcttccgaggcgaaggccgaggccgaatagaccgacgcaccggcttccgacaccacgatcttgttcatcttcagctcggggagacccttgaccagctcggtcgcgagcttatcggtctcgcgcgaagccgtgccattgccgatcgcgatcagctcgacgcgatgcttcagcgcgagcctgccgagcgtcgccagcgactcgttccactgcctctgcggctcgtgcggatagatcgcagtggtgtcgaccaccttgccggtggcgtccacgaccgcgaccttcacaccggtgcggtagccgggatcgagccccatggtgacacgggtgcccgccggcgccgccagcagcaggtcgcgcagattggaggcgaacacccgcacggcctcggtctcggccgaattccacaaccgcatgcgcaggtcgatgttgagatgcacctggatcttggtacgccaggcccagcgcacggtgtcgatcagccagcggtcgccgggcnnnnnnnnnnggcgcctcggcctcggcctgaatttgcagatcgaggatttcctccttctcgccgcggaacatggcgaggatgcgatgcgagggcagcttggtcagcggctcggagaaatcgaaatagtcggcgaacttctcgccttcggtcttcttgccgtcgcgtaccttggaggccatacgcgcgttggtccacatctcctcgcgaagggcgccgatcaggtcggcgtcctcgtcgaagcgctcgaccagaatggcgcgggcgccgtccagcgcggcggccgcatccgcaacgcccttctcggcattgacgaagccttcggccacgaccttgggatcgttcgcgggttccgccagcagctgattggcgagcggctcgaggccggcctccttggcgatctccgccttggtgcggcgcttcggcttgaacggcagataaatatcttcgaggcgggccttgctgtcggcggccatgatcgtcgcttcgagggcggcatcgagcttgccctgctcgcgaaccgattcgaggatggccttgcggcggtcctcaagctcgcgcaggtacaccaagcgctcctccagggtacgcaattgcgcgtcgtcgagcgcaccggtggcttccttgcggtacctggcgatgaagggaacggtggcaccgccgtcgagcagcgtcactgccgcctcgacctgttcggcgcgaaccccaagctcctgcgcaattttctggttgatgctggccacgcgagattccctctatcaaagcacgctgcgcagggcgaaccaccggccgcgggacgccgcttatggaccaaccggggttgattcatcaaggtgcggcggagggccgtcgacagaggattttttgctggatcgatgcgatctggccacaatcgtgcgatgcgaacgcgagcgcgctaggcgcttgtggccgggtcgcatcggaccgaacggctcttcgtatcgccgggagcgctgcaccgcgccccgggatatgcgcgcggtttgtggtccccactatcgccacgttgtcattgccagcgcttgcgacgaagcaatccaggatccctcctcgaagagactctggatcgctttgcttcgctcgcagtggggaacaggaggcggtctccacgcggcctgcggacaaggtcaaaggccaggcagccctcagttgcggcgatcccacgactaatggatgcgacgcccttgatccttccgccctgcgacccctccgtcccgcgcaaccctgccccccgcgccggctcggttgattcacgcggtcccttgcgaaaaaggtttcgctgcacctgaggagtatggacgtcatgactttgccgatgagctggaatgaatgggcgcagcacgatggcatcgcgctggcggggcgcgtccgcaagggcgagctgacggcgaaggaattggcgcggcaggccgctgccggggtcgccaaggtcgaccccgcgctgtcgggcgtggtcgagctgttcgaggacgtgatcgcggacccggccaaggatggcgccaacctcgccggccccttcgccggcctgcccttcctgatgaaggatctggggccgaccatgaagggacggctgcaggaaatgggctcgctgctgatgcgcggcaaccgtgcgagcgcagacacgttcctgaccggcaaattccgccaagccgggctcaatctcatcggacggacgacgacgccggaattcggcgtgtgcagctccgcggacaatcccgccgtttacgtcacacgcaatccctggaacaccgactacaccacgtgcggctcgtccgccggcagcgcggcgatggtcgccgccggtgtggtgccgatcgcgcatgccaccgatgggggcggctcgattcgtattcccgccggcgtcaacggcaatatcggactgaaggtctcgcgcggcgtgttctcgctcgcgccgcacatgtcggatctcaccggcctcgtctcgatccagggctgccagtcgcgctcggtgcgcgacacggcggccttcctcgaccatgcccgcgggccggcccccggcgagttcatgcccttctggaacacggcgcagccctattccgagatgatcaagcgcgacccggccaagcttcgcatcgcgctctcgcacacctggggcgattacaccgcgacgcccgagatcgccgccgagttggagaaggcgggccgcttcctcgaaggcctcggccatcacgtcgactacgccctgcccgagatcgacttccgcgccgcgttcgcggcgcagaccacctgctacatttcgaacttcgcagtcgtgatctccaacatgctcgctgcgcgcgggttggaaaaaccgccggaagatctgatcgaacccatgaatattcgcatctgggaagctggccggcacaccagcttcgcggagcgggcgaagatgcaggccgtgttcaacacgacctcgcgcggcttcggcaccttcttcgagcagtgggacgtgattctgacgccgatcaccgcgctgccgacgccgaaggtcggtaccagggaatacctcaccatctccgacaatcccgacgtgctcgactggttcggcaatctctggcgcaatttcgcctttacgccgctcgccaatctctgcggcataccggcgatctcgatgccgatggcatctcagaaccacggcctgccgctcggcatccaggccattgccaagcaggccaatgacggcctcttgctgcaactcgccgcccagatcgaacgcgcgctcgacggcaagtggaacggcggcaagaagccgaaggtgcatgtagcctgagaacctgcgattgcgctgacaggcaatcgcactccagccttagttcttcaccgctggaatttcctcgttcggctgctgctgaccttgcttgtacatcgccagcgccttgtcgagcgcttcacgcagcgccagcgccgcggccacgctacagcgcaagtgcgctgtctgaaccacgtccaccctgacggcggcgccgacaggcatcaggaggttggcggcgagctcgatctggatcgcgccgttgtgatggccaaagcaggaggcgccgtcgaaatagatgatcggcgcgcgctcggcgctggacgtcgaaatagtgacgggcccctgggcggtcgagggcgtttcggggtcggccatgggcgctccttgctggtcgaacgaagccccaccatcgtcgcttccgccggccctgtcgaggccaaaccactcggggcccgccagtaacgcccattcggggttttgcagggcgccacactggtctagaacatcgccatgtccacttcaccgaccaccctcccattcgaggaactcgccgaggcgatcaagggccgccgctccgattatggccatatcagcgggcttcagctcgaccgcttcgcgcccgccgaagcctggtccagcctgccctaccgtcccgttttcgtcggcgataccgagaccggcgttattcatggcggtgtcgtcactgcgatgctggacgagagctgcggcatggcggtgcagctcgcgctggacggcacacgcgccatcgccacgctcgacctgcggatcgattaccagaagccggcgacgccgggcctcgacatcaaggcgcactcggtctgctatcgcaccacgcgctcgatcgccttcgtgcgctcaaccgcctatcaggaatccgaggacgatccggtcgcaaccgcgaccgcctgcttcatgatcggcgccaaccgcaccaacatgcttgccgaccgccgcatggatgcacgcaacattccgacgctggaggcgccggagaatccggatggcccgttcgcgaacagcccgttcgcgcgcgcgcttggcatccgcgtcaacgacgacggcacgctgaccatgccgttctcgccgcagattgtcggcaacccgatcctgccggcgatccacggcggcatgaccggcgccttcctggagaccaccgccatcatcggcgtcgcgcgcgagctcggcgctgcggcgccgccgaagccgatcggcctcaccatcaactatctgcgctccggccgcgccctcgacacgttcgccaatgtctcgattgtgaaacagggccggcgcatcgtcgcattcgaggcgcgggcctggcaggacgatgcggagaagcccatcgccaccgctttcggtcatttcatgctgcgcccgacgccggggagtgacgaggaatgattagcgggttttaacttgacggatggagttccggccacaacgataacgctccctgcaggaggtattggattgcggcatccgctcgacatcgtcgccatgttcgccgcgctctggctgctggcctcgatggtgctcgacgcgctgacgccgaaggagctgacggcgatcacgattgccgtcgcgatcggtcccgccatcatcatcactgcagtgttctaccatctgcgctctccgcgcgcggattttgcggtgatgtttgcggcactctggctgatctccgacatcgccatcgctttcgcctcgccgaaggcgctgccgcatttcctgatcgcgctcggcttcttgccggcgctactgattggggccgtgctgcattggcggaccttcacctctccccggcgtggagaggtcggattgcgcagcaatcccggtgaggggccgcagccctctgcgagaccgtgacccctcacccggatcgcatctttcgatgcgacccgatctctcccttcgggaggggtgaaccgaacccgcctcagtcgaaatcagcgcgacagcaagttcgttttcgcaagatcgagcacctcgtcgccgcgaccgttcatcaccgcacgcagaacccagaggctgaaccccttgacctgctcggccgtgatggtcggcggcatcgacagctcctgcttggcggtgacgacgtcgagcagcgccggcccgtcatgcgccagcatctgcttgaccgcgccgggtaggtcgccggggtcctcgacgcgcttcgcgaagatccccatcgcacgggccatcgcggcgaaatcgggattctccaggtcgacattggtatcgacgaagccggccgccttcatctccagcgcgacgaagccgagcacgccattattgaagacgaccaccttcaccggcagcttcatctgcgtcagtgtgatcagatcgcccatcagcatggtgaagccgccgtcgcccgacagcgagatcacctgacggccaggctgggtggcctgcgcgccgatcgcctgcggcatagcattggccatcgagccgtgcacgaaggacccgatcagccggcggcgaccgttcatgtcgagatagcgcgcggcccacaccgtcggcgtgccgacatcggcggtgaacacggcatcgtccgatgcatgatcgctgatcaccttggcgaggtattgcggatgaatcggcttacttcccggcgtgcccttggcgagcgagtcgaggccctcgcgtgctctcttgtagtgcgcgatggcgtcgtccagatgcttgcgttgcgtctttgtctcgagcagcggcagcagcgcctcgatggtgagcttgacatcgccgacgaggccgagatcgatcttgcagcggcggccgaggttttccgggcggatgtcgatctgcgcgacctggcagtcagtcggaaaaaactgcttgtagggaaaatcggtgccgagcatcaccagcgcgtcgcaggcatgcatcgcggcatagcccgaggagaagccgatgaagccggtcatgccgacgtcgtaagggttatcgtactcgacatgctccttgccgccgagcgcatgcacgatcgggctcttcagggcctcggcgagctgcatcagcggcgcatgcgcaccggcgcagccgcggccgcaaaacagggtgatgcgcccggcgccgttgaggagatccgcgagggccttcagctcatccgcctgcggcaccacctttggggcagccagcgtcaggccgcgcgtcgtcgacagcgcgcgtttcgggggactgcggaacgcgacgtcgccgggcatggcgacgacggcgacgccgcgcaggccgaccgcggcgcgaatggcattctccagcacataaggcagctggctcggatccgacaccagctcgcaatagtggctgcattcgcggaaaaggttctgcggatgcgtctcctggaaatagccgccgcctatctcggccgaggggatctgcgcggcaatcgccagcaccggaacgcggctgcgatgcgcgtcgaacaggccgttgatcagatgcagattgccagggccgcaagagccggcgcaaaccgcaagactacccgtcatttcggcttcgccggccgcggcgaacgccgcgacctcctcgtgccggacatggacccactcgatggtgccgcgtcggcgcagcgcttcggtcagcgcattcaggctgtctccaacgatgccgtagatgcgcttgacgccggcctgttcgagcgttgccacgaacagatcggccacgttgttgatcgccatatcggtctcctgcttcagccggtcacatgcgcgcgatggacgaacgtcgccacggatgtaccatgaacacaatcgattgacgcgatcaccgctcgttcaatgcgccttcatttctttcacagttgcccgatcgtaagccgtaatcgtcgctttcgcgcgcgcggcgacatcggccgccgtcatgccgggcttgtagaggctggagccgagcccgaaggcggttacaccgcccttgacgtactccgcaaaattctggtcggagacgccgccgaccgcggcaatcatcacgcccggcggcagcacggcggcgatcgcggcgatgccgggggcgccgagcacgctggccggaaagaacttcagactcgatgcccccgagcgcgcggcgagcagcgcctcggtcggcgagaagaccccgggcatcgtcaccatgccgtgccgatgcgcctgcgccaataccccggtatccacattcggggagaccatcagcctgccgccaacgtcatggagacgatcgacgtcggcgacggtcagcaccgtgccggcgccgatcaacacgccggccggcgcccgcttcaccgcgatggcgatggaccggaacggatcgggcgagttcaggggaatctcgatcgcggtcatgccggcatcgatcagcacctcgacgatggcctcggtctcctcgggcttgacgccgcgcaagatcgcgaccagcggtcgcttcatcggcggaaaggcaacgctcatctcgagtttccttctacttcgtccagatcgcggcggccgccatcgagaggccgtggcggacggcctcgtccgcatcgaccggctgcactgcaaccgacagtgtatcgaaggccagccggtacagcatcgcaagccggccggaggcgatcagcttgacgcccgcttgcggcacagatccggagagccctgcggccacctcgataccgatcaacgtgcccgacatcgtctcgcgcgccgcggccggcgcgccaccgaacagaagctgtcgcgaccgtgcgccgaacaggagattggccgcgaaggccggcgcctcgtacgctgctttcacggccgccttgaagctcgcgacatcctcggcgtcgtctgcgccggcgacggcgagcgacaggatcgtctcgcgcgagatcgcgctgaagagctcgccggtcatgaacgtggcaaaccgttcgacaatgccgttcttcacgcaaacccatttcgaatgcgtgccgggcatgcagaccagcgcctcgcctgcggcatcgacgccgagcgcgccgagcaattgcgtctcctcgccgcgcatgacgtccggcgcgccggcgtcgcgctgcgcgattcccggcaggatccggacgtctcgcacctcgctcggcacgcgcacggcctgtttcagaacggcagagagcggcgccggcgtatcgacatagccggcctcgacccatccggtgcgcgccccggccatgccgcagacgagcaccggcaaatgatccggcgcctcgacagccgcaagatgcgatcgcagcaccgccgggaagccggccttcgccgcggccagcatgccttcgccgctgcggcgctcggccaggacgtcgccagtgcggtcgaccagccagagccggaagctgctggtgccccaatccaccgcgacataagcgggttcgatcatatcaggcctcgtcatcgtctcatggccaagacgccgtctcgcgacaatgagacgatgcctctgaggcttccgccgagataccggctattgcgcgtgcaaaccagccccttctaatgaattcgcggcttcgttgggctggcacagcgcttgctcgagcttcgccactcaactccgtcaacgcgcgacaagacgcgtcaacatcagatgaggaaacccatggagatcggctatttcacgatgccttcgcatccgccggagtgcgggctgaaggaggggcatgactgggacctgcaggtcctgcgctggctcgacgagctcggctaccaagaggcctggatcggtgagcaccacaccgcgccttgggaaccaaatcccaccccggatctcttgatcgcgcaagccctgctgcagaccaaacgtctgcgcatcggtcccggtggtttcctgctgccctatcaccatccggccgagctcgccaaccgcgtcgcgatgctggaccatctttccgagggccggctcaatttcggcgtcgcggcctcgggcctgccaagcgactgggcgatgttcaacgtcgacggcatgagcggacagaaccgcgacatgacgcgcgaggcgctggagatcatcctgaagctgtggacagagccggcgcccttcacccacaagggcaagttctggacggtgaccaagccggacacgatgttcgacttcctcaagccccacatcaagccgctgcaggcgccgcatccgccgatcggcgtcgccggtctctccaagaactcggacacgctgaagctcgcaggcgaacgcggcttcattccgatgagcctcaacctcaacccggcctatgtctccagccattgggattcggtcgagatcggtgccgcaaagacagggcggaagccgaaccggcaggactggcgactggtgcgtgaggtgttcgtggccgacaccgacgaagaggcctggaagctctcgaccggcgacatgatgggccggatgatgagcgagtacttcctgccgctccttggtcatttcggcttcaaggactatctcaaacacgcgcccgacgtgcccgatagcgatgtgacggtcgaatattgcgccaagcggaactggatcgtcggctcaccctcgacggtcgccgaaaagattgagaagatctacgacgaggtcggcggcttcggcgtgctctgtgtgttcggcttcgactacaagcacaagccggaagcctggcaccactcgctcgcgctgctcaagaacgaggtcatgccgcgcctgaagcatctcggctccgcgaagaaggcggcttgaccaaacgcgggtgcggcgcgaacgtgccgcacccacctttgctttcggagctttcccgcgtgaccgtcgatgccaaggatttcaagcaggcgatgcgccaatgcgccggcgcggttgccctggtgacagtcggtgccgagcacggcaggcgcaccggactgaccgtaacgtcagcttgctcgctctccgataatcctccatcgctcatcgtctgcgtcaaccgtaacgccagcgcccacgcgcgcatccgcgaggaaggcgccttcgcgatcaacttcctgcacgaggatcacgcgctgctcgcgctcaccttcagcggccagaagggcgtcaacggcgacgatcgctttgcgttcgggcaatggaggcgcggtgtgacgggcgcaccggtgctggcggacgcggtcgccgcgttcgactgtgtgctggcgcaggagttcgagaccaggacgcattcgatcttcgtcggggaggtccgcggcgcgacgcattcagccacggcgacgccactcgtatacctgcgcagcagcttccacataccggaggaaatccgtgaaacggtttcagtcggcgacctcgattcgcggcatctgagctggacggatttttcctgacgagcccgccgcccgatgccggatccggcaatctagaacagcttatagcccggagtgagatggctgccgcgatcatgctgcgccttggcttcacgcaacagcggccattgcgcgccgaaatgatctgcccaatcccgggacgacatcggaaatgcgctcaccgggtacagcacgccgcccgcgccgcgaatgcgatcatacaattcgcgatttcgcgcgatcagccgctccgcattcgccttgtccgccgatgcggggatacggatgagattgaacgggaacacgatccgctcgccgggcaaccggaccagcggcgtgcggcattcatccgtgaccatgggatagtaggtaatccgcccgaacggaccgatatcctcactgttgatcccggcaatgacctcgctcgcgatctccatcgcgttgctgccgggcaagaaggtgaggagccagggatgcggattgaaccactggccgttcgacctcaggagcgtttcgagcttcgcaaatgcattggcgtcgtcgcggaaggtgaggtcggtgatgacggcgctctcgcggcgatccgataagccggcaagcagcgcctcgtcatcgacaggagactgaccgtcatggaatacgcctgcctccagcaggtatcgccagccaccggctccgtcgggcacgacggctccttgcaactgatcgaagcgcgccgcgtccagaacgcgccgctgatcggccgtcagcgacgggagatccggatatgagagctgaaagcggcggacccgttccggcgcacgcaccaggcggagcgtcgccctcgcgatgatcgcgcattgggcgagccccgcccgaacggcatcgtagagcccggcgctggaggttggcgagcaggtcaattgccggccctcgcccgtcaccacatcgagttcgagaacctggtccgtctgcaggccgtgtcgcgacgacgatccgccgattccgccgacggcgagagtgccacccacggacaggccgagatagttggtcaggaccggcggaacgagccccttggccagggtcgcttccagcactgcgtgccaggtcgcacctgcatcgaccacgacacggtccggctctacccgatggatcgtggccagcgcgccgaggtcgatcacgatgccgccctcggtcatggaccgaccatagatgccgtggccctgtccgcgcgcggcaaccgtcagcccttgctgcccggcccatcgcagaatctccgcgattccggcagacgtcgtcggcctgaacaccgcacgtggccgcttgtgaatgatgtgaccgaaatcctcgctcgcggccgcgcaagcttccgggctgcagttcaattcggcgccggccggcgatccgctggacggaccgtgcgattgtccggcaagagcggtggaagccagcatcgcggtggcgctgacacttgcattcaagagcgtgcgtcgattgggggtcatggtgcggtccttcacgccgagccgggcgggtatgtgcccgtggccctcaagctgcggtcgcccgagccggcgaacaaccggcgcgtcgcgggatagacattgccgcaaaccggtagaatgcggacgaaacgcctcgccggcgcggcatggccaatgcgtgggaacaccggaaatctcagagccgctcgcgcttcagccgctccgccagcagatcgagaaacaggcgcgtcttggctggcggtgccgagctcggcggaaccacggcatacaccggcatgcgcggcgcctcgaaatccgccagcacgatctccagcgccccctgatcgacgcgatcgcgtatctgccagaacggcgcatagccgattccgacgccgtggcaggcggccgcctgcgcggcattggtattgtcggtccggaagcggccgtacacctgcagcagcttcgccttgccgccgatctgaaaccgccacacctccgtgtcacccgggccggtcttgcgcaggatgcattgatgatccgcaagatcgtcgggatgacgcggacgaccgtggcgcgcgaaataggccggtgcgccgtacacgaccgtacgcagttcaccgaggcgccgcgccttcagcgacgaatccggcaactccctgatccgcacggccagatcgaaaccgtcgccgacgacgtcgacgggccgatcggtgacattgagatcggtctcgatccgcggaaagcgcgccatgaaatcagcgatcgccggcacgacgtgggtcgacccgaacagcacgggcgcggcgaggcggagcaggcccgacggctcgacgcggcgattggccgcttccaggcgcgcctcgctgatttcggcaaaggcgggcttgacacgacgatagaacgccagccccgcttccgtcgccagcgactgccgcgtggttcgccgcaccagttcgacaccgatgccgcgttccagcgccgccagtgcccggttgaccgattgcagcgaccgccccaaccgccgcgcagccgcggtctggctgccggcctcgacgacagccagaaagacttcgatctcctccatcgaatcctctcctctcataattcctggagatgcacgttcacgacggcgtgccagccgcgcgaagacccaagctgcgccagaattccgacttctttcggcagaggcgggacgtcgagccggtctagtatgaacccgggtcgatcttcagttgcttgatcttccgatacagcgtggcgcggctgagtttcaaggcacgcgccgcttcggtgacgcggccgccgtgcctgcgtagcgcctcgacgatcgtggcgcgttcggccgctccaagatccggctccgccgcccgtccgccgaacggtggcagatcgagatccgcgtcggtgatgacgccgttttccgccgtgcagccggcgagccggagcacgtggcggagctggcgcatgttgccggggaacggataggctgcaagctgcgaccatgcctcgtccgaaagcctgcagttgggcgcttcctcgcgcgcaatctggcggatgatatcgtccctgtccgtacgctcgcgcaacgccggcagccgcacctccatgccgcgcaggcgaaaatagagatcggcgcggaaggcgccctgctcggccatgcggccgagatcgcgatggctggcgctgatcaggcggatgtcgacggcgacaggtttgagcgcgccgagcggccagacctcgcggttttccagcacgcgcaagaggcgcgtctgcagcgcgatcggcatgtcgccgatctcgtcgaggaacagcgtgccgccgtcggcctgcacgatcaggcccttcgagccgtcgcggcgcgcgccggtgaaggcgccggcctcgtagccgaacagctcggcgtcgatcaggctttccggcatcgccgcgcaattcagcgcgacataattgttgagcgcccgcttgctcgccgcgtgaatggcgcgcgcgaacaaatccttgccgacgccggtctcgccctgcagcagcaccggtagatcatgatcactgacgctgccgagccgcttcacgctcttgatcaacccgggatcgcgaccggcgagccgatgcagcgcattgaagcgatcgacaggcacgtcacggcgcggcgcaagcgggcgcgcggaggatctcgcgcgcagcggcggcgcgacatggccccggcccaatgccgcgccatcggcgcgacgcagctcgacgatctcctcggagccacgcgcggcgtgctggtcgaatctgacgtagcgcgacagatcgatgccggatgcgatcatgccgtcggtgaggcccagcagggcgcgcgccgaacggcaggcgccgacgatgcggcggtcgtcgttgtaggcgagcaggccgctgccgccgtcgcccggtacggtcgcgatccaggcgtcgcggaaatgaccgcggaagatcgctccctccatccgccgcgtcgcttccaacgtgaccgccagcgcgagctgatgcgcggtacgctcgagatccgcgcggcaggaggtgatgttgacggcaccggcaagccgcccggcgtggtcgaacagcggcgccacggcgcaggagaacatgtgccattgcgcgcgaaaatgctcgtcgcgatgcaccaggatcggcttctgatcggccagcgcggtgccgagcccattggtgccctcgaacgtctcggcgaaattggagccggtgtagatcttccagtccagaaacatcctcgcatcggcttcgcccggcaggcggctgaacagcatgatcgcatttgtgtcagcgagattgacgcaatagccggcgtcgcgcagcacgcgggcaaggtcgtcgagttcgggcgttacaagcctgatcgtctcttccatcggcgcgacgacgtgccggatctcggcctcggtcagcgtctgcggcgggccctgtcgggcgggatcgagcttgtggctgatcaggcagcgccgccacgaattggcaatccgcgaagaggcgtcgacgtcggccacgtggttggccaccgacatgacacgggcgacatggttcgaggccgaaaggctggccatcgcagacgtctccaccctgtattattgtgcaaagtctggcaccacaggcggggatgtcaatcgggaaccgggacgcaggctattgctgcactgccctcaccacgtatcgatgcatggtcgtttcttcgccgtccgcgccggcggtttcggcacggagcgcaggcccgccatgatccagcgccgcgtctcggcgggatcgatgacgttgtcaatctcgaacaccgaggcgatcgagacggccttgccgttggcgtagagctcggcaaccttgttgcggtaataggtctcgcgctcctcgggatccgcgatcgcctccatctccttccggaagccgaggcggacgtagccttcgagacccatgcccccgaactcgccggtcggccaggccgcggtgaagaatgaggcatggaagccgccgccgatcatcgactgcgcgccgagcccataacccttgcgcagcacgatgccgaacaagggcacggtgaggctcgcgccggtgacgaacatccgcgagacgtggcgcacgatcgcggtcttctcggcttccggcccgaccatgaagccaggcgtgtcgcagagcgagacgatcggcagatcgaaggcgtcgcagagctggaggaagcgcgcggccttgtcgccggcatcggcatcgatcgcgccgccgagatggcgcggattgttggcgatcaggccgaacggtttgccttcgatgcggatcagtgcggtgatcatgccgacgccgtaatcgcgacgcagctccagcacggaatccttgtcggcgatgaggttgatcacgctgcggatgtcgtagacgcgcaggcggttctcggggatggcacggcgcaagaggcgctggtccgcggtttcccattccgtcaccgcgccctggaagtacgacagatatttttgcgcgacgcgcgtcgcctcttcctcgtcctcgacgaggatgtcgatgacgccgttcggcgcctggaacgtcacagggccgacctcggcaggatgatagacgccgagcccgccgccctcgatcatggccgggccacccatgccgatcgaggcattcttggtggcaatgatgacgtcgcagcagccgagcatcgcggcgttgccggcgaagcaatagccggagacgacgccgacgaccggcacgagcccggagagccgagcgaactgcacgaaggacggtccgtcgagcccggtcatgccgagccggtcggtgtcgcccggccggccgccgccgccttcggcatagaacaccagcggcacgcgccagtcttccgccagcgtcagcatgcggtcgatcttcttgtggttcatgtgaccctgcgtgcccgcgagcacggtgtagtcataggccacgacgatgcagcgcgcgccctcggggccgaattgctcggcgttcaccgtggcgacgcccatgacgaggccgtctgccggcgtgttcttgatgaggtcgtcgagcttgcgccgccgccgctgcgccgcgatcgcaaggctgccgtactccatgaacgagccgtcgtcgacgagctgcgcgacattctcgcgcgcggtgcgctggttggtgttgcggcggcgctcgagcgcggcggggcggttctcgtccagcgtattggcctggcgcgcgatcagttcagcgagatctgggcgaatgtgatcgagatcgatctcggcttccgccgccgtgctgtcggccgcgacgtcgagcggctcgagatagaggatcggctcgccatgcatcagcgtaacgccatcgccggcgacgagcttcatgacccggccaccctgctcggtcatgaccagatgctccatcttcatcgactcgatcacggcgagctgctggccggggcgcacgatctcgccttccttcacctggatggtgacgatggtgccctgcaagggcgccgcgaccatcaccgcaccttcgggcaccgtttgcgcaacgagagcttcagcgccttggacaccgccacgctcggccgcggcaaagtagagcggcttggccgcgccatcggccgcctcgaccagcttgccgatattgcgatcgatgaagtcggtcgcgatgcggttgatcctgaaatcggaatgcgcgagcaccgcctggaggaaggcgatattggtgacgacgccgtcgatgcggaattcgcgcaaggcacgcgaagccttggcgaccacgtcatgccaggattcgcccggcgtatgcacgatgaccttggcgagcagcgaatcgaacgcagcactggtcttgtagccggcatagccaaagctgtcgacgcggacgccggggcccgatggcggctcaaacaccgcgagcacgccgccagtcggatgggttgcgcccgtctcgtcgagcgtttccatgttgacgcggagctgcatggcatagccgcgcggcttcgggatcgattcctgcgcaagacccagagcggctagcgggctgcccccggccaccgcgagctgggcgcgcaccaggtcgacaccaagcacctcttccgtgacggtgtgctcgacctggagccgcgggttggcctcgatgaaggcaaagctgtcctcggcgccgccatcgacgaggaactcgaacgtgccgagattgtcgtaggatgcagccgccgccagttgcttcgccgcctcgatgatgcggccgcgcaacgcatcgcttagcgaggggctcggtgccacctcgatcagcttctggtggcggcgctggatggtgcattcgcgttcccagagatgggagatcgcaccgtggcggtcgccgatgatctgcacctcgatgtggcgcgcctgccggatcagccgctcggcatagacgccgtcgaatccaaacgccgccctggcctcggactggcagcgcgcataggcttccgaaagatcggacgcgttctcgacgacacgcatgccgcggccgccgccgcccgccattgctttgatgacgatggctgcgttgctgccgagtgatgcgaaaaaggccgtgatctcctcaagactcgatggcccggtggtgccggcgatgatcggcacgccgcagcgttttgccagctgacgcgccgcgaccttgtcaccgaacagctcgagcgctgtcgcctgaggaccgacgaaggtgatatttgcgtcggagcaggctttggcgaaggtcgcgttctcgctgagaaagccatagccgggatgcacggcgtcacagcccatcgccttggccgccttcaccacggcgtcaatgtcgagataggcccgcgcgccgcggccaggaatttcgatcgcttcgtccgcaacgcgcacatgcagcgacagcgcatcatccgcaggatgaatcgcgaccgtcgcgatgccggcgtcggcggccgcgcgggcaatgcggatggcgatctcgccgcggttggcgatcaggagcttcttgaacggcatgatctctctcactcagacagcagcaggcagaattggattgaggtcctgcttcttcactttgcccgttgcggtcaggggcagggcttcgatgatgcgtatctcggggaccttgtagacggccatgcgctcggcgcaccaggcacgcagatcctccgcagagacgctgccgaccgcctccggcttgagctggatgaaggccaccggcacctgccccctctcggggtcctcgcgcccgaccacgcccgaacccagcacctttggatgttgccccagcaacgcctcgatctccggcggaaacacgctcatgcctttgaccttcagcatctccttgcggcggccgaggaagtgcaggaagccatccttgtcgatggcgccgatgtcgccggtgcgaagccagccgtcgatcagggactccgcggtcgcctccggcttgttccagtagctcttgagcagtgacggcgtgcgcacgcggatctcgccttcggcacccagcggcaagagtgcgccggtttcgaaatcggtgatcttgaactcggcaccggggaccggcagcccgacgaagatcggctggttgttgagatcgaaatcgtcgtcctgaaagccagccgtgaaggtgttggaggtgtgggtctccgtcatgccccaggccgcttccatcaggatcgtgccggtgagatccttccagcgcttgcgatagtcggcgttgagcttcttgacgaaggagaccacgcgcacctgctgcagcgacgacaggtcgaactcgttccagcgcggatgatccatcagctcgaccgcaccgtccaccggcatcgccgtgattgtgaccttgtatttgtcgatcgcggccatcgcgccgacggcatcccagcgcgcgagcaggaccagcgtcgcgcccgagaacagcgggaagatcaggccaaagttctcgcccgcgatccagaactcaggaaagaacgacaggaagacgctgctctcgtcggacagcaccgagatgccgtaattggcggcggccgtgtagaccatgtcgcgatgggtgtggacgcagcccttgggcatgccggtcgtgccgccggtgtaattgagcgcggcgacgtcatcgaggccggcaggcggcagcggcacaggaatcggcatcgcagcaagcgccggcaacagatcggtcgcgccggtgactgcggcgcgcggcacacggatcgagtctggcgccggaattgccggctttgccggtacgacatcggcaaaactcgtgacgatgatctcgcgcagccgcacctcgtccctgacctgctcgacaaccggcatgagctggtccagcgcgacgatcacctcggcctgggtgtcgttcaactcgtaggacagctcgaacgcgcgcgacaacgggctgacgggaacatggaccgcgccgagcttcaggatgccgaagaacacaatgtggaattgcgggcagttcggcagaaagacggcgacgcggtcgcctttgcttatgcccttggcctgcaacagcgcggcaaaccggtcgctctgccggtcgaggtccgcgtatgtcgtgacgtggccatagaagatcaccgcgggcctctccggacttcgcttcgcccaggcgcgcagatattccgtcaggggaacttcgccgtgcagatagttcggcgagcgcggcgtccctttcggccaagccttgttccatagctcgtgcaaggtggcgaggtaatcctgttcgttgaggcttacgctcacgacgtcctcccgtgcggttcttctcgtcgcgagggcacgcactcacaatcacgcgacgtcgttacacgtcgagcacggcagacctcatgtcaaggaaaacagtttccgcatcacggccgatgccgcgccgcggaaattgctggtcgccccggttctttgttacaccgcgacgagacgaatgatccgccgcacggctgacgggaccggcgcgatgaccggcacggtaaagatcgcctcaagctcgcgtgccgcttcacccagcgggccgccgccgacgatcaccgcttccgctccgtcctgcgcaatgcaggcctcgaccgcgcccgcaagcgcagtgcgcaaaagcgatggatcacgcatcaactcatgcggatcgcctacggtgaagcgtgtaccggtgtagtgcgatcgcaatcccagcacatccggcagtgcgtcgatcttcgctttcagcagcggcgtcgtggtcgccacgccgaagcgtcggccgttctccgcggcttccagcatcgaggactcaccaatgccgacggcaggcaatctcatggtcagcttgatccttgcgagaccgggatcgccaaatgccgcgacgatgatgccgtcgcaatcgccagagcgggcacgcgcgatctcctcgacctcaggcgccgctgcctccagcgcatccgccgagacgatcattgtgggcgcacgcgctgccgtgacgccggcaatgtcgaagccatccgcggctgcagacttggcaatcgccaccatcatcgtagtggtcgcctcgaggctgttcggattgatcaggaggatgcggcggcccgccatgctatccgcccgcccgcgcccgcgcgccaatctcctggaagatcgcggtcagctcgtcgacctcgtcctcgcctttcttcggccggatccgctgctccatctcctcgatgtgatgatgcatggcatggatcgcaccagccttgttgcgggcaaggatcaatgcgccgatgtcggggtgggcgtcgggcgagcaatccggctcgcctggctgctcgaaggtcgcgatcgccagcgacgtccgcagcatcagctcgcgcgatatttccagcaacacgcggttgccggcaagcttggccaccaggatgtggaactcggccgtcagcgacagcgaggcccagcggtcattgcgatcgtgacgcgcctcgcgctccatatgcgccttcagctccgccttgccggccttgtccagccggtcgaccgcggcgctcacagctgcggtctcgatgatccgacgcgcggcaaagatgtcctgcgcctcctcccaactcggccggtacacgaaggcgccccggttggggatctgcataaccgccttgcgcgaggcgagatgggacaaggcctggcggatgtgaatccgcgtggtaccgaaagctgcggcaagcttgtcctcgccgagcttggcgcctggcttgagccgcttctggctaatcgcggtcaggatgccctggaccaccggatcgtcgtcaatgttgcgcggatcgacgacctccggctccctgtgcttcggctcggagcgtttcggcttgcgcttgaagggacgggttcgcttcatgcatcgcttttacaggattctggaatgctgccggagcccattttttagacaaacccatggcatttatgtctacaatatgtacaataaattggcgccaatatatggcgcctaaaattgtcgtaatgctcgcaggaccttagcggacgagccgcgctggcacgacgattgctatctctcgcgcaggacaacgcgaaggatggagctggcgttgagcgatgtacgcggactttcgctggatctgaagggcatcggtcacgcgttcggcgcgacggttgcgctcgacgagatcgatctctccgttgcagccggtgagttgatcgccctcctcggcccgtccggctgcggcaagaccacgatgctccagatcatcgcgggcttcctgcgtccctcccgcggcgaggtgcgcttcgacggcgcgcgggtcgagcatgttccggccaatcgccgccgcatcggcatggtgtttcagaactatgcgctgtttccgcacctgactgtgttcgaaaacgtcgcctacggcctgcgggcgcgcaaaaccgcgaagaatgttgtggccgcgaaagtcgaacagatgctcggcctcgcccagatggcgccgtttgcgcgaaggctgcccggagaactctccggcgggcagcagcagcgcgtcgcgctggcgcgggcgctcgcgatcgatcctggcctcgtcctgctcgacgagccgttctcggcgctcgacaagaacctgcggctcgacatgcagatcgagatcaaaagcctgctgaagacctttggcgtcacctccatcatcgtcacgcatgatcaagaggaggcactgtcgatggccgaccgcatcgtcgtgctgaacaagggacgcatcgagcagatcgacagcccggacgcgctttacgaccggccggccagcctgttcatctcgaactttatcggccacaccaacctcctgcgcggcaccgtcaccgacgcggaccgcgtgcagctggacgccgggcctgagctcgatctcggccgttcggcccagcgcaggcgcggcacgccggtgacgatctctgtccggcctgaaaacatcttgttcggcgcagaacggcccggcgccatccccgtcacgatccgcgccaccctgccgctcggtgccgtcagcgtgacggagggcgtcaccgcgagcggcgaagccgtgaaggtcagccaggcccgcgctgccggcagcgcgaagacgcaggccggggagacggcttggctcacgatctccgacgtctcgcgcgtcagcatcttcagcacgccggtcgacgagctttccctgcatcacccaaggagtatttgacatgagcctatcccggagatcgctgctcacctcaggttcggccgcgcttgccgcggctggtctcgggtggcggacgtcatcacgcgccgctccctcgatcgtggcaacgacctatcccggcagcttcgacgaagccttccgctcggtggtcgggccggccttcaagaagtccagcgacggcagcgtcacctttacgcccctgctcggtgtcgaccagatcggcaagatccaggcctcgcgcaacacgccacccttcgacgtcgtgctgttcgacgagggaccgctgatcccggcgatcgcgagcggcgtgctggagaagtttccggtcgatcactcgaagtcatatgccgacatcccaagcgtattccggcatcccgacggctacgcccctgtcatcaccgtgcaattgatcggcatcgcctacaatccgaagaagatcaccaagccgccgacctcatgggaggatctctggaagccggaacacaaggggcgcgtcggcatcaccgggctcggctccagcctcggcaccgccttcatggtcgagatcgccaagctaaacggcggctccgagaccaatatcgaaccggcgttcgaggccatcaagaagctgctgccgaacgtcggtgcgatcgcggcctcgcccggcgcgctggctgcgctgttccagcagggcgagatcgatatcgccttcaacttctggaacaacgtggcgctgctcgccgccaagggcgtcgacatcgccttcgccaagccgaaatccggcgccgtcgtgatccgcaccagcgcacagatcgtcaggaacaaccaggatccgaaggcggtgctggattatctcgacaccgtgatgtcggccgaaacgcagaaaggcctggaggcggcgccatggatgatgatgccgaccaacagcaaggtgaagctgaccggcgccaatctcaccgtcgccaagagcctcgacgacctcgtttccaacaatgtgctgcttgactggaccaagttccagccgctgcgcggcgagtggatcacccgcttcaacaaagaagtgaggatctaagtgccgcggtcaagcacggttgcatcacgacaaatgctgccggcggtcccgctggcggcgttgttcctcgccgccttcgtgctgccactgattgcccttgtcgcgatcagcctgttccgcacgtcacagttcgaagaactgtcgctggcgcaatacgtgcgcttcttctcggacccgttcagcatcaaggtgctgacggacaccatctggctgggggcggaggtcgcactggtgacgctgatcatcgcctatccgatcgcacttgtttacgtcgcgagcggtcagctcatgcgcaccttgatcacgtttctgatcatgctgccgctcctgaccagcacggtggtgcgcaccttcgcctggatcgtgctccttggccgcgacggcatcatcaacacggcgatgctgtcgctcgggctgtggcaggccccggctcgcctgctttacacctgggagggcatggtactggcgctaatccagatccagcttcctctgatggcactgcctgtcatcaacagcctgctgcggctcgacggcaatctgacgcgcgcggcagaagggctgggtgcaagccgcgcccgcatcttcgtcaccgtcatcctgccgctgacgctgccgggcgccattgccggctggctgctcgtcttcgcagccgctgcgaccgccttcatcacccagacactggtcggcggcggccgcatcatcctgatggcatcccatatttaccaacaggccgtcggcgtgcaggactggccgttctcggcagcgctttcgctgatcttcacgctggccgtgaccggcatcgtctttgccaccggcgccctgtcgcgccgctacgtgcgaggcgtcgatgcagcgtagcctcattgatcgcgtctactcgggcatcattggtgccatcaccggcttcgggttgctgctgctgttggcaccgacgctggtcgtgctgatcatttccttcaccggcggcgtcacgctgaaattcccgccgccgagctggtcactgcgctggtatgtcgatctgctgcaatcccaggaaatcgtggagcccgcgttaacgagtctcaaggtcgcaacggcggcgacgattctctccgcagtgctgggcggcgcggcggcactcggactggcacggagccggttgaagatcgcgcgcgtccttgacgctctgttcatgtcgccgatggtgctgccggcgatggcgttcggcctgtcgctgctgctggtctttaacctgctcggcatccgcctgtcggcggcaacgctggtgctcggccacacgatcatctgcgtgcccttcgtgatccggatggtcggcgcctcggtgcagcaactcgatccggtgctgatcacttgctcgctcagtctgggtgccggccgctggtacaccttccggcgcgtcacgctgccgctgatccgccgcggcatcgttgcgagctgcttcgtcgcgttcctcacctccttcgacaatgttcccgtatcgctgttcctcgccgacgcgcgcaccgaggtcctgccgatcaagctctgggcaatcctggaaggcagcctcgacgtgcgtgtcgcagccgtctccggcgtgatcgtgctgctgactttggccggcctcgtctgcgctgaaatcttcggcggcttcagtcgccagatcgggagccgctgatcatgccgatcgaacgcgatcttcgcggatatggaaggacccggcccgatatcgtttggcccaacggcgcccgcgtcgcggtgtcattggtggtgaatttcgaggagggcgccgagctcgcgatcgagcaaggcgatgcggagacggaacactatggcgaggtcgcctcgacagcgccgccgggcgtacgggatttcgtgcaggagcaggtgttcgactatggcatgcgcgcgggcctgtggcgattcctggacgcctttaacgaggccaaaatccgttccaccttcatgatgtgcggccgcgccgtcgagcgcgtgccggaccttgcgcgtgccgtggtcgaagccggccacgaaccggcggtgcatggttggcgctggctgccgcatgcactctatggccgtcccgagacggaacgtcgtgacatcgaaaggacgcgcgacgccatcgccggcgcgacgggtctcacccccgtcggcttcatgtcacgcgggagccagagcgcgtggacgcgcgatatcctgatcgggctcggcttcgcctacgattccaacgcactcgatgacgatctgccctattggagcccgtcgtcccagggagcgatgctggtcctgccctatggcttcgatacaaacgacatgaagttcttccatccgaacggctttgtgcagccggaggacttttcgaactacgtcagcgccgcactcacgacgctggtcgaggaggcagagcgcggccgctccgcgatgctgtcggtcggatttcatctgcgcatttgcggccggcccgcgcgtttccgagcggtgaagaccattctggccgagctggcgcggctggagggccgggtctgggtcgcaacacgcgccgacattgcggcgcattttcgtaaagtcacgcgctagggccgcccgcacgacacgggagatgtttgccccgcaattccgcgggagagctgcctgcacgcacctggcgagatacgaactcttccaatctagaacatctcgacaacgcccctccgagcgttgacttgaagaggtctctggcagaacgatcggcgcggatcatccgcgccagccatggtgcgagagcagccaaaggccagaggctcatgcatcattcgacacataccagacccgtcgatcttccggcgctgagcgcagcggagcggctcttcatttggggcttcagggcgaaggcccgcagcggaggcgccgttccgaccgccgctgatatcaaggaggtgtatgatcacttccgcgtaggcgacgccgtgccctcgctggactccatcatcgagatcttcgcctgtacggcccacacggccatcgaagtgcactgcccgacctgcccgcgcatgtcggacagcgagcgcggaattctgcgcgccatcgccgcagcacagcaggatcgcgtcgacatcgcccgcgaacaattcgagcgctggctgccgccggtcggcgccgattgggcgctcgcgccggtcgaggggcttgcaacgatcttccgtagggccggtctcatccttcccgaccggcatgtgcggtctgtcggccatgaccggatcatggcgatgaagagctggctggtcggaacccccacgctgcactgacgaggacgtttcatcatgcaggatgcacgcgattgcgtggcggtcgcggacgccggccagtcgcagctttgtccgctccgggccgcgcttgcggcgccgccatgcgtcgaaagctacgacgagttctgccgcgtcgcactgtcgctgttccgcttcatcggagcggcctatgcgaccggcgcctcggattgctgggaagctgcttatcgctttgccgacgaggcgcccggcattgccgacagtccgctgctggttgcgcgggcggcccttgtcaggatcctccgcggcggccggccatgcgagctgtgcttcatgccgccgtcctgccggcgcctctccaaggacgaggcggagctgatgcgcctgctggccgtcgcacgccgcaagcaaccgggcgagctcgaatccatgatttgccaattcgtcggctcggacaaggaggatgcggcgacacgggcggtcaacgcgcttgcgttgtgctgacgcccaactttcttgtgccgccgagcacgagagtgaacatgtgcgcggcgatccggcgcgactgcgctcgatgcccgccaaaagagctgatcggccggtcacgcctcggatggagacgaaacgtggacctcacacggctgcagcgcaggcttccatgatttcatcgagctccgccttggagagcaccccaagctccgcgatgaagacgatccgcgtccgcggcacgccgggtgccgatgcaacgcccggtgcgagcgtggcgcggccggcggcgaactgaagcaccatcggacgtccgggctgctcgatgctctcgatcaggcctttggcgcgcgcgagcttcggtgccagccggttgatggcctgctgcaaacggggcagcgacaccggcttgtccgaagtccagctcagcgtttcgaagcgctcctcggtcggccggcgcggacccggatcacgtgccggcgcgcgatcgaggttcgcggggaataacagtgccgcgggtatctcgccgcggttagcatccaccaccagggcaggcaggcgtagtgcgcgaagagcgtcgcgaattcgcacgcctgccccctcgtccgccagatccagcttgctgagcgccacgatatcggcgacgcgcaactgcgaccgctggagcgcgtcctcgaaggccgcgggcggcgccgtggcatccagcacgcagaccaccgtctccagcggcgcctcgcgcagaatcaccgggtccatcagattgcgcacgatgtcggcgggatcggcgacgccgctggtttcgatgacgatgtactcgggcttgggatcgcgccgcagcagcgccgagagcgtgcggagcagatcgccctccagcgagcagcagatgcagccattggcgaggctgacgacgccgtcgctggcgcccgcgagcagttccgcatcgatgttgatcgcgccgaaatcattgaccacggcggcgatccgccgcccctcggcatgcgccagcagatggttcacgaccgtggtcttgcccgcccccagaaagcccgtcaccaggagaatggggaccggcatgggtcagctcccgatgacgggacggcgcaccggttttccaggccgcgcgttcacatccagcacgccgtcgctgatcagcggctggccgctgacgaccagatgccgcacgccctccgagggacggttcatcgcggtgaaggtcgcgcggtccgagagcttctcgtagtcgaacacgacgatgtcggcatccgcgtttttcgcgagccggcccttggcgcgcatcgccggcgtgctctgcgacaggatttccgccgggatcagcgcgcatttgcgcacgccttccagcagcgacagggtcttgcgctcgcgcacccattcgcggatgaacttcgtgaagcagccggccgagcgcggatgcgaggtggcgtcgtcgggcagcggccaggcatcgccggtgtaggtggtgccatcggagagcgtccagggcatcgcgtcggaggcaatcgctccgccgggatacagcaccgacatgtcgagcaggtcgcggtgatgcgcattgttctcggtgtcgaggatgtgccagagcaccagcgaggacggctcctcggcctgcgccttgagcagctcctcgcgatcgtggaagcgatagccatcggtgacgcgctgcacggaatcatagccggtgccgttgcgctcgacgaactcgggatcgctgaagaaggcggccgccagcacggtcgagccggtgccgtaggggtaggcctcgacggtgatcggcagcccctgcgcctgtgctttcgcgatcagcacgcggcagcgttcgacgtcggtcttgctcgacgaattgaaatggcagatgtgcatgtgggcgccggtagcgccggcatagccgatcaggcggatataggcttccaccgcgctttcgggatcgatgcgcgacatgaaggccacgtgcgtgaaggtcggcacgttctgcgcggctgcgagctggcacaccgcggtcagctcctgcacgccggctcccggcgcgtaagcgttcagaatgccgatgccgatgccgccttcgttcaggccgcgtgcgagacgctccaggatgcctgagacctccgcatccgttgcaacattgtcgatccagcggcgatcccgcatggcattgccgaacgcctccagcgaactctccgcgtttgagccggtcatcgcgccgatgcgggcaaaggcccaattggtggcagcgccgtagttcagcacgcgccccttcctggcctggctctcataccaggacccgacgggcagcacgccggcttcgaggtcgagggtggtcgtaatgccgtcgaacgcctgcatgcggtcggccggaatcgactggccatgcgcgtgcaggtcgatgaagcccggcgcgaccacgagcccggtcgcatcgatcacccgctcggcgccgccgaggccagtgccgacggcggcgatcctgccgtccaccaccgctacatcgccgatggcatccatcccgctcgcgggatccaccacccggccgccagagatcaccaacccgctcatgtcgtcactccaccacgaaggccgtcgcatctgccggcctcatcccggcccccatcaagacagattttcactgcaacgaccacctccggcgacgccaaggcggcatgcagagcgatgcatgcccttcggatatgagcaatggatacacagcgccacggccgggctcgtccccgccatccgctgagtgcgaagaacgtggatgcccggggcgagcccggccatgacggccgcatcaaagcccgtcgaaccatgccttccacttcggcacagccgtcgcaaaagtgccgcgatgggtggtcggaccggtggagacggcttcgaccgcgggattgccgttgccgatcgcctgctgataggtcatggcgagccggccgaggccgacactgatggcctcgtcggtctcgccgtaataattgcgcactgggctcttgatgatccagcgataggcctgtgtctgcgcgacgagccggccgtaggccgaagctgcgaagaactgcggatcgaaatagtcgggacggagcagcttgtgcaggtccgtcggcacggcggcggcgtcgtagggttcacgcaaataagccttgcgtgccacgtcgtaataggcatccgcgatcagcgagcgggccagcccgggcacgccataatagttttcgaacgagaacgccgacaggatgaacagcgagttgacccagctcgcatcgttcttgcggggaaaattgagaaagccgttcagcgccacgaatacgtcgaccggcgcgctggcggtcgccgcggcgtcaaccttgatgccggcttgctcgagcttctccagcatcgccatggtgacgaatccgccctgcgaccagccggcgagaaacagcttggtcgtggcgagtttgagatgatccaacacggcgcggctggccacgagcatgtcgtaggtcgcctgctggtggcttcccttcaccatgtagccttccgtctctgccgacgtgcccatcccgaaatagtcggctccgatcacgacatatccctgccccgcgaactgcgcgatcatcagctgggtttcgggtgactggtcgggaaatgaaggcacctgctgcttgccgtagaccgtgccgtgctcgtaggacaacagcggaaacgacgtggcctgtccttccgggatcgcaatcagtccggatgcgaccgtcggcttgttgccgcgctcgggcaccaccgacgaataggtcacgcgatagagccggacgggattgcgcgccggactgtaggttacggtgataccggcgaaggcgggcgtatcggcttgcaaaatcctgttcagccgatcgacatcccagcgcgcaatgaactgatactgtatcgcagcagacaatctgacgggctcaccatcctgtgccgccgccggccaaatggtgatgacgtgaagcagaacgagaaggaagaagcgcgggagcaatgccatgcagggacccattgagagaggatgggccggtcctagacaatttgcgttgagattgtgtttcgcaacgccttgtgccgttgggaatccgccggtttcgccgtacgcaggctatcggcttcgccaagaggcttcgccggatatgggcgccgtccgccctcgcgatccgagcgcgctctcgccttgcacgcaacaaaccgccgtcaatgccgccgcgtccaccgcgaccaagccagcgctcgtgacgacgtacgaccgcccccttggccgaatacgctggatccgaattaggtagaatggaataatgttcggggggagagttgagagcggattcgtgtttcgcccgacaccgcccggtggacgatccgtgcgtcgccgatgaaggtgcgacgcgctgaaccgtgtcgggaacagccagttgacagccctttgaaaataaaactagggtgactgcgacggttctccttcgggagatcaatagggaatacggtgcgggatttccccaacgccgtggctgcccccgcaactgtaagcggcgagccttcgccaaacgccactgagctcgcgagcttgggaaggcggcgcaaggcagcgacccgcgagccaggagacctgccgtcagtcgtggtcacacgcgagcacattgggcggggtgtcctggtgagtgttgagctgccttgctcttgaggcagcggccaagctgcgttcgcggtgacgtgccacgttatcgcgagtccattgatgacctcccgcacaatatttgcgccacgacatcggcgggcgttgctctgtttagcggctttctcctgcctcatggtttcgaccgatggctgggcacaatccgcaggcccggcccagacgctcgatccggtcgtggtggcaccatcggcgaagccaccgaatgtcaggagtacccgacgcagcgaggctgcgcgtctcgcgcgctcacgacaacagcgaaacctggctgccgccgaaacgcgtgctccgacagccagcccggcgggatcggcattcgccgcaccgacgctcaatctcaccggcgcgagcacggccggcagccggctgggcctgacgcgattgcagacgccggccagcgtggaggtgatttcggccgagacgctttccgaacgcggccagcagaacgttctcgacgcggtgacgcagaacgccaccggcttcactgcgagcccggcaccgggcaatggcggcgtctccttcaacacccgcggcttcacgggccttggctccgtcatgacgctctatgacggcacacagctctatatcggcgcgggaacggtgacctttccgttcgacacatggtcgaccgagcgcatcgaggtgctacgcggccctgcgtcggtgatgtacggcgcaggtgcggtcggcggcgccatcaacattgtttcgaaactgcccttgtgggtccctcgcaacgaggcggaggtctcgctggacagcaacatgacgcggcggattgccgtggacagcggcggtcccgtgagcaagaacgtcgcctatcggatcaccgccatcggcaacatgtcggacggctgggtcgatcgcgacaacacatcaaacgttgcacttcatgccgcggtccaggtccggcagaacgaagacgtcacctggacgctgtccacggactacggtgatcgccatccatcgcggtacttcggcacgccgttgatcaacggcaagctcgaagaagcgcttcgcttcaagaactacaacgtcagcgacagccacatccgctaccaggatagctggaaccaggtgaagaccgactggcaagccgccgacggcatctcgatccagaacactctctactacttgaactccaagcggcactggaaggacgtcgaaagctacgcctacaaccctgccaccggcctgatcgaccgagccagctatatcgagatctttcacgatcagcagcaggtcggcaatcgcatggatacgaaattccgcgggcatgtgcttggcatggccaacgaattcctggcgggcttcgacgtcaacagcatcaatttcacgcacaccaacaactctccttatggcggcgcttcgtccgtcaacccctacgtctttagcccaggctcgttcagcagtccgaacgccacgattcccggttacggcagcgtgacgaaccaatatgcgctgtttgccgaaaacaggctgtcggtgaccgagcagttctccttgattgccggcgtccgccaggatcaaccgaccatcacgcgcaccgactatgtcgtgcccgcaaacagcttcgagaagtcgttctcctcgacgacatggcgcgccggtgcggtctacactccggtgaaggacctcgctttctatgggcagtatgccacggccgtcgatccggtcggagggatcatctcgctgtcctcggccaacaagaatttcgatctggccaccggcagacagatcgagatcggcgtcaagcaatcgttctggggaggccgcggcgaatggaccctggccggctacgagatcgtcaagaacaacctgctggcgcgcgatccgaacattccttccctgaccgttcaggtcggtcggcaatcatcgcgcggcgtcgaagcatcggtcggtttcctgctcgactacggctggcgaatcgatgccaacaccgctttcctgcgcgcgaagtatgacgacttcgtgcagtcggttggcggcgtagccgtgaactatgccggcaacgtgccggtcaacataccgcagaacgtatccaatatctgggcgacgtgggcctttgcacccaactggtcggccaacgcgggcgtgcagatcgtcggaaagacctatgcggacaatgccaacacggtgacgcgcccggcctacaacatcgtcaatgccggtgtgcagtggaagcccgatctccacaccaccgtgtcgttccgcatctacaatctcttcgacgaggtgtacacgacctcgggcggcacgacccagtggctgctcagcatgccccgaacggcgcaactgggtgtcaacgtgaagttttgagcgtggcacggcccctgaaacgcacgctccggcggtggctgtatatcgtccaccggtggatcggcatcaccacctgcctgtttttcgccatgtggttcatttccggcgtggtgatgatgtatgtcgcctttcccggcctttccgacaaggaaaggctggcagcgcttcccgacattcaatgggagaagctggcgctgtcgccggacgacgtgatgaagacggcaggcgccacccgctatccgcgcgatctccgcctttccatgctggccgacgagccggtgtatcggatcaccggctgggatggcaggcggcagacgatctccgcagccgacggccgcgtcatcgcgggcgtttccgaacagcaggcgctcgcggtcgcgcaacatcatcccgcgagcagatcaccgcaactcgaagccatcatcgatcgcgatcaatggagcgtaacggcccggtacgatccgctgcgaccgctttacctcatcgggctcggcgataatgccggcaccaggctctatgtctcctcgcgctccggcgagatcgcgctcgacaccaatcaaaccgaacgcgtctggaactggctcggctcgatcccgcactggatctacccgaccgtgctgcgcaaggacgggccgttgtggcggctcgtcgtgctttggatctccggtatctgcctgatcgtcggcgccagcggcatctggatcggcatccttcgcgtgcggctgaagcggcgctatgcgagcggcaggatcacgccgtatcgtggctggatggcgtggcaccacgtcaccggcctgatcgcgggcatcttcgtgctgacgtggacgttctccggttggctttcgctcaatcccggcgaatacttcgcaagccgcagcacgacgcgcgaggtgctgcagcgctacgccggccatgaggcgcctacgattgcgacgaagctgccagcgccgcaatccggcgcggtcgaagcgcgctttatctggcttgatggcagcccgatgattgtcgtcgcatcgcgtgatggcacgcagaggccgctggatgtgacgtcgggccggactacggcaatcccgcaacatcgcctttggactgccgcagagaagctgctgccgcaagcccgcgtggcggaacggatggtcctcgaagaatacgactcctactggtatgcgcatcatcacgaccgcgagttgccggtgctgcgcgctgtgttcgatgatgacgcgaagacatggtttcacatcagccctgtcaccggcgacatccttggccacgtagacggcagccgacgcacctatcgatggctgttcaacgcgctgcacagtttcgatttctgcctgctgctgatgcatcgcccggcctgggacatcgtggtgtggctgctgtcgatccttggcgtcatcgtctcggtgagcggcgtcgtcgtcggctggcgctatctgcgccgttgaagcaaacccacttcgaacgagtatgagagcgacgcgggccgattaaccgttcgccgcagttcaggaggcgaacgccggcgccgtgatcatgcaaaccgaccgcaaagcaactccgccgtcttctcgcccccattgtcattcagggagctaggcggggcggcgttatggtgggcaaagttcccgagggttccgtttgatcgtccgacattttctgcaacgcgactccaatcatcctgtttcgcgccgcgcgttcctcggcggatttctgtcggccggaagtgccctcgcgctcggcggatgtgccggcttgggggcgaccggtgcgcgcttcgacgcctcatcgctctccgttgagcccacattgctcgtcacgaccacgcgcaagcccgtcaacggcggtcgcacgaaaacctggttcggtccggagcgcgcgaccagcatgactgtcgcgcaggtgaagctgtcggcgccggacgagagccgcctttctctcgcctcggtcggacttggcacctggcgtctcgatcgggtcgaaccggtgccggcggacgtgggcgatctcgccgcgcaggcgggcggaggggacgtgctgatctatgtgcacggcttcaagcagacattcgagactgcggtgctggatgccgcccagctctccgacgggatcaggttccgcggtcggaccatggcgttttcctggccttcaagggcaggattgttcgactacgcttatgaccgcgacagcgcgatgtggtcccgcgatgctttcgaacgcgtgctctcgtcgctcgtgtcgtcgccaggcggcggccgcgtgcacatcgttgctcacagcatgggaaccatgctgacgctggagagcctgcgtcagctttatgggcgatacggcgatacggtcacgagcaagatcggcgccgttgtgtttgccgcgccggacatcgacatggacgtgttctcgtctgcggttcagcgcattgggccgctggccggcaagatcaccgtgatcgcctcgacgaacgatcgcgccctggcattgtcggggcagctcgcaggcggaatgacgcgggtcggcgcggccgagaaagccgtgatcgcgcggctcggcgtgcgcgtggtcgatgcctcccaggaaggctggggcatcatcaaccacgatctgttcctgtctaactcggaggtacagaaggtgatccgccgctcgatcgacggcacgatggcgtgagagagcgcccggcgcggcgtccgtctaggcgatcaagcgttgcaccaaggcggactcactcgagtaggtcaggagcgcctcgtgagttgcccgtgtcactccagcatacgtcagccggacacattcctcgatcgtcttgccgtggcggccgagcaagcccaagccggcgatggcgacgcagggaaactccagccctttcggattgtgcatgctcaagaatcgcaccgccacccgcctaatcgaaaccctgttgcgattgtccttggccatatcgatcggcacgtcatgcctggcgaggatctgcgcg

SEQ ID NO: 265 - DNA, 14189 bp, Bradyrhizobium colbertium
aagaccctcaacctcaacgtcaaggccaagctgatccgcgtcgaaaatccttcggacaagggaccgcacttccgcatctactcgggtaacgtcgagttgggtgcggcctggcagaagaccgccaaggacaccgagcgtgactacctctcggtcaagctggacgacccgagcttccccgctccgatctacgccaccctgaccgaggtcgagggtgcggaaggcctccaactgatctggtcccggccgaaccgggactgagcctcccaagagggctccgccgcgaggcggggccttcttccctttgaacggagagaagatcatgacggtcgacgttatcgaggaactgcgcgccgagctgcgcgactgcctgttcagccccgcggagcgcaaggcgctcgaagcgcaactcgccgagctgatccggcaacgcacccagccaaccacgttcggcgacgcatcgcccgccgatcagcggttttgcaccgccggggcatagccccggcgtcgctttgttcgctcgagccagtcaaacgcctcgtcggctctcgcgctgtcgtcgaaggtttgcatcatcgtctgaccgctcgtgccgatccggccccagttgcggaccaccgccacgccgccgaacagggttggctgcaaggacagaaggtagaaccgccgcatattgcgggctgcgtcgacacgacgaagatggacagggtccggcggaagctgaggcatgcagcgattcttccgtcatctggaatctgtgtccaattggattgttgaatcgaacaagggcgatcgattcattttcctgataggtcgattgcaggtgcacgcgcgatccctcgatgggggctgttgtagcggcgccgacgacgagcatcagccatttggcgtgtcggtccggccagattcagctcccattctggcccgttctctggcattttcggtccgatcagaggatcgccatgccgagccggattccactcgacccgaaactgcccaaggcctttgacgcgacgccgaacgaagcgcggagcaaggcacagctcgatcagtggtgggatcgtccctacggcctcacccgtccggatggtcgcatcgaggttcggtgcctgaacggcggagcatgggaccgctcgacccatcttggcattgcggatgactatgatgctgcctgcgcgttggccgaagccaagcaggccgaatggctgcggttccgcgagcacccccgtacctgtcttgacgaaggccgggtcacggtgatccggcagccgcagcggcccgacgaggagatgctggaactcgcttcgttcgcgacggcggaggcggcgaccgagtacctgcgcgccaatttcccggaaccatcttcctcgcgataaccgctccgagggcatggggcgagccccttcggggacggctctactcgcgccgccaacgcggcgctcccggagcccgcgcgcggtctccgcgcatgcgcgtgacgatcctctcgcgggcctcggacacatcttgcgatcctcattcaagtcccggagccttgtttccggtagaacctcgccatctggttctgacgcgccgacatgcaggcgtgcgtcggtgaaaacagcggccgcatcgcagcggcggcttgccggccgtgaagatgatctgttcgtcggttcgcatgcgcagcttcgtgcggcatgatcagcgggcggcgggcgagttgcttctatcgtgtccgcgacgaacctgacatttgcgaggactgggtgagccgatcgacctccaaggtcgcgtcgccgcgggcatcgatataggccgctgtctcgggatcgttgatcgccgagaacgagatccaggacgccgctttcgaaccatttgctcgtcgcaccgcggccgccataagcttcgcgcatctggccgatcgactggtagagcatcagcaggttgatgacgtatttgcgcccgagggcgccgcgcgtttctaaccgccgtccaggtttggtgggcgtcggctccgactcgtcttcccacactatacggagattgcgaggtggcgctgcctcagaacgtgttggtttgaaccaacacggctaggggcacacgcatttggctttcgttgtcttgcttcaactccggtgtgcgcctgcccaatcgatgcgaactcatttcgagtgagcgcctcgttcctatgtggctcggcccacctgactcttctggcaggggattttgtgcctggctttcaggatcctgccgcgtgctggttcgcagtgggcgttggttcaaaccaacacccaggatgaagaggccggtttgatcaggaccgccccggcaggcgaagcacggtctggaggaacatggatgaaacgggcgcagatggttgcaccaaggtcgacccggtgaacacgatcgtcatcaacaaccagaagggcggcgtcggcaagacgacgcttgccgtgcatctggcctggtttatggcggaagcgggccgccgggttctgatgatcgatgttgatgcgcagggcaacgcgaccgacacgctcaagcagcatagagggtcaatttcggcggcggacctcttcaagccggcgacccggtttgtcgctggcgaaaacaacggcatcacactggcgccggccgacagctcattgacggatatcgatcgcggcaatgctgcagctgtcttgaccctgcagcagaatctcgccgatgccgccgcccggttcgatgtttgcgtgatcgacaccccgccatcgcttggccttcgcagtgtcgcttgcctggtcgccgcctcgcacgtgttggcgccgatttacctggaagattattccgtaaagggcgtcaaagccctgatgcagaccgtgatcggtgtgcaacgacgctacggtcgtcaggacacgcgattcctcggcctgctgccgtcgaactttaataccaagtcgccgcgtcaacgaacacacttggagcagttgttgcgcgaagcgggcaagtacgtgttcccaggccagatcgttgcacgggacggctatgccgaagccgttgcggaacgggtgccggtgtggagcttgaagcgtcgctcggcgcaagaagccggtcgggaaatccgtgcggttctcgctaagatcgtagaacggctcgatcaggagacgacgaatgacgcttgatttcagcttcaaggagctcgtcgacgtcgcggcaaaccctagcgcagcagccgggcggccgctcttggtcgcgattgattgcattgacgaggatcccgatcaaccacgccacaccttcagcgaacaggaactggaggagctctcccaatcggttgccgaacatggcgtgctgcaacccgtcgtgcttcgccgttgtagtgaagatggacgctacgtcatcgccatgggcgcgcgccggtaccgcgctgcgcggcgcgcagggctgcgtgaaattcccgccttcgttcaagacgtcgcttcacccgaccgatacgctcagatgatcgagaatatccagcgcgatgatttgcgtgcgcctgagatcgccaggttcatcgcagaccgattgaacgccggagatacccaggcggagatctcgcgcaagctcggcaagccaagagactgggtatcgcgttacgcgtcggttcaagccatgccggacttccttcgggcgcgccttgagggcagctcgatccgtgctctttatgaactctaccaggcctggcgcacgcatcctgacgagatcgaacggcgatgcgcgacgcaggacagctttaccgacgcacaggctcgacaactggcccggggcgttcgcggggagggcggccgcgccaatccccggatcgaatttccggttgggcgacctcgatccgaaaactccgatcccctcccggaagcggtgcttccgcgcaacgctgtgaaagaccgcgaagcggcaacggaggatcagccaaaaactcgcgtcgtttcacaatcgagatcggcagcatcgctggcgatcagggttcggtaccagaaccggctcggacagcttgttgtcgatcggctcgcgacgcaaggctcacgtcacgctgtggtgttggtcgacggcgcggaccacgaacaagaagttccagcatcggcgcttacaatcgaggagatcctgtcgagatgaactcgttcgacactttcgctgccgcggcggcagactatcgatgcgcgctggcggagcgactttcccatccgaaggatggcgcgttagcgcagcagccgaaggccgaacgcgcttcccatagcgccgtagagaggccgcaggctgctggaaagtcgcggtccacagtggcagtgtcagttagtgccttcgtttcctcgcttgccggcggatcggtattcgcgatggctactacgccaggcgagcgccgcgagcagaattcggcgcagagggcaggggccctcgatcgctttgccttggcgagcgctgaatgcggagagtgttggtttgaaccaacatctaagggcaaaaatttttgctttctagtgcaggataggcttcgcgccagcgatgtattacatcgcaattgggattggagcgcatggctctgatctcgcttcgcgtctccgacgaagtcgcggcgcagttctccgcttttgcggctacccagggcggcaaatccgcgctgctgcggcgtctcattgctgatgcactagctgcaccagagccgcgcatcttcgcgttgccggtcggacggccggaaaaggtgacggtgcgatttcgcgagagcgagatgcggcagctcgcggaagtttcacatcagcgtggcatgacccgcaccggctggattgccgcgttggtgcgctcgcggttgggatcgcctgtgcagcattccccggacgagcattccgcgctccgcgcggtcgttcgcgagctcaaccagatcgggggaaacatcaaccagatcgcgcgtgccgcaaacatcagtgtactgcagggcagggcggttgagcccgatctgtccgcaattcaagaggccaaatgggtcattgaaagagagctcgcgcaattgcgtaacgcgttgaatggcaacgcggattattgggatgggcggcgatgagccgacgcgccgcgccgcggccggccgacctgacctccgaacttccgccgatctcgtatgtctgggaaacgcccaatcggcgcccacgacgggccgagtgggatatccccgatccggccggtcctagccgccttacgccggcgatgcgtgcaaagctcgaacgcatcgtgcgccgagcaccagaggtgatggtcaagatcaccggtcgcaccaagggcgtggcgcatctcaagtcgcacctctcgtacatcacgagaaacggcgagctcgatgcggaaacagagcagggcgcgacactggcggatcgttccggattgaaagatctgcagcaacgctgggaggatgatgccggtctcgacgacaagcgccgccgcgatgggtcactctcggtcaacatcattctgtcgatgccggctggcaccgatgccgtcgcagtcaaggattcagcccgggcatttgctaccgagacgttcggctacaatcacgactacgtcttcgtccagcacctcgacgacaagcatccccacgtgcacttgaccgttcggtccctgggtcatgacggcaagcgcctcaacccgcgcaaggcggatctgcaagcctggcgagaacggtttgccggcgaactccggcttcgcgggatcgcggcggaggcaacgccgcggcgtacccgcgggcgggttcgaaaggccgatcgcggcgcggtgctcgctttacgcaagcgaaaaatcacgcccgatgtcgatcggctcgctcgtaaggaggtgatttcggaggttaggggcggcagtactgccaaacatccttgggacgagcagaccaagtcacgtcaggacgcgatccggcggcgatatctcgactatgctgctgagctgcagcgctccggcgtggcagcggatcacgagttagctcgccaagttcggcaattcgtcaacgacatgcctgccgtcgaaacccgccgtcatgcgctgaagaatgagctttcggagcttgccagcagccggcgtcgcggggcagagcaggcgggccacgttgaccggcgcgattacaaacgagacggtgaacgaacaagataattggatccgaggatgatctgggctccatcagctagcgaaacgaagattcccgcgaagtgccgctgcgaagtccgaatatcaccgatgcgcagcgggaggcgaaacgtccaggttgcatccgtcgaagtgaccgccgtcgctgaattcggtacaaggttgtgggctgtggatcagcatcaggtcaatgtgatccatgccaagcgtcttcagcgatccgtcgatgcgaccccaagcctccgcataggacttggattcggcggcgagcttggtggtgagatgaggttggagcgcggaagaccgcttgcccgcatgccttcgccgaaagacgcgcatcaacgaaaagccgtggggtttcgagaattggtggcggcgggacatgctgattgcgctcggcaaagacgtgtgacgcacgtcccgatcgatgtgagctgaaggcttcgaacaatcaggtgcggcagcgagccgctatacgccgagcgctttttccagcgcggctacgagcgcctcacgtttttccttggagagcttgtcgagattgagctggcgccatttgacggccggaagattgggcaccccgggcagccctagcagatcccactccggcatgccctgttcgaagctgaccagaaatttccggtgcgcgtccggcatgtcgcccacgatagccttgatcatcacctcgcgcgtctcttccagttcggcgagggggacgggcacttcggtcatcccgacgaagccgtgttcgtagtcgtccttcatgtcccggcgcggtggatcgaggacttccgccatcggtcggtgatggctgagcatgtacacgacgaaggcctttcgcagatcgtcggtgatgccctcgttggcgagcaaagcgcgcacgtcgaaaaagtcgcgcggatgctgccgatcgagcgccgcgaccagctttccggcatagaggtcggcgtgcgagacgacttggatttcagcgaagccgaattcgtcctcgacggtcgcggtcacggattgcgttttcgcggaatagacgcagccgcgaaggaccggcgtcacctcgatcttgacggtcgcggcgccgagctggacgaacagcttgttgacgcggcgttcggccgagccttccgtgacctggcacccggcgatttgcgccttgatgcggccggcgatgcgcctgagcgcggcttcgatctccttgagcgattggtcgcgcggctgcaccggcagataggtgaggtcgatatcgacggacaggcggggcaggtcgcggacgaagagattgatcgcggtcccgcccttgagcgcaaagcagtcttcctgcgcgaccagcgggacgacgcggattagcagagtgacctgtctgcgatactggtcgctaaacggcatcgagccctttcggcacggtgatttgataggtgcggtcgaacacgccacctttgaccagcatgcgcttgccgcttccgagatcgacgtgatccttgtttatcttgtttttccaggcatgcgaatggcgatcggcaaagaagaagaacagccgcttggccttcacgctttggcacgccttcagcaatgtctgcatgcgcctggggcttagagtcgagaggctctcgaccagcttgtccacggcctcgaagctctcgtgatcgggaagctcgtcgagcacttcgaggagcgcccgctccggcgaagagatcaccagcggccagcgccattgcccccatgactggatgacgaagcccttttcggccgcttccttctcggccgcgacgtttgcgcggttgagatcgccttggggcggcaggctcgcttccggcgagaagaacctggtgctgttgtggaagacgaagtggacggagaggggaagcttcgagagccaaccgggtggcgcggatggtccgtagaggtgcacctgttgcgtgacgcgaggcaggtaatgctcgtagccttgaagcgccagcgccgttcgcccgccgacggccagcggcgtgcggtaaagaagtgtctgaagggatatgacggcctgctcccagctcaaggcgccgcgcggcttccggtacacacggccggccggccgttcgagatagccggccgcgacatacttgctgaccaaactggtggagtagccgtgcttgctcagccaagccgcgtcaacgagcagcccctccgggagatcccggcggaggtggtttagctttcctagtaattgcgtcgccatactacgtaaaatagcgagttttcaaaccaagcgcgagtttaagttttaggcgatttacgtagctatgatacgtgaaattaatattccgtaaaccggcccagcggccccagtaccgtgtgatttcgtagtgctccacgggcctgaaggcctaaccgcagccatgtcagcgcgcgcactgcttgtgcgaattccggccggccgctttggaaatcgcgctaagggagggcaactagctcggcgagtttggtggcgacgtccgccatcgactcttctgcagtgtcgagaccggtccgagaggcaagcatagggctgatgttcctgagagcttcatacgtcgtctggtggacaacgggaacgatgcgcgcaccggcgagcagtaccgaaagctccttgtcggcgatgctctcttttgggaggcgttgcagcaacgcaggggtcaccaatacgatcccaatccgcgagttcgccaggcccttgtcgatggcgcgcatcaatggaacgccaaggccaacgtccttttcgctgaaccatactttgacgcctcgtgcctcaagcagatcgtgcaattgtttggctgcgccctgccggtcgtcccacgcatggcaaagaaacatatctcgaaggtcaagggtcgcttgcttctcaacggcctcgcggactggagtgagctcgcgcacctcggtcggcgtgtacagcacggatgagccgggtcgcgaccatctggcccttacgcgactgccagacccaccgccgctgcttcggccgcccgagctgcttcctgacgaagagtacgacggggacgagtagtaagatgggggcgagtacgagctgtagctgtggccaccgtagcggcgcccccaacttccccggcatgccgggcagttcgccgcagcgctggctgagcgatggccttctactggtgctgtgcatctagccacgctgcgtctcctacttgcctttgacaatctgcgacagcgatgcgccgcccatgcgttcacgcagcatgtcgaggcgcatgtcgctgcggacgctgggcgcgaagtcgggcccgtaggtcttgcgcagagtgcccacgagggtgtcgccacgcttctggcgaatctcgccatcctggtcgcggcagcgatcatccaggccgctattgcagtgcttagtcatcgaaactgatcctttctatccccgacactgagtcgacgattccgtacaactatatctgtacagtttgcgtcccgtcaactggtgtggtacaaaatcgtctgatagcggcgcggtcctaaaccgcgccgttacgattcgacgagaggtctgaatggcgctggcttcaaaaatcaaagaattaagactcaaaaaaaagaagtcacttcaagatgttgctgatgaggtcggcgcgtcgaaggcgcacatttgggacctcgagaccggcaagagcagcaatccgtccatcgagcttctgaccaggctggcgaaatgcttcgacgtcagcgtcgccgacttgatcggcgagaatccgacaggcgagggggccgatccgcaggtcgtggccatgtatcgtgagttgaacgagctgagtcctgccgaccgccaggccattcaggccatgatggatcacctgaagagccgcaagcccaaggggtagccatgaagatctcgcggatggacttggccgacacgggctcaccgatgggcctcgtcaccaagatactgtccgtcgagaagggcctgccgataccggtgccgattgaagagctggccaagcagctcgatatcgagaagatcgcgccgcttgagaccgagggctttgaaggcggccttgtgaccgacgacgcccgttcgactggcttcatcctcgtcaaccgcgcggcgccttctgggcgccgcagattcaccatcgggcatgagctggggcacttcttaattgtgtctcacaagccggtagagcccggcaaattcctttgctcacgggccgacatggcaaaatggtcggccgaccagggcgaccgctatgctcgcatggaggccgaggcgaacgagttctccggccttctcctgatcccgccgccgtcgctgcggaaattcatcccgaagggtgatccgacgcttgcacacatccctctggtcgcgaaacatttcgacgtcagcaaagaggcggccgcccgcgcctacgcccgctatcaccccgaacaactggccatcgtggtgatcaaggacggcatcgtccgacgcgcccacaagggaccgacattcccatggatttcggcagcctacggcaagcccgtgccgcgggcatctagcttctacgcgaaggatgtgcgccagcgcgtcgccagcgaattgtcatcgatcattcccgagctttgggtcgacctcaagcaagggcaacgggcggagctcttcgagcaggtgtatcctcagcaggacggatatgcgctgttgatgctctggctcgaaatcgaggaggccgaagaggcggatgatgaccggacgtcgacgcagcgcttcagagatcagcaggcgcgctggcgctagtcgcatttgcgattttgcgatgttcggcttcatctccaatgacacgccgggaagcgatttccaaaggctggctccgacacggtctgggaccatcgtaaggctacctttcgctttatccgttcagcttgccgtaggcagacaaaatttgcgctgtctcggcaccgtcgatgatgcagtaccgtcgtggccggcgcggatcgtaagcaaggctctccgtgactcgaaccactgtgttctcaattttgttgcagtgctgcaccacgattagatcgaccggctcttcgaacgcacggatgagctgatcgccgcgtttgcccatgttgccgggatggagtgggccaggtacggacggtcctttaaagataaaggctgccgacgtcggcttgtcgtcgatcgtcaagcgcgcggtctgcaggtcggatttctcgccaccccaatccttcgacacgtaaggctccccaatgatgtcggcgaaggcctgtttgaccgctgcttcgggcatgctctcgattgctctgaggtcagcggctgttggctgcggcctctgctcaactcgtgagaattggtcaatttgctgcggatagatgcggatcgatgtggcgatgggcatgggaaggacagcgccttcaatctcttcgccgatgatgtaaggaaagacttcggccttttgaccattgaattcgaagtggccggcaacaagcatgcgcttcttgcccttcaataccccgaccgaggtgtccgagaagaaatgctcgttgctcatttcgccaaacatttcgtattcggttgtcgccagaggtatgtttcctcttagggtcgcgttcttgggcagctttcctttttgcgcccgcctgcttgcctcggctgcgccggaaaacgaaaatacgccccacacgaaacccaggacgcgtttgccttcgacgtccttcatggcaacaacttcggtgagatttggaaacctaccgtgtcgcagcagctcttgagccgtggcggtaacgtctctcattgccagtacccgttcgcccgaattttcgacgagggggttttgcgcttcgactgcgaaattgacgtcagcgagcaagccaaggcgccggctgttgaggtagtacggaaaaagccgagtgtcctcgaagccggccatgtcaacgcactcccgttattggcgctcatgctcgtagagcagggggcctacagtcgaccccgctgaacaagctgcaggtagaactttccgaggtcggtgagaagcacaaagcccgaccgctcagcactccaatacagatccgttccgactttcggccggaccaagcccgcgatctgatactgcttcagcttcttgaagatggcgacgttctcgggctttgccgccccgacgttggtctcttcgaaggtcggatcgagttgatactcgtgctccggccctgaaaaatacctcgccagctcgcgcagcgtccgatggtcgaccttaggttcgcaaagccgcacgggctcaagatgcgccgcgtgagacttgtacagcggacgctgatcccaagctcccagcgcggcctcagcgtaggcatagatcgaggccgcggaaacccggccgcggacgtccgcagcaccgccacgcaacgcgcccaacacgaggttcgtgaaaacgccgtgaccgttgacctccatagaaggttcgtcggaccgggacgccgcaagaaccgttacgccctctcgcagcaggaccttttccatcccgccgttctgaaagggattgatattgccggtcgaaccgctgaagcagcagtcgatgatgagaagaacagtactcgccttggatttgttggcgagattgaccaggtcatccatggccagaccgggatcgccctcgctaccctcctgggtgactaggtaagcgcccgtcgacgtggtcgcgccgtggccggagaaatagaacaggacatcaccgttgaacccggcaaagagatcgtcccatgccgtcctcaacgtcgcccgagttacgcgctgtttgcccgggctcgtcagcagacgggtgtcgaagttcctcgactgatctgcatgaaagctgatgagctcgtccatagcctgcacgtccgcaacgcaggcaccaagcggcgtgacgttgtcgtactcgttgatgccgacgagtaaggcgcgcttgctcacagtttgtcgagaaaggctttgatgttggcccaggaccacccaacaaccgacacgccggaaagctcggcggggagggaggtcgggcgctcatctgacgttgtgtagatgccgcgaacggcaactttttcttctttcgacgtcttgatctcccagagctggccggccgcgttcttggtgttcttgctaaccaacgcaatcgtgccgtcgcagcccttgatgcgcgaccggcactttgttttccattgttcgtcccagggctctttcactgacatgtcgacgaattcgaatgggctcttctcgttcttggcttggcctaccaggtagtcccgggcccatttgtcctcgacggcgaaagcgatgaaaattctgttctttgttgccatatgattcttccttctcgccgcgattgtggagaaagccgggagttacgtcaaattgcaaagggaaatccttgtgggatactggcgacagtcgagggtgggccggcggaacgcccaagccggaggtatctcgcgacgaattatggctcatctgcccggctttagacggcaggttgatacagtcttggaaaccatcgatcgacgagggctgtcggaaacccgagcttcacaggtgagcgcgtggtcggcgagaccaggtagcccttttcaataagtgcattgaggacggtccgagcctgtcgctcttcatagcccgtgagtgccggcgcgtggcctcgcgcgtactcaccagccatgacggcttcacgcagtaaaggccaggagccctttggcagccgttttgcgcgggtttcctcttctgtccaaatctccatacgcctgaggagttcttctggctccagaagcccggccatgaagtcaacctgatcgacgcaggtcgtcaggaagaatttgcagaaatcaatgagcccggccatcgtgagattgccgcgcccatcgagatcgccgcgtcgcggttcgtcagccgcctgtaggttggccttgtaatcggcgacgagtcgcgccagcccgcgcgaaacggcccacagctcagaaccgacatccagctcgcgcaagagcgcatgcgagaacaggcgcgtcactcggccgttaccgtcaagaaacgggtgtatccaggccaaccgatggtgggaagcggcaacgccgatgatcttgcgcagccgcgaaagatgctttga

SEQ ID NO: 266 - DNA, 1170 bp, Bradyrhizobium colbertium
ccgtcatcacccactttcccgcatagctccgcccaaacgctatcgctgtacaaacggctgcttggcgcacgatatgtcctcctggctggtggcgatctgtgccacgaatttacgtacagttcgcggccgaaggcaaggtgaagcgcaaattcataagcaaaccatcttccgtgagttcagcatgcgcaattgtgaatccgtgctcaagcccgtatgggagctcgcattttccattctgatagaggctcacctgttgatttgtgccgaattggtccggaatcgcgccctcgggatctgttacggcgcggttgtcgaagtggcagcgcaggcgcattgcaaaaaagtgcacaagcgtaggcctaccattgattagcgtcaaagtttcatcggtgagccaccctaacgtgggcggaccagttacaaactggtcacaaaacccaatgatggagtcaattgatgaacatgatcggtcaaaagagcctgctggtagccttcgccttggctcttgctctgagctactcggcagcggcttccgcgcaacacgccccggatgcgcacgcgcagcaaaatgcgcccgctcagcagacgatgccggcgcagcaaggccagggtatgggccatgatgcaatggaccacggtaaaatgggcgccaagggaatggagggcgaacacggccggatggggtccggaatgaagcaaggcggtgccagcgatacaaccgccacgaaaggagccaacccgccggcaaactcgaacgcggcgccgcccagcggcttcaagtaaaccgccaccagcatctcgcagggcgatggagagccaatagagcgactcggcggatcgcctagcggagatcatttaaattggccatctgcagcgactctgatttgcaaagtcactgcagccggcacttattcacccatgtgatgaggaatcacattgaggaactgcgccgtggtcctgaccggttcagcacacggaattgaagaaaaccgagtcctgatttcgcctatcgggggatgaatgattgttcacgcaaggacgcacaggatcattgcggcgatcatcaagcgggccgagcggggctcatttattcctttggtcggagtgacggcatttctctcaactctgtcgatgagcatccccgtggaatggctggtaatcgccgccacc

SEQ ID NO: 267 - DNA, 17910 bp, Bradyrhizobium colbertium
  misc_feature (3658)..(3667): n is a, c, g, or t
cgacacttttctgcgccacgggacaaggaggctttcagatcgacatcgaattcgcgatgtggggcgattcgttcgaagaaggttgcatcgtttttccgatgtcgtcggcatcctggagcaagcaattaacgaatgtgaaaaggcgatcactccacccaaaattgatttcgccgatcaacggcgatgttggaagggatcagactcgcttgttgggcaacggtgaagcagtgcgggccgcttctcggtgccaacggcagccatcgacacgtggaagtcgcaacggctggctcggttttctccgcatacatgtcggccattgtccaccgaacagtcggctttcgtgccgcatcagttcattgcaaacgccgcgcggcatcttagccggcggtgaacattgacttgagcgcaacacctctcggtacgaacattggcacgctttggcgatactgccggtatgcattgccgagccgttcaacgagctgttcttcttcccggtgcgccaaacgtacataaacggcgaggatggccggcgagagcagcagcgtcacaatggttggccagtgaatgagctgcccaaggatgaccaggaagatgcccgtgtactgcggatgccgcatcagcccgtaaacgccatcggtgacaaggcgaccagcggcgaagtagatcttcacccatcccttcacaatcaaaagcgcgcccaccagcatcacactgacgccaagcgccatttccaccagtgcgccaacgctcccgtagccgagtagcgttgcccagagatgcccgctaacgtgggccagcggaatgtccaaaccgaaaaaacccgtaagcaggtagattgtcagaggaaagccgtacatttcgccgtagagtgcaataatgaaggcctgcagcagacctgcacccacccattcgcgtcgatcggccggggcaacgaaatggtagagagcccacgacaccaacaagatcatgagcactgcatacggccagtattgcacaaagtcgcgatattgactcataacctcgtcgctcacagttgccggactccgtcttcccggcgcgccgcacatcccggtctgtcatgtgcttcctagctggtcgttcgccaacacctcgcccgcaacataaagaacaaccaagcattcaatcttttgcctgtgcggcatatcgccgttcccgcgcgggaaggttgatttcgaatcaaacagttgaggatggcatcgctgcgagcgcggctgcaaagcaatgacctgcagtgcatggccgccatttcttgtcgacctcctatggtctcttccctgggcgtctgatggttgcactgtgcgaagatagaaggcggtctcgtgccgatgccgtgactggtgccgaagttcctgacccaagatcatcaagaatcggacagtcaggcctgtcatcgccgcggcatttctccgccaggtgctgcaacgcctgcttgatggtctcgagctcgacaatcttgcggtcgagatcgtcgatgtggagcagcgcgaggcgctttacctcgcggctcggtcgattgcgatcgcgatagagagcaagcagctgctcgatctcgctaagggaaaaacccaggcctcgcgcccggttgatgaagcgcaggacctcgacttccttgtcgctgtatgcgcggtacttgttctctccccgagccgccgggccgaccaagccgacgctctcataatagcggatggtctttggcggcaccccggaacgctgggcggcctgcccgatcgtcatcggctccatctcacgatcctccaatttgcggggctggtgcgagcgattgatccgagcgcattgcatgtcgaccggtcgcagccggtcgccagcgtcttagcaacaaggcatctgtgaccacgctaaccgacgagagcgccatcgccgcgccggcaacgaccgggctcaggagcccgaaggcagcaagcggcaggccgatgacattgtagatgaacgcccaaaacaggccttgccggattttgttataggtggcgcggcttaccgcgatggcatcaccgatcagcagcggatcgccgcgcatcagcgtgatgcccgcggtctccatcgcgacatcggcgccggtgcccattgcgatcccgacatcggcggcggcgagcgccggcgcatcgttgacgccgtcgccggccatgccgacgcgcttgccttgcgcttgctggcgctgcacttcggcggccttttctgacggcagcacgccggcgagcacgcggtcgatcccaagctgagcggctaccgccgcagccgtccgttcgttgtcgccggtcagcagcagggtgtcgacgccgatttcgcgcagatggcgcaccgcctcgcgcgcggtcggcttcacggggtcggcaacggcgatgattccgcgcagccgcactgccggcgcaagctcggcaacccacatcacggtgcgaccgcgctcctcgagctcgacagcccgcgttgcgagcggctcaaggctcacatggtgattggccatgagccggcgattgccgatgacaatcacccgaccatcaacgttggccgtcagccccaggccggcgtggctctggaaatcgatcagcttcggcagctcgcgatcttttgccttcgtcagcaccgccttggccagcgggtgctcgctgccggtctgcgcggcggcggcgagcccgagcaactggtcctcgtctccgtcgcaggcgaccatctcggtcacggcaggcctgccttcggtcaccgttcccgtcttgtcgagaataatggtttcgagcctgtacgctcgttcgagcgcctcggcatcccgaatcaggatgccagctctggcggctgcgccagtgccgaccatcagcgccgtcggagtggcaaggccaagcgagcatggacaggcgatcaccatgaccgataccgccgcgacgaccccagcggtcacgtcgccggctatcagccaccagccgaggaaggacgtaagcgcgacggcaagcacgatcggaacgaacaccgcggagacgcggtcgaccagacgttggattggcggcttcttcgcctgggcatgctcgaccagggcgatgatacgcgacagcatcgattgttcaccgacggccttcgtctccgcccgcaacaacccgctgccgttgatcgagccgccggtgatcttgtcgtcagtctgcttcgccaccggcaggctttctccagccaacaagctctcgtcgacttcgctccgcccggacagcacaaccgcatcgaccgggatgcgttcgccgggacgcacgatgatgacgtcgccgactgccacgtccgcaaccggcatttcgatgtcgccgccctcgcgttcgatgcgcgcccgctcgggccgcagcgacatcagcgcctggatggcggcggttgtggagcgcttggcgcgcgcttccagccagcgtcccaccatgatcagggcgataaccgccgctgcggcttcgaagtagaggtgtgtgccggcaggcccggcgagcatcaggtaaaggctgtcgaagtaggcggccgacgtgccgagcgagaccagcagatccatgttgccggtgcgggcgcgcaacgccttccaagcgcccacatagaagcgccagccgataacgaactgaactggcgttgcgagcagaagttgcagccagcccggcagcatgannnnnnnnnngtgggcggcaacgatcgcccggtcgcgtcctcggttgcctgtcagaagctcggcgtcgtatccggcctgccggaccgcggcgaccagatcggagggccgcgacagcccggcgatcccctcgaccgacgctttctcgctcgccaggttgacctcggcccgggtgattccggatacgcgctttagcgccgcttcgactcggccggcgcaggtggcgcaggtcatcccggaaatggcgagttcgcgcgtctcgcggggaactcgtagcccgcctgctcgaccgcttgggcaagggcaaccggcgtcaattgcctgcgatcgaactcaatgtcggcacgctcggtcgaaatattgacggtggcctgcacacccgggagcgccgaaagggccttttcgacgcgccccacgcaggttgcacagctcattccctcgatcggaagagtgacgtgcgtgcgatcagcagcagccgcttcagcgatgctcattggtttgcccattcgttgcgctcgcctctgtgaccgaggcgcacaaacccgacgacaatttggcagggccggcagaatggtcatatcggccggagctcacctcacgggctcaaacgctaggctcaacggaacgacccggcagattgcttgttcatcgcccaacccgtcacgcgattgtgactgctccgagcaagccccggcactgcttggcggggttttcggagagcgctcgctttgatccacctgatcagggcgacggattggaggctgagcacaccactacgcatcggctccaaaggagattggcatgccgcccctggacacggtgatgatcacgggaagcagcggcttcatcgggtcagccctcgtaaacaagcttgcggggcgtttcagactcgtcggattcgacaagatcgcaagtcgaacaccaccgcctgctgccgagtgtgtctgcatcgatctgacgaataaggatgcaattgaggccgcattcgagcgcgtgcgcatcgcctacggcgatcgaatctgctccgtgatccatctggccgcgtactacgacctctccggcgagcacagtccgttatatgagcagatcaccgtacggggcactgaacgacttctggagcagctcaagaattttcaggtcgaacagttcgtcttttcgagcacgatgctcgtgcacgcgccgaccgatcctggccagcggatcagcgaggaatccccgatcgatccgcgctggccatatccgcagtcgaaggtcgaaaccgaggctctcatccgagagcagcacggcaacattcctgttgtcctgctgcggctcgctggggtctacgacgaccgctgccactcggcgttcctgtcgcaacagattgcgcgcatctacgagcggcaatggctcagccacctgtttccaggtgacatccgccgtggtcaagcttccgtccatttggatgacgtcacggacgcgcttgctgcattgatcgccaagcgaggcgaactgccaaaggaatcgaccctgctggtcggcgagccagagacgctgagctacgacgaagtgcagcgcctcgttgggcgcctcctccgctggcgtcaccctgatgtcggcgcccccctcccattgggacgaaatgatgatgggtaacggctggctcgaatgcctcgtatccattccgatcatcgcggtcgtgcccttcgcgattgtaatgtgggcggttcgaatggccgcgccgaccaatctgacgaggaccggcgctttggccggtctggtggcgggtagcatcagtgccgtcgcgtacgcgctgcactgcaccgacgacagttttccctttgttgccctctggtacgggcgaacaatcatactctgcaccctggccggcggcgcgcttggacctcggatattgcgttggtaggcaatgcttcggaagcgatcaaaacggtgtgagtgtgtaaccgcgaggcgatctgcgacgaaataactggcacatacgaaagcagatcggtgacgtgtcatgcgtactgccgagcttattgaactgcttagtgctcgcttgcagccggttgacaggcgccaattgacgcgcagcgttgctctttcggtgggcttcggttttgctgcagcgatcatcgcgacagccctgctgtatggcttccgcaccgatcttgatcgcacaagatcggttcttttcttgctgtttaaactcgccttcgcgtcaacggtcgtgctggtcggattggcttggctgttgcggttagcccgccccggtgctgagcacggatcgaaatacctcgcgctcgcgaccttgccttttgccactctctgcacgctcgcagttatcaatctccttctcgttcccccggccgattgggaagcaatgctgatggggcacgagtggcggaagtgccttttctccatcccaatcctcgcgacggcgccattcgcggcgcttgtctgggctctgcgcagaggagctcctaccgatttgaagcggtccggcgctgtggcgggcctggttgccggggggatgggtgctaccgcgtatgcgcttcatggcaccggcgaccagtttccttacattgcgctttggtacagtggaacgctggcgctatgcgccctcgccggcgcagtcctcgggccgaagatgctgcgatggtaaactgcttcctgtctcggtttggttgttcgcttcggcagcctgcgtagtcctcacgagtcctttgcggcaagtccagtccgctcacgcccggcttctaagcggtcaccatcgcagtctgtcttggagcgccgatcactgcttccctgctggaaaacaggcacggcgaccgatcgtggtactgccgggttaattccgattgcggtcgtcatcccttcagctccggcggttccagcattggaacctagatcaggtcgaggcggtgcagtcagaatgtatttacttagtgggtcgcaggagtattgtggcatcaaataacagattgtggcgtgccaagatggcccgcgtgcggcaaccgagctagtttaccgaagctgtggttgatttgatcaacctcacgatgggtgttttgctcttcacgtcaccgtggctatttgggttcagctcggctttcggctggcacacgtcctggatggcgggtgccgcgataactattctagcgatgttttcaatcgccgatctcttcgaagccgttcccatgcccgaaatctttgaagaggaagaatggatcatcctgactattggcctgtggatcgcgatctgcccgtggatcctcggcttccatggggacgtcagcgcgagtaatgtgcactttgccattgggctaatcattgctggcctcgcggctgtggagctatggtcgctgcgccacaccccgcattcaaaggtgtgaacctccaacggttcgaccggctcggccacctcatatgcatggcttaaagcggcgggtgctgcatctgtctgttatctttagcctgaaggcaccgcgcggcctgacgtgtcaacgggccggccggtccacaattcaggcagctttgtcatcctgcccactgccactcccaaggctccatcctatgcggcccttcgccgattgagggcgaagccaatagctacagccgccgtcatgagtacctgcgccgcgatcgtttgcatggttgggaatagaccaaccaacgagatgcgtggcaccgagcgtagcggcgcgatgctgacgatgccggcctcctgcagggcggcgatacccttgccggccagcacgaccgtcagaaccgccatgagccacgaactgtaactgaagaacttgccgactggcagccggcggctatagcgcagcatggcccacgcgatgaccgccagcgccgcgcacgcgctcagtgctccggcgagtaccgtagcgccgtttccctggctccacagcgccgcgtagaagaggatcgtctcgaacacttctcgatagacgacgatgaaagcaagcccaaacagcaaccaggccgaactgccggacaacgccttcgccatcttttcgcgaatgtagcgctgccattggtcggcttgtgccttgccgtgcatccagatgccaaccgagagcaggacgacagcggcgaagaccgacccgaacccctccgtcagctcccggctcgcgccgctgatcccgatcacccaggtcgcgacgacccaggtcacgaagccggcgacgagcgcacccacccaacccgcatggacgtagggcatgacctccgtccgttcggccttgcggaggaaggcgatcatcgcaaccacgatcagcagcgcttccagtccctcgcgcagcaggatcgtcgccgccccgagaaacgttgacaggccgctcgcggcgtccggggaaagcgatgcctccgcatcgtcaaaaagttcgtcgaggacctgcacgcgatcggcgagcgcatcggcattttctccgctctggatagcggcgcggtagtcgcccatcgcgccctcgatccgctccataagcgtacgatcacgcgcgcccagcgtcggttcgaccgtctcgaatccatcgagataggcagacaaggccagttcgcccgcatgctggcggtctcccgcacgataggcggcaaggctctcggtcaggcggctgcgcaccagggacagcgatccggcctgctgctgcgtgatcgcctcgggatgacgacgcaaataaaccatgagagcgtcggccttgtcctgtccgatcttgctcgcgagcgctgcgggcgtcgtgccgacaagcgtcttcagatcgggaacgagccggcgaagcgaggcgtcctgcttccacagccgctcgccttcggccacagcgggatcggggaaggcgaaatgaccggcgtagaacgccaaagcccaacgatcatcggtcggaagaccctcgaagctcggcatcgcggctccgtcgagaccttgggtaatcacctggtagagcgcgaacacgctgcgctggcgagcgcgctcggcgtccgtgaacgcgatgggcggcgtatcaagcttgacggcatctggtccatggccgtccccggcctcgccatggcaggcggcgcagttctggccgaataacgtcgcaccgcgtgtgaagtccggaaccttgttcggcgccagcggcactgggtaggccgccagcaacgccgccgccaggccgcgcgctatacctgcgacttgctcggcatcagccttgtctgcgatggcgcgctgcaggcgggcggcctccgtcgcaagcgcttgccgttccggcttcggcgggagcgcacggacctttgcggcaatcgtcgccgcgaactcgttctgctcggcatattcggaaggacttgagaccgacccatgcgacacggcgccggcgtaatccaccgcgatgtaatccaacagtcgccacgtggtttcgacatcgctcgtcgtggccctcgctgcgccgcagaacaccagagcgaccagcatggcaatcactgcgagacgcgacagtaaagatagcagactcacggaatgccaagttgaaggttggatccgacgatggtctaccgcctgtttcgggtcggcgcaatttgaggcgttctaattccgctctaggtcaacttcttttgaggctagtccgcccgctttctcaagcggtaacgcgctcgccgccaacggcaccaggcgcgagccgtggcggcgacgacagccagtctcacaccactataactatacttgggatggtcgctttgttcgactatcttccctcccgattaggcggtcgatctgcgcgatgatgacgtccgtcagcgacgcacgcacatggttcgcgtgcagagtggacatgctttgtgctctgtccttaaggagagaacaatgctgttccaaataggtgactatgtggcgggcgcggtgatcggcatggcaaccgcgctgctcgttcgccttgtgatctggcctggaacggacatggtggtcgcaatgctgctcgggatgggccttggcacgatcgtctcgctgctcctgagctacttgctcgcgccgatgcttggtattgttgagactatggtgccgggatcactgacagggatgtgatgtatggtggcatgttattcgcaatgcgcgactcgatggccgctggctcgcgcacgacaagcgccgcaatcgtcgtcggagcattttttggaattgtagtgaccgccgccataaagctctatagttatgcgttgcgaggaacagtgatggaggccagggactgacggaacctgccatggatgttcaaacgcaggagaaatgggatcgcgccagccggacctacgacttctttggcgcggtcgacaacaagcgtctcgggttggaaaagcaaaggctgcttgccaaggcgcagggcaagacgctgcatgtcgcggccggaaccggcaacgatttcaagttctttccgcctggcatgcacatcgtctcgatcgacatcagccccaagatgctagcgcgggccaaaatcaaagctgcgacctacaacgggacaatcgagcttcgtgaagctgacgttcacagcctcgattatccggactcgactttcgacaccgtcgccacagtttttacgttctgttcagtacctcagccgatcacgggtttgcgggagctttaccgcgttctgaaatcgggcgggcgaattttgatgctcgaacacgtccgcagcacggccattggcccgctcggcatcatgatggacctcatgtcgcaactgacgcgacggttcgggccggagctcaatcgggataccgtcgcgaatgtgcaaagggcaggcttccgactgcgtcgcgttgaaaacatttaccccgacatcgtgagaagcatcgaggctgtaaaggattagtccgcgagttcgtcaccgcgagttgaccagatggggttgtctgcttgtcagtcaaggcttcacttgtgccgcctcgtcgaccgctcggcgttgatcgccaaggccaaagaactcgtgcggtgcaaagccgagagcgcgcgcgaacagcacgaccggaaattgctggatcatactgttatatctctgcaccatggcattgaatgagcggcgcgctgcggcaagcctgttttctattttggtcaggtcgctctggagttgctggaaattgctgttcgccttgaggctcggataagcctccgccaacgcgaacaattggcgcaacgcaccgcccaacatggattcggcctctgcccctgtcgctgagtcctgtgccgccaccgcggcgttcctcgcctgcaccaccgcgtcgagcgtgtcacgctcatggctggcatagcccttcacggtctcaacgagattcgggataaggtcgtggcgttgcctgagctgcacatcgatgtcggcgaaagcctgattgcactgctgtcgcatcgcaacgagccgattgtagctcacaaacccgaacagcacgatgaccacgacgacggcgagaataatccatgcggaaatggacatgcgtacggctcccgagctggtgtcgttccgtagcgtagcgcggacgcggcgggagtctatcctcactgctgagttcttggtgacatagaaagcgtgtatagctccccaccctgcgatgcacaggacgaggatagcgacgatcagggcgttcaacgtgattgcctgatcaccgctcggcaactagctcagtttgcgcccgcgggcgtaaaccgcctaaccatcaggagtacgaaatcgtagaaagtcgtagtttggcgggggaaatcgtggcgcggcgtagcggggggctcgaacccccaccttaggagtttgattccagtgcttcgagcgattcgtcgcgacggccgtatgagctctgcgggcctatagttgctgagaaagcgcgagccgatgattctgcctaaatgacggattgaccgctcgcggcgctatgacttgatgccgagtagaagatgatcgaatgtgtgagcccgcgcattcaacgctcacgctcttgcattctcatgcgttcgccactctgactttcagcgaccatttccccgccgcggcctgcttgatgacgctctcgaacaggctccatgactgtcgcccgcgcaaacgaatgccccttctcgaggtgctgagcgatgcgctccttggcgaaggccataatgctctggcgagcattctcgtcgttcggcagagcgcgttcgacaagcttgttgatgacgacaatctgggattgggccgcgagcaggtcagaatcatgcgcggccgccgttcggtctgcacggcgttcctccaccgtcaccttccacatgttgcgccacatctggcgccgttcaatgccagcggctcctgtggcggcgtctatggacttgatcgacctgatgatgggtgcgacgccatcccttcgcagagagatgcggtcgccaggcctggcgccactgtctgcgacatcagttacaacgccgacgccccacacctgatgtcgccgaccatcatccagttcgatggctacataggtggacggctccgcgtcggcgcggttgcgatacgggccaaaaccgacctccatcagacgcccggaaacgcccttgtcgtaatcgagcctatcccctagagatgacttgccggagtccgagcgagtctttacgtcgttggtccgggcgtgggctcgatcccatgccgttcgtcggtcagcaagcgcctgacgatcaagctcgtttggctgatagccctgcacctctattccgcgcgcgctagcctcgagccacgcctcccgccggaactctactgagccacggacgtgaactgcctcccactggcgatgctgtgccacgctgaccatgtcccggatcacttccgcggctgctatgcgggtaaccaagcgatcatcagtggccttgaacgcgaggtactctttccgctcatcggcatagagccgcgcatcagaaccatccttttcggattcactggccactacgtaatatttccgccggatacggtccggaaatgcactatctgttacctccggggatgaaggcttcttgggggctgttgctatctcgtcttcccccttttctcgggcggaaacgcgccccgcgcgacgttgccgctccaggctgaattcctcgctcgcgtcatgcctgtcgttcatgctgctcactcgtctgcttgcggcctgtccgccgcgccggcggaatgacctgagcgtcgatgtatttcagggtccaggctttgaggtcgtcttcggataggccttcgagatcgacatccacgtccccgaaatcgaaactagcctcggcaggaatcgtggagggatcagccacctcctcgtcggtcattggccgttttcggaatactgctcgtagctcggcaatctcagagcgcagctccttgagttcagcgtccagcagcgcatttgaacgccccttgggcagttctgggacgggcgccggcagcaatcgctccagaaaagacttgtcttcgtaatagatgatcttgtcggcgatgattggcggaatgccggtgccgagaatgaaggccttggatttcggaagaagcttgagctcttgcggcagcatcagggcgcgacgatgctcggaaacggtctcgctgatcgcgcgcatcgccagcccttttggtccgctgcggctgcgggcgttcacagtctcgtagccgatgcgctccgagagctcattcgctacgtcctgctccttcggggcaaacacgacctccacggcgtggttggtcatgaagttgcgcgcagcatcgaccccgtagatcgcgcggagctgcgccgggctctggaccaccgtgagaagacggatgccgtacccggcgacgaaggcaaccgattttgccaatacattcacattgcccaacgccggaaattcgtcgagcaagagcaggagtttgcgagccagtttggggttttgttcgggtaactcccgggtgttgagatcgaccacctgctggaaaaacaggttcaatagcggcgccatgcggtcaagattatcaggcgtgaccccgagatagatcgacatgggctgctgcctcagctgccgcagatcgaaatcattgctcgaggttgcggcatcgatgcgaggattgagccagaggccgagccgtgccgttacggtcttgcggaccgagttcaacgtgttctcggaggctgcgaggaagtcgttcagcgccgtgatgcagtgccgggacagcggggaaggaccggccttgcggtcggcgatgatcttgtcgaagtgggctttgagattctgggttgccgagagctggcgcaggatctcgccgatcgtcaatggtaagcccggcgtttccgcgacgtagccgccgatcgccacaaaggatgaacgagctgcctcgaaccagaagggatcaccgcggctttcagctggaaacagcatcactgcaatgcgctgcagatcgtcgtagagatcggcggggtcgctgcgcacatagcccaggggattgtaacgtgcggtgcgaccggtctcgtcgagtgggtcgaacagatggacttcctgcccgtgggcggcgcgaaagcctgccgaacgatcccagttctctttcttgacgtcgagggcaacaaccgaatccggccaattgagcaggtttggaataacatagccgacacccttcccggcgcgcgtcggggcataaaggaggacgtgttccgatccgccgaaacaaagcatttttccatcttttcggccgagcagtaggccttctttggatcgcaggccggcggccccgatctcgcgctcggaggcgaaacgggccttgccgtgaagtggaggcggccggtgccggaggacggcgccgagcaggccaaagaccacgatcaggccggcgagggtcgacagcgtcagccaacggtcgaagcgcgggtcctccccgtaacggggccagcctgtggcgatctccgaccagtgaaagccgccatcgtgaagtctaagcccaagcagcagaacgttcgaggcgaccaacagaaagactgcggcggccccgagcgcgagcgccgtgccctgggccgccttaacgggcgtggtcgcgtttgcgaacggggtcatagtagatttccgatatacgataacgtccgttccgcttctgcatctggacgacgacatcgaccaggtgcagcaagagggagcggatatcgtcgcggtggaggtcccgtccctccgcgctctctttgaccagcagtgtcatctgttcgaaggcaaggcgggcgctgtccgcgtgaacggtcgtgatcgatcccgggtgccccgaattcacgttcctgagatagaagaaggcggtgccgtcgcgcagctcttgcagcaagatgcggtcgggccgcatccgcaaggacgattccagcagttcgcgcgggccgatcttggctactccctgcccatccttagcatagagcagccggacgcaattctgatgcgggataaccaactcggcggtgtcttcgatggtgatcagccgctcatgcgccgggatcgcggcaatcagtgccttggacagagtggtcttgccggaacccgtcgcccccgagatcaggatattgcggcgggtgcgaaccgcaagctcaaggaactcccgccattggccggcctctttcagggcgagcagtcgatgctcgtcagcgtccagctcgtcactggcggagcggacctcatcgaacagtcttacccgctccagagcgtccaggttcatcgtcagcgttgacggtttgcggatcgtgaggctgatcatgccaccagggacggcgggtggcacaacgatctgacagcgctcctcgccgattaggctggtcgagagcaccggatattccggcccgatgtcctggcgggtgtgacttgcggctgcggttgcaagatgagagaggtaagtttgcgtaagggcttccgattgatgccgggtccaaccgtcaggcccttccacgaagatctcgccgggacggttgacgacaatttcggtcagggtgtcgtccgtgaggtaaggagccagcggctcgagatagcgcgccagcaccagacgcccgccatcatgtccgatggatgcgacctgactcattttgtcaccgtagccggcccgacgatgcctccggggagggtgcggtcgagaatctgggtgcggctttcgatccgcttgagttggtagaccgacgagaaatcgaggtcgcgcgcgacaaagatattgaccagctcgccctgattcttactcagcgttggcgggatgttgatggactgctcgacggcgatgccggcggccgtgttggtcgcgccagccgtgttgttgatctggatcgagccgtcttgcagctgctggcgtccgatcgaagaggcatcgccgacgattgacaacaacagcgccgagccgaagcgctcccagaagtgcgtgtcgatgtcgccgtcgaaccccgcgcggccgagcgcatctgtggcgggtgaggccagcgccacgatgacacccgtcggcgtcttggcgcgagcccatagcacgaacatccgcttggagccgcgccggacattgccccgatattcgccgaccacttgtgtgcccttttccatgagcacaacgttgcccgaatcggacatcacgtcgcgcagcacgacacaggagacgaagccggccacatccgacgacatcgcggtctccagcacgcaagggatcgacgtgccctgggtgaccagaagattgcgattgggaagccgcgctgcacggacgccttcgatcggagtaggtttcagcttgtctgcaagctcattgcgtggctcggcccgtccaaaatcatagggatcaacggggacacctgcactcgggacgtcacgggccgaacgtcccgatgcgaccggccgattgtaggccagcaccggcgcgcgccgcgcgctttcgagcatctggtcgggagccggcgccggggccgccggcgtggctgagataggtgcgaccggaatggatgccgtggtgatgggcgcggcaggcgcttccgcggccggctcgaacgccgccgcctggcggatcatgagcttgcgggcggactcgctgaccggcttatcgcttttccaggttccccagataatcaggaaggcgaatgcggtgagcgcgagcgcgccgaagccgcgcttgagcatcgccgttcgaccattgtcccctcctcccaccggagtaattccgcgttcgccggcaagcgtctcatgttcaagctcggtcatgttgcacccgcctcatcgcgccttaagggttggagatgacctcttcgcccgccgctcgactgaggggctcgtggtgttggtgccgggattgacgccgacagcatcgaaggcttcgttgaagatgcagagcacggtctcgcccttgcgcagccgaaactcgcgagccgtggcgtggaccaccacgagctcgccgcgaacatccttaggcaccagactttcagagccgtccgagttaatcaggtagatcgccgggatctcgcgattgccagcgaagcggaaggtcgtctctttgccgtcgtcgaagacggcttcgggttcgaggtcgatcgagccctgggccgaaaatcgccaattgcgcgcaccataggcatgatgcaggtcaaacgtctgatcgatcagtgcgccttcccgctcggcgccccgggcagccgcttcgacgcgccggcgctcgatctcgtcgccgggataggcaaagcggacgacgaagtagctgtccgcgagcgtcgtctcggcgatcgacaactcgaactgataggaacgctttcgcccgtcggcccgggtggtgacgacctgcagattggtcgatggatgtttttcgcgcggcttgaggaagagaatcgaacccgcgggcgcgacctcccatgcgatggcgtcgccgatggcaacatgcgcaatctcctcgtcatcggcaaagaccacctgggtagaggcgcgaatgacgccgttgaggcggaccacattggctggatcataggtcacggtgcgtacgcgcgcatcgtgttggcccggcgtcggctgttgcagggccagcacgggtccggcaagtccgagagctaaagtcatcaaaatcgcgaaacgtttcatggcacgacctccggatcggcgcgatactccgaaaccagaaagccgagcggattgatcagacggtcggcggacgacatcggtgcgttggcgtaagagaaggtcagggtcgagacccagtgagtaatgtgggtttcctcgcccttgcgggtctctttcatgaaccgaacagacgccacattgtcggctaggagagagatcgctttgatccggaggtgccgtccggaatgcggttggaattcag

SEQ ID NO: 268 - DNA, 1072 bp, Bradyrhizobium colbertium
gatggccgttggcgtcatcacacggtctgcggaatgctgatgcattccagtctcgccgtaactgtcgagggcctaccgctgggattggcggcggtgaagttctggacacggaaaaagttcaaagacaccgcgcagctcaagaagaagatcaacccgacccgcgttcccatcgagaagaaggaaagcgttcgctggctcgacaatctcaggcaatcgatcgagcggctcggacagccggcgcgttgcattcatattggcgaccgcgaaagcgacatctacgaattgtattgcctgacgcaagagcttggcgctcacttccttgtccgcgcctgcgtcgatcggctggcaggcgacggcggtcatacgattgcaaccgagatggaagagaccagcgtcaaaggcttgcattacatagacgtgcgcaacgacaagggtgagacgacgaaggccgcgctggaaatcaagttcaagcggatcgcagtcttgcctcccatcgggaagcagaaacgttatccagccctcgacctgacgataatccatgccaccgagcgcggtacgccaaagggccgtaaaccaattgaatggaagctcatcacggacctagccgtccgcagtcgctccgaagcaatcgagaagatcaactggtacgccatgcgatggaaaatcgaggtgttccataagatcctgaaatcgggttgcaaggcggaagactcaaaactccggacggcggagcgacttgccaatctaatggcggtcttctgcattcttagctggcgcgtcctctggctcaccatgctcaatcgcatcgccccagacgcgtcaccgaaactcgcgttgacggacaccgagatcgcgttgctcgatcgactcatcagcggcgccagccatcgacgatgtcgccctggaacccttgcattctacttgaccaaacttgcacgattgggtggctacctggccagggccgccgatccgccacccggaaatgttgtcatctggcgcggactctccagactcactgatatcgaactcggcgccgaaatcggagcggccggaaatgtgggtaattgaaagc

SEQ ID NO: 269 - DNA, 1418 bp, Bradyrhizobium colbertium
ggatatgagatcatgacgctcgcacccgatgtcctcgacatcgtcaacgacatgaaagcccgcggcgagccgttcgcgctggccactgtggtgcgcacggtatcgctgaccgcagcgaaggcgggcgcgaaggccgtcatcctcagagacggcaccatgaccgccggatggatcggtgggggttgcgcacgtgccaatgtgctgaaggcggcgcggcagtcgctctcggacggccagccgcgcctcatcagcgtgcagccgaaggatgtgctggaagaacacggactgaaagccggtgaatcacacgacggcgtcctctacgccaacaacatgtgtccgagccacggcaccatggatatttttgtcgaaccgatcctgccgcgtccgcagctttatgtctgcggcgcatcgcctgtggcggtggcgatcgcggccatcgcccagcgcatgggattcttcgtatcagtgtgcgccccagccgcggatcatgcgctgttcggcgataccgatcggcttgtggatggttatgagatccctgcggacagcggcggcaaccgatatgtcgttgtgtcgactcaggggcgtggtgatacggcagcgttgaaatcggctttggccgctcagtcaacctatgtcgccttcgtcggatcgcgcaagaaggcggccgtgctgaaggacgaactggctgccgcgggcgtgccgcccttgcaactggagactctgcgggccccggccggactcgatctcggcgcgatcacgccggatgaaattgcattgtcgatcgttgcggagatggtcgaggtgcgccgccgtggacaacggcgggcggaacaacaggaagaaggacatgtctgatggatatgaacggttcgcaacgcatcgaagcttcacgcgagttagtctatgccgcgctcaacgacgtcgatgtgctcaagcagtgcatccccggatgcgagtccatcgagaagacatccgacaatgaaatgaacgccaaggtcacgctgcgcgtcggtcccgtgaaggcttcgttcaccggcaaggtgaccttgtccgacttcgatccgccgaacggttacactatcaccggtgaaggctccggaggcatggccggctttgccaaaggcagcgccgcggtcaagctggaggccgatggtgacgcaaccatccttcattacaccgtgaaggccgagatcggcggcaagctcgcgcaactcggcgggcgattgatcgatgcgacggccacgaagcttgcaggggagttcttcgagaagttcagcggcatcgtcggcggtccggtcgaaaccgcggatgaggcttccgcggaaaagaagaaagtcggctggctgaagaagatggtgggtgcgacaggcgccgtgatgctgggcgtgatcattgcaacgcattggtgttgtatcaac

SEQ ID NO: 270 - DNA, 20451 bp, Bradyrhizobium colbertium
  misc_feature (182)..(201): n is a, c, g, or t
gggggcggcctccggtgcaggcgcagcatcggcaggcacgggcgaggcgtaagcgcgaagccgatacccttgcttcagagttagaatgaatgtgcgaagaagcctccggcttggacggaggtttaggatgggattggacagcaaaaaggacgtccatttggacggcccatcggcggggtcgnnnnnnnnnnnnnnnnnnnntgaaggaccgtcggggcgccgcgtgcgttcggaagctgagagagctcggatcgtcgccgagagtctgttgcccggtgcccaggtgtccgaggttgcgcgcaagcacggagcgacgcgctggtagatctacgactggcgacggcggtttcgacagcgaggcatgttgccgccgtgcgaggcgtccccgccgacattcgcgccgctggtcgtggaacatgcgttggaggagcgtcagactccggcgatcaagcttgagatcgcgatcggtgatgtcgtgctgcggacggacacggccattgatggtgagcagctgtcccgggtgatccgtgcggtgcgagcgtcacgatgatcgcggccggtgctgatctgaagatttacgttgcaatgcggccgatcgacttccgctgtggccaggatgggcttgcggcaaaggtgcaggagatgctccgtctcgatccgttcagcggcgcagccttcgtgttccgatcgaaacgagcggaccggatcaagattttggtctgggatcgaacgggcccggtgttggtgcacaagcgcctcgaaggttgcaagtttgtttggccaaggatcgcggacggcgtgatgcgaatgtcgcccgcgatgttcgctgccttgctcgagggcgcttgttgatgcccttacttttcatgttgatcctccctcagatcgatcttcgcgacacggtgatttctcaagctgcgaatggcttgcagggcggctgttttgtcggggaacaggaagcggcccgaaggctctcgggtggtcaggatgctctctcgtttgagctgaacatagatccacttggtgggaatgctgagacggtttgccagttgggttactgtcgaatggtcagcgatcgccggccatcgtgtttgccgatgttgcacctttaggcggcgtttaagccgaatgcgctggaccgtgaccggcaggactttgtccgcttcccattgcgagtgatgcccttccgatcaccttggcacgcagatcatgagcaacgcctatggggtcgtttgccttgggcaccttgcgctgggccaacgcctcctcggctcgacgcagctccaacagggccgcttcccagcgccgctccagctcgccggtgaccaaccggttgtcagggtcagcgcgattgaactggcgctcagcaagggctgcttgatagcgaagcctctcaatctgctgctcctcggcgtgccgtagggctctttcggactgcagatgggtcttgcgcgctttggacaacgcatcgatttccgccggcgccaccgcctccaagaatgccgctgtaacctgtgcgtcgatcggtgcggcccgcaggttctgacattccggagcgccgcgctggattttgagatgattgcagacatattgactgccgcccttgtaacgcacagccatcttgtgtccgcattcgccgcaataggtgatgccgtggagcaatgctgctccatcacgagggatgccacggctctcgatgtgctggtactctgcccgattgtcgcgcagcatcgcctggatcttctcgaaggtctcccaatcgatataggtcgggtacttttccctcaccacgatcctccagtccgttccacgacgcggagatttttgtggacgctctcccggtctttgggatggcttctgccaagtccttccatagacaaaggcgcctgcataggccggattcttgaggatcgccgtcacggccgagacagtggccggttgccagcgcaaatcgccatggcggtcgcggcgaggcagtgccaagccgcgtgcaacaaaggcccgcatcacttgcgcggcggtccgcaccttcaggaaggtctcgaagagcagcaacaggcgcccctgcacctcgagattggggtccttggtgaccaccccagaaggatcgcggacaaggcccgccggcagttgcaaggccaagtcaccgcgttcggcttttgccataagcccagtggtcatccggcttttaatcgtgtgcaattctagctctgagatcgttcccttcaaaccgaggagcaggcggccattgggcgttccgggatcgtagatgccatcacggtcggcgatcaaacaacggcggtgcccgcagacatcaagcagcgggtaccaatccgaacaattgcgcgccaggcgcgtcacgtccatcgacaagataaggccaatctcgccaagagtgacgcgcgcaaccaagtccttaaaccctttcctgtgggctgcggcagcaccactctgcccaagatcgctgtcaatcacatcgatgtccgcctcgcgccatccgagatcgcgagcgcgctgcgagagggcgtactggagcttcaggctttcttgattggtgatcacttggtgtggcgtcgactgccggacatacaccaccgctttgcggtccaggtgatccggtttgacgagttctgagcccatcgctcatctcccgcaggacttggccgagatcttctgcgatcgcctgccggagcatttccggcaaactgcgccagacctctcgaggttcgatgggcatgtgcccccgctctcttcggccaacgcgattaagtcctgcagcgcgtcgaggctcagcttggtcggcgcggcgcgcagcaagccgttccgctcaagacacgtcaccccgagcggcagaagaagcgtgagaccgaatcggtaatgtacacgcgcaaaggattccttgcacgctccacgtgtggtcgtctccttgccgatcgagatcaatcgatagcgccgaccataaagcggatgacgcggatcaacgacttccacctcttcgccggcggctacgtcatcgtgactcttatgggtatctcccgatgccctcgctcgaaggtctggattggagactggtccgcccggaagaagcacggcgcccgcaggcggcgggataactgcgtcagaatgactcggcagctattttgatcgtggcacacgcggcggcgatgtgctcgaaatagcgcatgagcatcgcggcgctgcgcgacgaaaatgaacaactgaaagcgcttttggcgcaaacccaggcggcgttgagcgagcatcagggggcgctggcggcctcggaagaagcgcggcgtcggctggagatcatcctcggcgaattgcgacgcgagaagttcggcgcgaagtccgagaagctgcggccagatcaatatcatttgccactcgaagacgtggagatcgcgcaaggcgtcctggatgcggcacaggagaaggctgcggcggtcatcaggggccgatctcgcaccggatcggatcaggaccgtcatcgtaatcggggctgcttgcctgcccatttgccgcaggtggagcggatcctcgagcctgcgagcacgctttgtccgtgcggttgcggggccatgacgaagatcggcgaggacgttagcaaacggctcgacgtgatcccggcgcaatggcgcgtgctggtcacacgccgcccgaaatacatctgccgccgctgctcgggccctgtcgtgcaggcgcacgcaccggagcatgtcgtgcctggtggactaccgaccgaagcggcgattgcgcacgtgatcgtctccaagtttggcgaccatacgccgttttaccgtcaggccgagatctatgcgcgccaggggatccggcttgatcgggcgaccctgggcaattggtccggccgcgcctgcttccatctccaacccgttgccgaccacatgcgccgccatctggcagcggcggatcgcctgttcatggacgaaaccacggcgccggtgctcgatcccgggcgtggtcaaacgaagaagggctacttctgggcgatcgtctccgacgaccgcggccatagcggcccaagtccgccgatcgtgctgttccgatatgcccccggtcgcagcggcgccttcgctgaacagttcctggacggctttaacggacgcttcctgcaatgcgatgcctatgacggttatgaccggctcagcgaagtcgctcgacggcaagggccgtggacgctcgtgcattgttggagccatttgcgccggcgcttcgtcaaattggcccgcaacagcaaatcgccgatcgccgaggccgccgtccggcagatcgcacagctttacgccatcgaagccatggtacgcggttcatcgccggacatcaggctggccgcgcgcaaggagcactcgctgcccatcgtcgaggcgttgaagccgtggttcgagaaacagctgtcgatgatctccagcggctcgacgctcgccgatgacatccgccacgcgctcaatcattggcaagggctgacccgcttcctcgatgatgggcgtctcgagctcgacaccaatccggtcgagaacgccatccggccagtctgcttgaccagaaaaaatgcgctcttcgccgggcatgaggtcggggctgaaaattgggccttgcttgcgtcgatcgttgccacctgcaagctcagcgacgtcaacccggccgcctacatcgccgaaacactcgaggccattatcgacggccatccccatcgcagaatcgaagacctcatgccgtggcgattccgcaaagcgtcaagcctgcgtccatagggtggcggcttagcgcttacggcgaggcacagggagcgacaggaaaggcctcgggaggtaattccccgcgatcaagtggttcaacgagcggcagcagctcaggctctacgcggcggtagctggccggtccctcgctgaaggccgaccccttcatgcaccagatgcgccagcacctggagagcacggacctgcagtaccggctcgtcgtctagcgtggcaatctgggtggaagcctttccatcctgtttgccgcggcgaactcgtcgtcgctcatatagtttgttcgtaggcgcagacatgaagtccagactgacggattgctgcctcctgcgagcgcacctgaggacggacattcgagaccaagagcttttagggccgccagaaataccgaaactgaagcgttaaagaacacgagctcttgccacgatcgttgtgtcgctgcgcttcgttatgtgtgttacagtacgccggtggaagccttgggcttcagcagtcagcgagcggtgcggcctcttgaaattcaagcttccccagatgaattttaaaacgcgaaacgattggctgtttcggatatcggtggtctggaccagcttggtcgccagggcactcatatttgttctgttctatggacgatgatcgaattgcagccggcggacgaataccaatttgattcctacaccaaacaaggctgtagacgcagggccgaagctgctttggcacatacgttcgccgttgcgagacaaggaggagcgcgataccgcatcccgcccatgccaccgggcggagcctgcacggctgctttggcgcgcccggccgggttgcctccttcaggaaggccagcaaatccgcgcgagcgcgctcgtccttgattccattgaacggcatgtcattgtccggcaccatccggtccgggtcggtaagccagccgtcgagcgagcggtcgtcccagatggtaccggaggatttgagtgcatcggagtagcgctcgaagctcggcaagctgccggccttgcggccccagaggctagcgaggctcggcccggtcatgttgcggtcggattctagcgagtgacatggcgcacacgccctgaacaattgctggccttgggacatatcggccgtttgcgcgatcgcaggtgacccaagaacaattgccgcgaacgccaccattgcgtggcccttcatggattacctccctggtttccagtcccatcgttcggcggattaaggcgcgccgacccagaagtaccatctcacaggggacgcgcgctgccggagtagacgaagaccatgggacgcggccccctcaaatagccggtttccagcggtatcgatgacgaagccggcggatcgcaagagatcgtcgggcttgcgatcagcgaagagcaaacggccgccggtttcagcacacgccgcgcctcggccaacgtcgtgatgggatcgctgacgctgcacagcgtgaacgtcacggcaacggtatcgatgctcttgctttcaagcggcatagcctcgccgctgccgcacacgagctcgacgggagcctcagcatcgcgggcccgttcgcgcgcgaacttcaagagctctggcgagggatcgatgccgtacacgcgtctgacccgagaaccgtagaatggcaagttcacgcccgacccgatgccgagatcgagcacgctgccctcggcggtttctccgatccgctcgcgaaatcgcactatctgcttctgcttcatcgcgaggtcgaggatgcgggggaagagccattgcgaataaaagcccattgctattcttccttgcttcgatcgctttgtcaggaacggaggtacttgacgaatgcagcgatcccgagcaccaggaacgcaaggatcaggagccagatcactcccatcccaagcatcatcgctgtcgacatgccgctcatatccatcatcatatgcgttgctccttccggccgaaggcggccggttatcatctctgttcagtactgatggctatttggatccagaacgtttcggctcgttcagacctggtcatcagcctgtctgggctgtgcggctttccgccgacaccgcctcgtccgttgatcggtgggtaccgcaattgaagcatttgaacatcatcagcatgcagggcagcgccgtcagcaggcgaatagtctcggagaccgtgagccagtgccagttgaaagcgatacctccggcaacaacaccagccagcgaatggtagagaatcagacgatgtcgagcgagatagtcgctcaaggcatcgcgcaatgtattcagggcattcccggctctcataatagctatggccatgaagattgttccttcgcagcgaaatccgtttgcagggaaaggtggcggccggcgattcttcgggcgttggggccaatcaacggagattagcccctgcccgagagctaacgggatttgggaccgccctggtagcgccacgtgggtccaccagcggtcacagtgggctgtgctggcgcagagtgatcgtaggcgaatgcagaattcagatcgtgctgcgagacaaccgctccgctctgcgcgctttgcgtggcctcgctcggccaatagctcttgtctgaaatcgtcgaggctgcctgggcggttgccgacaggcccgccaaaagcccgatcgcaagaagggttttcttcaacattgttccggctccatcatgtttcaaaagcgctattgcgcttctgatgaggagttcggagcccggcgcccagcggttacaagctcacgccgacgtgaaacacatagccgtgcctgtcaccaacgcagcaatcgcggcccaagcagcgcgcctgtcggtgtgcacagcacaatcgtgcccccgtaccagagggcgacaaagggcagcgagtcatcggtgcagtgaagggagtaagcaattgcgctcacgccgcctgcgacgagaccgctgaatgcgcccgcgcgaacaaggccccgacttccgatatggacgcctagcgcgccgcatcgcctagccgtcgcgaagatcaccgtagccatgtgagcgggcacgaacgcgagagtggattttcgaagcgcgagcgagtcgttcgcgggcttgaccttggagttaggtccaagggttagtctcggatcattggagacaggcgccgcaagaggaacagtgatgaaaacgacgatcttcaaaattgacggtatgaattgcgacggatgcgcggagacgatccaaagcctaatcgagaaggaacctggcgtgcgtatggcgtccgtctcgtttgctgaccagcgggcgcgcgtgctgttcgatccgcaatccattcgggaagaccgccttgtgaacttgatccaaaagcccggatttcgcgtcgtggcccgcgaaacggcaggtagctgaccgctaagccatgctgttgccggagcggaatggagagaacgcaatgactatcgcgacaggaactgcttccaccttcacgccatggagcgaggagccctcggcgagacccaatcgccgcaagattcgcgcgcgtatcggcggcctgcattgctccctctgcaccggcaccattgagaaggcgctcgggcgactgcccggcgttgataaggtggccgtgagcttgacccatgagcaggccctggtcgaatacgatccctctattgcccgccctgagctgttcctgcaaacgctgcgcgacatcgggtataccatctctgatcccagcaagctcaggccgtacgaggaggaagagcgtgatcttgtgaacgaggcacggcgcttcgtcgttgccgtggtgctgagcgttgcagccatcccgatcatcgccgatccgggcgtgggctggattggatttctgccggcccttgtttgtctcagctttggggcattcgtattcctggtgctgcggtcgaccggattctggatcgcggtcgcgagtgccaccgggcttgcggcgatgtcgctgacgctgctgtttctgaatttgcagggctacctgacgaaggctgctccatggctgaccggcgcgttggcattgttgctcgtctttggcgtcggccggcatatcctacacatggccatccaggccttacggaggggcatcctcaaccagcatgtcctgctggaaatcggagcattcgcagggattgcgggcggcatcatcgggctcgtcctcggccggcctgactatcccaccgcaccattctttgccgtctcggtgatggtcggcacctaccatatcttttccgaatggctgtcgctgatcgtgaagacccgcagctcacaggcggtgaaacggctattggacctgcagcctgagactgcccgagtggtgcgtggcggcaccgagttggaattacccctcgaagcggtcaggatcggtgatctcgtccgggtccgccctggcgatcgtatccccgccgacggcgttgtggtcagcgggcattccggggtcgaccagtcgcttgtgaccggcgagtcgattccgatcgaaaaaacggaaggcgctaccgtcgtcggcggctccatcaacggcacggggacgctgctggtgaggatcacggcgctcggcgaaggcagttttctcagtcaagtgatccggcaggtcgaggacgcgcgagcgctcaaacctggcatcctgcatctcgtcgaccgggtgctgcgcgtctatacgcccacggttctcgtggtagcggcgctcgcggtgatcggctggcttgtgggctcctcgctgagcagcggccagcctgacatcgagcgggcggtcttcgccggtctgagcgtgctggtgatgggctatccctgcgcggtcggcatttccgccccgctctcgatcgtgcgcggcgcgggccaggctgcggaacgcggcatcctgatgcgcacaggcgaagcgtttcagggcttccgtctcgtggagcagatcgtcctcgacaagactggcacattgacggaaggacgcccggtcgtgcgggagatcatgccccttggcacgaccgaatccgagctgctcgccctggcggctgctgccgaagcctcttcagagcatccgctagcgcaggcgatcgtaacggctgcttttgagcggggcgtgacgcccccggacgttgaaagcttcgaggccttgccgggtaaaggcatcaccgcccgaatcagcggtcgcgaggttgtggtgggcaacccgctttttctagcggggcagaccatcgacctcagaccggtcactgtaaaggtcgaggctcttgagacgaacgggctgacggttattggcgtagcgcgagacgggcgcgccttgggcatcattgcgctcggtgacacgctccgaaccgatgccgccgaggcagtccgcaacctgcatcgtgcgggcctcaggaccgcgctcgtgaccggcgacaatgagcgcgcggctcaatgggtcgctcgtgaggtcggcatcgacgaagtccatgccggcatattgccgcaggacaaggccgcgatcgtgcgcgggcttcaagccgcaggccgggtcgcgatggtcggcgacggcattaacgatgctccggcgctcatgcaggccgacgtcggcatcgccatgggcggcggaaccgacatcgcaatcgagtcggccgacatcatcatcctgtctaatcgcttgaatgcgctcccggaggcccgcgagatcagcagccgcagttaccgcaagatggtccagaacgtcacgctcgcgttcctgttcaatggcattgggatcccgatcgcggcgaccggactgatctaccccgtgtgggccatggtggcgatggcggtcagcgtcacggcgatcttcttcaattcgctttggggaacgccgcgcctgttcttcgatgcaatccgcagcgtcggtcagccgatcgtgaacgctccggcacgccaatcggcctaaagccgcgcccgacgggcttgaccctggagtatactccagggttcagaaacggcctccagagagacacggcatgatcacgatcggcaaattggctggcctgaccagcgtcagcaacgacacccttcgctattacgagcaggaaggcctgatcagcccggcggggaaaagtcctgcgggctaccggctgtacgaccgcgattccgcccggcgcatccactttatcaaacatgcccagcagtgcggcttcacgctggccgagatccgcgatcttctcgagttgcgcagccgtgacaaggcctgttgtggggacgttcgcgcacgagccatcgagaagaagctgcagatcgaaagcaagatccgggcgatgaaagcgatgtccaaggcgctcgatcaattgattgccgagtgcgcaaaggaagaacaacccgtccaggagtgcacgatcatcgccgcactggagcgggccaacggttctaagaaggtgcaatgagctatgaaggtggagatgttctatagccccggctgcgccgcctgcgaggatcggcaggccgagcttcgcgcggcggcacgggacactgtgagcggcgtcgaatggtgtgacgtcaatgtgctcgagaacatggatgccgccgtcgccttgggagtgatcacgctgccatcaatcgtgatcgacggcgaggtagcctttacctccctgccgaccaaagcccagctttgcaaagagctcatcgagcgaagaggatcgaggaagtgatggacgcagaatcattgcggacagctgtggaacatgccggcttcgcggcggccggggtggctttcgctgccgggttcttgttcagcttcaatcccgttgcgctggcttccattcccgtctcacttgcatacgtgaccaagggccgggacaagcgccaagcttttgtcttcggatcgctgttcatccttggcatggtcgtgacccatgtctttctcggcttcgtggccggcctgggaggaaagtgggccgccgacctcaccggaagggaatggggtctcgttctggggcctctcttgattgtgctcggcctcatgtgggctggttggctccgcattccgctgccttcgttcggcttccgggcgacccgtccgactgccgcatggggcgcctttcttctcgggatcccgttcgcgctcgccgtttgtccggcatgcactcccgcgctggtcgtgctgcttggagttacagccggggtcggctcggccgtgctaggcagcgtcctgctattggcgttcgctgttggccgagctatccccatcgcgcttggcgcgttcgccgtaggctggcttgaaaacctgaagatcctttcgcgatatcgacgcggcttcgaaattgccggcggggtcacgctaatcgtgatgggactctacatgctgaacgcggtttacgtctggataccggaactagcggtatgagccgataatggccgttgagtcgtctatgtgacgccaagtgcaatgccgagcaaaaattctagcttgcttcttcgcgcgacttctccagccagtttcgcgttgcgagcgtgtgccctggctatgatctagcagtgcgcacgcggccgatccattgcctatccctcgatctgcatgctcttcgttggccttgctgcaggagctgaggccggcaccgttgctggtgaaacgacgttagcgccgcgttacatgaccctttgcgtggctcttgccgggcggcaggtacgcgagcgcggccaggctgtgtgccggcgcgcgcacgactgcatgccggatacctgcattcggatacatcgctgcgaatgcacccggctcctgttgggcgaactgcgaggactgtgcgaataccggcgttgccgccatcatcaacagaatggtcgccgcactgagaattgtgagtttgggcatggctcttctccatgcatcgatcagtggcgaaaattcgcaaatcctcgaagaacagctcgggcaggtccgtccgatcggtgatgacgcgcggactctcatgtctgcgctcctcaacgctcaagaagctctaagcgagagtgggtcgagaaccgtttgaagtgcgtgatgcacttctattgatcagttcggagcggcttctgcaaaggttacgctcctcgcggcgatgtgaagccgcttacctacgcaatagacacggcgcacttggctaaaccatacaacggtacgggcgtcgacgcccagcctcatcgctagccttcaattgcctgggccagccattgtccgcttgtgaattgggctgtcaggcctgaaggcgtagaatgcaaacgcaaacgtgacgtcgtagggaatgtcggagaagcggccaccctcgtgccgctgcacgattacgttgccgacgtcgcggccacccgcgacggtctccttgtctagggcagaggtttgtccggcctcccacttcagaacgatatcgccggcttcgatcgtgccgcgctctctcagcagcgaaagcgaccaggcctcgcgatgccccggcctggtttcgacggcgatgacgcgttccatcggatcgatgcgtcgggcaacgagccgtcatagaggaacggcttttggccgtttgcgtcgtatccaacatagggattcctgccgtagttgcgcgcgcggggatcgtttgggatcagcacttgcccattggggaaacgctggcgaaaacgactgaaggcttctacacgcgacgcaatcaaacgaaggtgttttccgctcaagacgcccacaattgcatcgcccgcgaattgttgccaccagctctcggtctgacggtcgtacatcacaagatccgagtttcggagttttcctgttgtgccgaaatcgaggacgcgattctccagcgcgcggtcaaaaacgagcgaggcgttgcagagcgggcaataggtcacggcgaccggcgtgccgccgatgagatcgttcacgatttcgtgccagatcagaacgctcagcggataggctcgcgcatcgtcgcggatagcaagcgaaatcaccggctcggtgtccacaatgcgcgcggcccacccggatgcggcaccattgctaagccgctcgaaacggggggcatcgatcggcggaataccgtccttcggtggcccgcccgacttgatctcttgcagaggaacagtgtgtcgcgaaaaatcagtgcgaggccactcagcccgccagcttgctggctcggccatggatctgttcgctgtagcaaacgaggccgcaagcgtcgccaccgccagcacggcgtaagtatggaaacctgatgacacgccgccaaggactctcatggtttagccgagcgcgccgcaacctcgtcaccaaaatgttcgctcgatcccctgaggaggttaccgggtgccctgacctcttccgtcgtgaaaggtcaggtcaggtgtgaccggtcggttgctcagctggccgaggtgatcgttgcctgttgaaatcaacggctcgcccgttcccggaataacgtctccatcagggggcattccggttgggtaccattgccgcattgcgcaataacgtctttcaacacccgctccatccgcctcaggtcggcgagcttggcccgcacgtcattaagatgtgccgcggcgacagcgcggacatcggcgcagggctggtcgcgctcgtcggcaagatgcaacagctcacggatttcatcgagggcgaaccctagttcgcgcgcccgcaaaatgaaccgcacgcgacgttcgtgcgtcgcgtcgtagctccgatacccggcgggcgtacgcggcggcgccggcagaaggcccaccttctcgtaatagcgaaccgtctcaaggttgcagccggttctttgagcgagttccgcccgctgcatactcttcaccctggtgtgatcgcgcattggaccaagcccgttgaccctgtagtcgctacagggcggatgcttacgccgttcccgaagctttgccaagcaaagaggtagaaatggttccttcacgagctggaacaaaagaggctgtgccgactgcatctggcagagtggagcacgaattgggacggcagcgtcttgtagcattcggcgggataatcggcgcgttggccgcctcctcctgctgcatcgtgccgctcgtcctgttcagcctgggcattggcggcgcctggatcagcaggctgacggtgcttgctccctataagccactgttcatcgcagcaacagccggcatgctcgggtacggcttctacgtggtttactggaaatccggccaggcctgcgcggacggcacggcctgcacgcgcccggtatccacccgcatcgtccgtttgtcgctctggatggcgacgctcatcgtcttggccgcctttggcttcgactatgtcgccccattattgctcggcacctgatagaaggaaaggagctttcccatgaagagaagctcatccgttattgcgttgatcgccttggtcatgtcggccacggccgccgttgccggcgagcgaacggtcacgttcgccgttgacaatatggcctgcgcctcttgcccctacatcgcgaagaaatcgatggccgcggttcgcggcgtcgccaatgtcacggtgtcgttcgaagccaaaaccgcaaccgtgactttcgacgatgtgcagacaactccggaagcgatcgcggccgcaagctcgaatgcggggtatccggcgcatctaaagcaaggcagctgagctgccttgggcggatttcggaggatggggcgaactcatgagcgaatgctgcaaatctgcttcggttcgggatcaagaaacgctttccggtcctgccacactgccgcagttctcactgcgacccggcgtgacatttcccgattggtcgctggttacgtcgcaggcagccagagatgcgctgctggccatcaaggatgttcttcaagtcatggcgggatcgaagaacgcgcttgatgattggagcgagagcgatcgcctgatcgaccgtatccgcgtgatactgatccagttctacatggagcagcgccgggctcccatggtgtgcgagctcgcggagcgcgcggcgctaagcgagtcaaccgtccgccggctgcttgaacagcttcgtgagcgcgatctggttgtgctcgagaacgggaaaatcgtcggcgcgtacccattcactgaccggaacaccggccatcatgtcaccctaagcagtggcaccattaacgcgatgtgtgcgattgacgcgctcggcgttggcgcgatgacgaggcgcgatgtcaccgtcgcttcaagctgcagttattgcagtgcgccgatccggatcacgacgcgcggtctcggacgggagctcgcccgtgtcgacccagagatagccgtcgtgtggcaaagcgtccggtatcacggcgcatgtgcggcggagtctctgtgccgcgacacctcgttcttctgttccgtggaccacctcgcgaagtggcggcgtgagcgctgcgccgacgagcccggaattcagcttcggatggacgaagcgttacagatggcgcgagcactgtttgatccgattctcgccaatctcgatgctgaatccagcgccgaccgcgaaagcgtatcgcgcgacaagccgcattcgatcccaccgttctcgaaagccgctcccgaaacgcatcgctatgaccgccccctggggcgcatcgacggcggctatgatctcgtcgcggtcggcgccggttcggccggattttcagccgcgatcaccgccgccgaacagggcgcacgcgttgctcttgtcggtagcggaacgatcggcggcacctgtgtcaatgtgggctgcgtcccgtcgaagacactgatccgtgcggcggagcagctacacaatacacgcgcggccgcccgctttgccgggatcagtgcacaagccgccgtgatcgattggcgggcaacggttcaccagaaggacacgctcgtcgccgaattgcgtcaggccaaatacgtggacctgcttccggcttaccccaacatcgactttcgccagggtcgggcacgcctcgtggaggatggggtggaggtcgacggaatgcatcttcctgccagcaagatcatcattgcaaccggcgcgcgtccggcgatccccgcaatctccggccttgaggccgtgccatacctgaccagtacgacggcactcgatctcgaaagcttgccgcgctcgctgctcgtggtcggcggcggttatgtcggggccgagctcgcccagatgttcgcgcgtgccggcgtgaaagtgacactggtgtgccgatcccacctgctcccggaagcagagcccgagataggcgctgcgctctcgcgctatttcgaggttgagggaattagcgtgatcgccggcgtcggttaccgcgagatccggaacatcggagaaggcatttctctcaaggccacgcgcgacgggcgagacatgacaattgaagccgaccaggtgctgattgcgaccggtcgcacccccaatatcgaagggctcgggttgcctgagtgcgggatcgctaccgccccaaagggaggaatcgccgttgatgagcacatgcgcacgacccgggccggcgtctacgccgccggtgacgtgactggtcgcgaccagttcgtctacatggccgcctatggcgccaggcttgctgcaatcaatgctctaagaggcgatcgcctgagctacgacagtcgcgcgatgccggccatcgtgttcaccgacccgcaggtggcaagcgttggtctcaccgaaaaagcggcgcgtgatgcagggtacgatgtgcgcgttgccacgatcggtcttgaccaggtgccgcgcgcactggccgcccgcgacacccgcgggctattcaagttggtatcggatgcaaggaccgaccgactaataggcgcacatatcctggcgccggagggcgccgacagcattcagaccgctacgctggcaatccgccagggtctcaccgtcgcagatctcgttgacaccatctttccttacctgacgaccgtcgaaggtctcaaactggcagcgctgtcgttcaccaaggaagtttccaaattgtcttgctgcgccacgtaacgccgaaggaattcgttcgagtcgtccggaagaacgtctgtataccttacccatacccaacgggttccaatcccggcctcgagattgcgatccattctcgacgatgtgtttcccggccgacgtaacctttcttgtccgttgacgaattttaggaataggcgggccagcttggcgcgccgcaatagcgactgcgcgcggtcgcacaccaactcgcattcggaggaatggatatgtccaatcgcaccctatccgcactcgtcgccggagcctttgccgcagccgtaggatcgctcgcggcaacgcccgcgcccgcggccgatccaaaaatggaaaagatgatgaaggatgccgatgcgtcaattaaggccggcaagatggagaagtgctacggcgtcgcgctcaaagctcagaacgactgtgcagcaggggcgggcaccacctgcgccgcgaccggcacggtggattatcagggcaacgcgttcaagctcgtagccaagggcacgtgcacgaccatgcagacgccaaagggcccagggagcctgacgccgaaggcttgatcgcaggtcaaatcgggaaggctgcacagccgcctgcccgcatctccctttgtccggaggttaccgtgctgctttcatcttctcccgcaaaggaccgcattccgccgcgcggaggcgtgggactcaaggccgagcactgccgcacgatcgtcgagacctggccggacatcggcttcttcgaggttcatgcagaaaattacatgggggcgggcggcccgccgcaccgctatttgtctgctattcgggaacactatccgctctcgctccacggtgtcggattgtcgatcggtgccgatcgaccgcttgataaggaccaccttcaacgcctcaagcaactcatcgaacgttacgaaccaggcctgttctcagagcatctggcctggtcatcccatgatgtcgggtttttcaacgatttgctgcctgtgccgtacaccgccgagacgctcgcgcgcgtcgtcgaacatgtcgaacaggtgcaggactgccttggacggcagatgctgctggagaatccatcgacgtatatcgcctttgccgaaagcacctactctgaaatcgacttcatcgccgaggtggtccggcgcactggctgcggcctgctgctcgacgtcaacaacgtctacgtcgcctcgaccaaccagcaatgggatccgtacgcctatgtcgacgcgtatccgctcacgcagattcgggaaattcacctcgccggccacacaaaagacgccgacggcaagggccggccactcctgattgacacccataatcgccctgtcgacgagatcgtgtgggatctctatgaccatacggtccggcttacgggtccccttcccacgttgatcgaatgggacgcggacgtgccggcttggcccgtgctccagcaagaggccgagcgcgccgaggcgatcatgctcgcaaccaaatcggaggccgtgcgtcgtgcggcagctcgctgagagacaacgcgatttcgcggcggctctgctggatccagggcttccgacgccccatggtcttgtcgatccagacggtgaaccggatccgaagcggttcgccatctatcgcaacaatgtcgtggtcagcctgatcgaggcgctggcagacgcattcccggctgtgcaccgcatagtcggcgccgagttctttcgcgccatggcacgagtgtatgtcagggtccagccgccgcgctcgccaatcatgctggattatggcgcaggattgccggatttcatccggagcttcgagccggctgccgtgctgccctacctggaagacgttgcacgcatcgagcgcgcctggacggaggcttatcacgcgcccgaggcttcgccgatcgaccccagtgtgttcaacgccgtcgcccccgaccagctgcccgcgatccagcttgagcgtcacccttcgcttcgcgtggtccgctcgcaatttccggcgctgacgatctggcagatgaacgttgccgacggcgtcccggctccggtcgatctggccgccggcggcgaggatgcgctgatcgttcgccccgcggccgtcgttgaggttcgcctgatccccaagggcagcctggaattcatccgggcactgagcggcggaagacccgtgctcgccgcactgggggcagcgttgatcgcaaatccccgcttcgatctctcggcaaacctctccgatcttatgcgcgcgggcgccatcgtcagctacagccttgcgcaagagaacccaacatgatcccgcacgcgaccatcgcaacgatcgagaacgccgtccgcgagcttgcggactggctcgctcgcgccgctcaggtggcggctccgccgatgctgaggatcgcactcgccgtgcccttcttcaaatccggattgacaaagtgggacggatttctctcgctttcaccggctgccgagtttctgttcgaggacgaattcaagctgcatattcttggccaggcttacgacttgcccttcccgactgcagtcgcctacctcgacggtcgcagagatcgtgctgcccgttctgcttgttatcggtcttgcgacccgcttttcggcgctggctctcctggtcatgaccggagtgatccagctcgtggtgccagaggggtgggcgaattttcaccttccctgggcgggcctggcgctggccattattgcgctcggccccggagcgctctccctcgaccatttgcttgagcggctgcctcgacc

SEQ ID NO: 271 - DNA, 16449 bp, Bradyrhizobium colbertium
  misc_feature (3654)..(3663): n is a, c, g, or t
  misc_feature (15661)..(15670): n is a, c, g, or t
gcctgcgggtcgaccgtggcctgctgcggagcctgctcgctcttcttggccttcttgggcttgctctggcccgtgttgtcgtagaccccgggaatctgcaccgtgccgcgctccgggtcgatgcggatggtgcgcccgccatattcgaaggtgtactgcgcctgcgcggcggtgcttgccaaaaggaatgcggccgtggccaacagcttcctcatttccgtctcctgaaccggtggtccccgcaccgacgcttacgcgccggtccgatcgcagaaagtgatccagatcactgtcgtccgtatgagtcgtgcttcgcaggttcccggttcaataggcccgaagccggcccaaagtttggcaaggcaagcgacaggaggacgcggcctcaggcggcgttcaacttatagggcctccactgctgatggcgtcggcagacatcgctttagtcgggccaagccgtgtagatctttggcgttgccgtcttccatcgacatgttgagctggcattgtgcaactgttcgacggcggaatttgaccagacgccgaagataggggaattctggcatgacgatctcgatctacgaggcctcggtgggcctgttcgtgccgtacctgcacaacctgtcggttctgctcgacaagggtgtcgcgtatgccgagacccggaagttcgaccccacggttctgctcggcatgcgccttgcgccgaacatgtacgatctggcgcagcagatcggcgaggcctgccgccacgctacggttgcgccagccttgctggccgaacgcgagccggtcacgttgcccgtgctcgagcacgatatggccggccttcaggcgcgcatcgcgacgtcggttgagttcatccaaagcctgccgcgcgcgaagatcgatggggcggcggaacgggatgttgtcttcaggctgaagaacggcagcgagctgcccttcaccgggcgaacgctgctgctgacgttcagcctcccacagttcttctttcacgtgacgacggcttacgacatcttgcggcacgccggcgtcgagctggtgaagaaggactatcttgggaggaagtagttggtggctcgcacacctctgttttcgggagaggtgtgcaaagtgagcgggccgaaaatggccttacgcttcgcccttgcgctcgtaatctgcaagcgagctgcggccggcgatctcgctgcgcagcaactcgaagcgcttgttcgcctcgtcctgctgcccatcgacgaagcggaccgcggcctcgctcgtcatggggccgctgaccacgggggcggattgttcgccgatggtctcgtggacatagtactggccgtcatcgccacgatggaccgtccacttgagacggatcgctaccatgggccccggaccgaccttgctgtagccgtcggcatccgtatgctcgggcgccagcggctgctcctcgaccaccggatgctcgtcgagaacattatgctcttcgacggacggctgctcgcccacgaggacgatttcagtctctcgaataatctcggtttcccggacaacgagcgccggctcgggattttccagaatgctcgcgatggtcgcaagcgcatggtcggtcgggtcgatctctgacaagcgtcatcctccagctcgacgcgggcggccagtctgtcccgctgccgccgcggcaagatgcattacgcgcgtttgattaaggctgagttggggctcgatctgcaccaaaatgggacgctttctggccatccacatccaggtgcgtcctgaattccgctcagcccagcacgtcctggttgatcacgttctgccggatggggtcgccgtccagaacactcaggatgttgcgtgcggtctgttcgctcatgcgctcgacggcttcgaccgtgacgccggcgacgtgtggagcgatgatgacgttgggcaacgcgaacagcgcgttgccgaccggcggtggctccacctcgaagacgtcgatccccgcgccggcgagcctgccggacgtgagcgcgtcgtacagtgcggactccttcacgatgccgccgcgcgcggtattgatgaggtaggctttgggcttcatccggccgatccgcgccgcgtcgaacaggccgacggtctccggtgtcttggggcagtggatggtgacgaagtcggcgcccggcagcgcggcgtccaggtcagtgacgggctcgcagccggctgccttgatctcggcggcttccttgtagggatcgtagacctggacgttcatttcgaatgccaggcagcgcttggcggtgcggctgccgatgcggccgaaaccgacgatcagcacggtcttgccgtaaaggtcgaacggcagcatgccgagccggtcggcccatttgccgtccttgacgcaggcgtgcaattcctgcgcgcgcttggccagcgtcagcatcatgaacagcgcggcttcggcgaccgagggcgagttcgcgctgccggcgaccatcagcggcaccttgcggcgggagagagcgggcacgtcgacggcgtcgtagccgacgccgatgcgggtcaccaccttcatgtctttcgacgcttcgagttcggtctcgccgaaagcggttgcacccagcgccacgccgtggacgggggcgtggctcttcagcagggcctcgaagtcctttgcggagatcaggttcggaaactcgacgagctcgatatcgtcccgctgggtgaggagggcgcgtgcccctcgcgacaaagtttgtgtaacgaaaatcttcttcttgttggtcgccatcgctcccctgcctgcccagcgtttctcaaggcggcgtcacaacacgacgccggtctcttcgtttagcaggtgcatgttgttgaggtccatcgccaaacgcatgggtcccccgtccttggcgccggcattgggattgacgcggccgcagaccggcgtgccttcgaggccgaaatagaccagcgtctccattcccatcggctcggtgacgtcgagcaccgtgtcgaaggtctcgacgccgggctcgagatgcgcgtgcgactcggtcagatgctcggggcgcaggccgagcagcagcttttcggtgcgcggcagcgcgttgtagcgggccgcacgggcgggcggcagcgggaaggcaaggcggtcggtgaggcggatctggagcgtgccgccgacatcctcgagccggcacgggatgaagttcatcgccggcgagccgatgaagccagcgacgaagcgcgtcgccggcttgtggtagagctcgttcggcgtgccgatctgctcgatccgtcccttgttcatcaccacgacgcggtcggccagcgtcatcgcctcgacctgatcgtgggtgacgtagaccgtggtggtccgcaccttctggtgcaccttcttgatctcgatccgcatctgcacgcggagtttcgcgtcgagattggacagcggctcgtcgaacaggaagaccttcggattgcgcacgatggcccggcccatcgcgacacgctggcgctggccgccggagagctgcttcggcttgcggtcgataagatcggtgatgtcgaggaggcgggcggcctcggtcacccgcgccttgatctcggccttgggataatgcttcaggcgcaggccgaacgacatgttctccgcgaccgtcatgtgcggatagagcgcgtagnnnnnnnnnnggcgatgtcgcggtccttcggcggtacgtcgttgacgacgtcgccgccgatcatgatgtcgccgtcgctgatgtcctcgaggcctgcgatcatgcgcagcgtggtcgacttgccgcagcccgaggggccgaccagcacgatgaactcgtgatcggcgatgtcgaggtcgatgccgcgcacggcctcgacatcatcgtaacgcttgaccactttccgcaaagcaacctcagccatgagccatcaaccctttgtcgcgccggcggtcaggccggcaatgtagtagtccatcaggaaggcgtagatgatcagcggcggcgcggcgcccagcagcgcgccggtcatgatctgcccccagttgaacacgtcgcccttgatcaacgtggtggtgatgccgaccggcagcacgagttgatcaaccgacgtcgtgaacaccagcggatagaggaactgcgcccaggacaccgtgaacgcgaagatggtcgcggcgatcagcccgggcagcgcgacggggatgaagatccgcgtcagggtctgcagccaggaggcgccgtcgatgagggcggcctcatccagctccttcgggatcgaggcgaaatagccgatcatgatccaggtgcagaacggcacggtcagcgtcggatagatgaacagcagcacgtaccatcggttgagcagcgtgatcccggtcagatcctggaccaccgccagcatcttgaagagcggaatgaacagcaggctgtcgggaaccaggtaggtgaggaacacgccggtcgcgagcgtcgtcgagccccagaacttcattcgcgccagtgcgaacgccgccggaatgctgatcagcatggtgacgatcacgaccacgatggacacgatggcggaattccagaagaagcgcagaaactggttcgaggtcagaagctcgacatagttcgccagggtcggatgaaacacccaccagggattggtcgccgccgaaatctccgcgctgctcttgagagaggtaatcagcatgtagatcggcggagtgagcgagaagatcgcgaacaccaccaggaagaagtaggaccagcgcagcgcccaggcgcggtcccggctcatgctccggtacttgatcttgcgcgtggggccgcctttgtcgattgcgagcgtgctcatcaggcttcgttcccacgtttgctgacatcgcgcagtatgaagatcgccgcgactgcgaggatcggcaccatgaacagcgagacgcaggcgccgagcggaatgtcgctgctctggattccgacctggaatgcccatgtggcgaagatatgggtggaatccagcgggccgcccgaggtcaggatgcgcacgatgtcgaaattggcgaaggtcacgatcagcgagaacagcgtcgtgatggcgatgatgttgcgcatcatcggcaatgtcacgtaccagatccgctgccaccaattggcgccgtcgatggcggccgcctcatagagctggtccggcacggatttcagcgccgcgagatacatgatcatgaagaaaggtgcgccataccagacgttgacgagaatgacggagaagcgcgcccagaaggtgtcgccgagccaggggaccgggccgacgccgaagaatgaaagcgtatagttgaaggcgctgtaggaaggatcgaacagccatagccacgccagcgtgctcatcgccggcgggatcacccacgggaccagcagcatgccgcgccatttgcgctggcccttggccggaaggttgtgcacgaaatgagcgacgatgaagccgagcaacgccttgaagaaaacggcggtgatggcgaagatgcaggactgcctcaccaccatccagaacgtgtcgcgcttgaacaggaaggtgaagttggcgaagccgacgaatttctgcatcgacttgttcagcgtcgcaaggtgcatggagtagaaggcaggatagagcacgagcaacgcgatcagcaaaatcagcggcagcgtcaggaagaacgccatcgtcgacttccgcctgagggcattgcgcaggctggtgcgtttgcgcgggctcgcagcgtggacggagcgaccttgctcaacgacgacatcggccatggtcagactttctcgcggatttcaaaggggaagccggccggatcggtcggcttccctcgacaatgtgatgatgggacgagcggatcgtcggcggctcactcgtgagcgcgtgaaccgccatgagcacccggcatcagctccgcatgaagccttcgcactcgccctcggcccaggcgagcgcctggtccatcgtctcgcccctggcataacgcagcgccagcttggtcagcgtcgcctgggagtagatctgctgtgcgatctttggcggagcgggcgatgccgcgatcgacatcgtctggctgccgtgcggatcgggatagtggtagagcgtgccctttggcggcccttcctcggcccaggtcttgagcttcgtcaggtttgcgaaggccggcaggtcatagccgccgctcgctgcaacgaatttttcgatcgaggacggctgcgagaggtgggcgagcaggctcttggccgccggcttgttcttgccgaaggcccatacgccccagaaatacggcaggaagggcgcgaagcggcccttcggaccggccggcatgctgtgggtccagcattgctctgcaatctgcggggcatcgcgcttggccactgcccaggcgctcggcggattcaggatcagcgcaccacggcccgagatcagccatttgttgttggacgcatcgtcccaggacgctgcgtcaggcggcaggacggcaatcaacttcttgtagaactcgagcgcctgccggaccgcgtccgtcttcaccgtgacatcgcccttggcattgacgagctcggcgccgaacgactggaagatcgcgccggccgtgtcgacgctgtcggtggtctcgccaagcccgatgccgaacgcaacgccggccttctgacaggcctccgccgccttcaggaaagtatccatcgtccaattgtcggccttgggcgcgctgccggccggatacatcgcctgaacgtcgatgccggcatgcttcttcatcaggtcgatgcgggagcagggccccttgatctggctgccgacggtcgcgggcacggcaagccatttgccgccgccctggcccagatacttgacggtgccgttgacgtcgccgttctgcttgatgatcggctccatgatgtcgttgaccggctcaagctggtcggcgtaggcgtgcggccaccaggtcggcatctggagaatgtcgtgaccggatttcgcttgtgcttcggcggcgaccgtcagttcgagcttcttgttgttgctggtgatgtagtcgatcgagacttcgaccttctccttcgccgcccattcgttgacgaggtcggtcgaggccttgttggcgcctggcacccaatggtcccagaagccgatggagagcttgccggcggcataagcgccccggacatagggcgcggtgatcagcgccgcggaggacattgcagtggcagccacaaattgacgtcgcgtcagtgtcttgcgtgacatctcgtttcctcgcttgggtgttgttgttggagtttcctctagagacttctttattgatttatcgagtgtttcttgttggcgtttcttattggggccgtcggctcgcacgagcaattcacgcaagccgcagcaaattggtagcgcgatcagatcatgattgatcgcatctgtcgagaaagccgaacggctccgcggctaaaactaacgttgtgtccggaaaaggcgtgacgcatcgaggcggcacgctgcaggcgaagggcgttcgctgtttttgcgacgcacacgtcgcggcaagccgcctggaacggtccgtgcgcatttacgccgcagtttccaataaccgtgcgtaaccgcttcgcgtgaaagacttttcgggcgtggacaacaatggctgcgtctggaccgcgaagcggctgaaacgatacaattgcagccggcggttattcccgcccgatggaccgtcgattcgataatggagacgaggatgatcaacccggcgcacacagcgctgcttcacctgcggcgatggttcgcgctcgggaccgtgctcgcgctgctgctcggcgccgccgcgccggcaaacgctcaaggcttggtcaaaggcgttcaggaaggcgcggaagccgggaacaaggctgccggtccggtcggcggcgtgctcggcggtgcgatcggcggcgtggttggcgtcttcaccggcgtgctcggtgtcggcggcaacaatcagccgccagcccccaaggagtctggcaaagacgccaagcagcagggggtggccaaggacaaggatgccaagagcgccaagacgggtaagaacgccaaggcgagcaaggaggcgaagaacgcgccccgggacaagagcagcaaggagaacaagggtgtcacggttctcacccagcccggcgcaccccagcagagcgcggaacaaatcgtcgccaacagcgacgcctatatcgagcggatcaagtccgagctgaacctcacgccggatcaggagaagcactggtacggcttctccagcgcgatgcactacctcgggcacaatggtgcagagcggctcaaccttcggattgcgcgcgccaagcgggatccgcctgacgacatcatcgagcagatgcgcaacgaggcccagttcctgatcgatcgagccgccgaccagcgcaacgttgccgacgccgccgagccgctctactcgagcctcgacgacaagcagaagcaggtcttcattcaggagatggtgcgcctcagtcatgagcgcggattggattgatcaagttggatcggttcgggcgcgcctgaattaacggcgtccgccacgaattcgtgtatccacaccgcagttcggttatgcttagcttcgcaaggttgattgcggggttgaaatggcggacggactctccgttttcctcgtcgaagacgaggcgttgatccggatgatgattgccgacatggtggaggaactcggccaccacgtcgtcgcggaggcggacaatgtgcgggacgccagcgcgtttgccatgaccgcgcaatacgacctcgccatcctcgacatcaatctcatgggtgtctacgtcgatcccgtcgccgacctgatcgaacgccgcgggaagccctttctgttcgcgacaggctacggtccggaattgctgccatccttgctcagacgcaggcccatcctgcgcaagccgatcgcaatggatcagctcaaggcgatgattgattcgatgttccccgagcggccagccacaaacccgaactgacaggtgacggcgggagagttgttcaaccgctcagtcgcgcccgtttctcagcacccttgcgatcgtgtgggccgtcatggccgcgcggtccgaagcgcgctgggccgccagccgctcgcgcgcccgttccgcgatcaggagttcgatcagcgccagccgcttgtcttcgttgtccgcctcgcttagcaggcggtggtagcggtgatagtcgaaacccagatcctgcttacgcatgtcacgccccccgcaaccacgccacacacggtgagattgtttcccatccgaaacgggcaagcaagtacgttccgcctggaaccaggcgcgcgccgaaaacaagttgtgtattactggaactcgcggtcgggagtgatcgtccgtcagtcagcggtgtggtcggcgaacatcttcagcccgacgaagcttgcatccggcttgatcacgagcctggtcggaatgttgcgcagataatcctggaagcgtcccttcgcttcgaaacgtgcgcggaacgccgaggccgcgaggaagtcgcgaaagcgcggcacgatcccgccggcgatatagacgccgccgcgggctccgaacgtcacggcgagattgccggccaccgagccgaggatggcgcagaacatctgcaatgtggcttggctgatgggacaacttccttccaacgcggctttggtgatggaggcggcatcgcgatgcggtacctgggcgctctcgacttccgcgagcgcttcgtacaggttctgcagcccggaacccgagagcgcgccacgttcgatggagacatggcctaggcgcttgcgcaggcaggcgatcacgcgttcctcgcgctcgttctcggccggtagcgtggcgtgccccgcctcggtgacgaccgccagccgcgcaccgtggcgttcgatcagacaggagacaccaaaaccggttccggggccggcgaccagcaaaggctctccgggcaggccatcgccgccgccaagcgggatcaggtcggcaggctgcagggcgggcagggaccaggccaccacctcgaagtcgttcagcacgtgcacgctgtccaggccgagcgcgggttgcagctcgttgccgtcgatgacccatgggctgttggtcatgacgcagcgattgttggtgacgggccccgccacggccagcaccgctctttgcggcggctcgtcgcccgaccggcgcgccaggacgtccgcgatggcttccccgacggtcgggaagtctgcaactttcacataatcgatcggtccggtctgactgccgtcattggattcggatgagctcagcgcgaagcgcgcattggtgccgccgatatcggcgagaagaatctttcctgacttgccgatgcccatcgccctgcggcttccgcggccttgcctggcctcgggaaccttcgcctccgttcctgatccgatccgcaagcgcggacggtctgagaatcctcgcttggttgttcctagtcaactcggacaggatcaaaccgtttcatcctgcatgagccttgtcgccagcgcggtctcgccgcacgcggtcagtggttgcgaagccgcgccggaaggccgacattgggagggcgtccgacgcgcgctgccggacggatcgggtggggacttgcgatgaagatttccgaccgtgacgtgttgctggtgatcgacgtgcagaacgacttctgtaccggcggggccctcgccgttcccggaggcgagaaggtcgtcccggccgtcaacaggatcgcccagaaattcgccaatgtggtgctgacccaggactggcatccgcgcgaccacatctcgttcgcgccgaatcatgagggcaagcagcccttccagaccatcgaactcgactacggcacccaggtgctatggccgccgcactgcctgcagggcacggccggggccgaattccatcgcgatctcgacgtgacgcgggcaacccttgtggtgcgcaagggctttcgccgtggcatcgattcctactcggcgctgttcgagaacgaccatcggacaccgaccggtctgctcggctatttgcgcgagcgcgacctgaagtccgtctttgtcgccgacctggcgctggatttctgcgtacgcttctcggcggaagatgcgcgtaaggcagggttggaggtagccgtcatcgaggatgcctgccgcggcatcgatctcgacggctcggtggccgcgacccacaagagttttcgggagttcgggatctctgtcgtcagcctcgaggcgttcctgtgaggatgttgagatagccatggtggagaaggccggtaaagagcagggcccggggcctgctccggaggagcccatgctgtggccgttcgcggcggcccggctcgccatggacgcctgcttctggtggatggagcgcgggccgaccgagccggcccagagcagcctgccatggacgacgccgagcacggtggcgcttgagctagcgaccatgcgcctgcgcgattgctcgcagggtcactccggccaggcggctctgatctgtgcaccctatgcgttgcatcgggccttgatcgccgacttcgcaccggggcacagcgtggtgcagtccctgcaaggtggcggcattggccgggtctatctcaccgattggcggtcggccacgcccgagatgcggtacctctcgatcgacaactatctcggcgatctcaacgttgccgtcgacgagatcggcgcgccggttgacctcatcgggctttgccagggtggatggctgtcgctgctctacgcggcgcgctttccaacgaaggtgcggcggttggtcctggtcggtgctcccgtggacgtgtcgatcgcttcctcgctttcccggctcgcccgggacgcgcccgagctggtttatgaccagctcgtcgcgcgcggcggcggcaatgtcagcggcgaggagatgctgcgcctctggtccaaggcgccgagccgcgacgatatcgtggcggccctgcagcgggatctctcggacgagcagggggcggcgctgctcgcgcggttcgaccgctggaacgcggagacgctcaatctgccgggcagatactatctcgagatcgtcaacgggatatttcgggagaaccggatcgctagcggcaatttcgttgctctcggccgcactgttgatctgaaggacgtgagggtgccggtcttcctcctggcaggcctcgatgacgatgtggtgcctgcggcgcaggcgttcgccactgccggcctcctcggcacgccgccagccttcattgccgccgcttccgagcagagcaatcatctcggcctgttcatgggcgcgcggacccacgcgcatgcctggccccggatcgctgcgtggctgcgtgatgacctgccgggcgccttggctcgcagcgcctgagctcgccgggcgcggcgaggcaggttgcgccccggcaaatccgttatgcatgagggccgatggcctgcacgggacgcggttgatgggctacatagagtccggagctgatggcttcggcaagaatgagatttaagggtactgcgctcgatgactttccactcgatctacgctcacggatttgcgcgcgtggcagcctgcgtcaccacgtcccatgtcgccgatcccacggccaacgcgaaggctgtcctggcggcggccgaggcctgccatgagcagtcggcggcggtcgcggtgttccccgagctgtgcctgtccggctatgcgatcgaggatctcgtcaagcaggacccgctgctcgatgcggtcgagcgaggactcgccagcattgttgaggcttccgttggactgatgacggtcctgatcgtcggcgcgccgttgcgctttggcaatcgcatctacaattgcgccgtcgtcattcaccgtggcaatgtcctcggagtcgtaccgaagtcttatctgccgacctaccgcgaattctacgagggccggcatttcgcttccggcgcgggcatctcgggcgagacgatcgcctttggcggcctgcatgctccgttcggcgtcgatctcttgttctcggccgaggacgtcccgggcctcaccatcggcgtcgagatctgcgaggacatgtggatcccggtgacgcccgcctccgagctcgcgctcgcgggcgccagcgtgctcatcaacctttcgggcagcccgatcacgatcggccgggcccgctcgcgcgctctcctgtgccaatcgacgtcggcgcgttgccttgcggcttacgtctatgccgccgcgggagccggggaatcgaccacggatctcgcctgggacggccagacctcgatctacgagaacggcgtgctgctggccgagggtgaacggttccgccagggcggccagatcacgctggccgacatcgacctcgacctgctcaggcaggagcgcgcgctgatgggaacgttcgacgacaatcgccggcagcgcgaggccttttaccgcaaggtgacgttcgccatgaagccgccggccgccgacatcggcttcctgcgaaagatcgagcgttttccgttcgtgccgagcgacgaaagcctgctcgagcaggattgctacgaggcctacaacatccaggtcgccggcctcgtgcagcgcatgcgcgcaaccggcaccaagcgcgtcgtgatcggcgtatccggaggcctcgattccacccacgcgctgatcgtcgcggccaaggcggtcgatctgctcggcctgccgcgcgagaacatcctggcctataccatgccgggctttgccaccggcagcgagagcaagacccgcgcgctggcgctgatgcaggcattgcacacgagctggcaggagctcgacatcaggaccaccgcgacgcagatgctgaaggacatcggccatcccttcggcaagggcgagaaggtctacgacgtcaccttcgagaacgtgcaggcgggccttcgcaccgactatctgttccggttggccaaccatcatggcggcatcgtcataggaaccggcgatctctccgagctcgcactcggctggtgcacttatggcgttggcgaccagatggcgcattacaacgtcaatgccggcgtgccgaagacgttgatccagcacctcatccgctgggtgatctcatccaggcaattcagtgacgacgtcaacaggacgctagggtcgatccttgttgccgagatatcaccggagctcgtgccggtggaggccggcgagaagccgcagagcacggaagcggccgtcgggccttacgagctgcaggatttcaacctgttctacacgctacgcttcggcatgcggccttcgaagattgccttcatggcgcagcatgcctggaaagacgttgccaagggcgaatggccgccggcattccccaacgatcgacgcagggcctatgatctgcccgaaatccgccgctggctggaagtattcctgcgccgcttcttcgcgttcagccagttcaagcgctcggccatgccgaatggacccaaggtctcggctggcggttcgctttcgccgcgcggcgactggcgcgcgccgtcggattcgagtgcgtccgcttggctcgaggatcttgaacggaacgtgccgggctgatcggctgccgatcggcaatgttggggagggaggatttgatgtcggccggggacggcgcgggtacgggtgaggaggccaaggtcacgaacggcctctacatcttcgacatcgaaatgcgggacggcaagcgcgggcaggccagaggcgtggtcgtgctctgcgacggccgcatcatgggcggcgacagctacttctgctacaccggcagctactcgttccggaacggcaaatggcgcggcgacatgatcgtcaatcagcacaccgaagccgtcggcaggatgcttgcctttggcggtcgggaggtcacctgcggcttttccggcgactatttccccggtggcgcggaagtcgaaggcatggcgctggtcggcaagaccagcgtgacgttcacggcgcggctgacgctcaaggatgcaatgtgagcgcgacctgatctgctctactcattccacggccacgttcctgctcaggaacattcgcacgaacagaacgttcgcgtttgttgttgcgatttgtcgaggagagggaccatgcgtaaacacttgatgttatcgactgcggccattgggctgatgctcgcatccggcttcgcctacgcccagtcgcccggtgaacgaagggacgagccaagacggaccgaggaaccggcgaagggcgccgcgccgcaacgcggtgcagcgcaagaacgcgttcaagagcgcgcacagggcgcccaagagcgactgcagggcgcgagccgcgaggagaagggcggcgctgccaagcaggaggcgaacgacgacaagcgccagtcacgcggtcctgccgatcgcaaccagacgaaaggcagggatcaggcacaagaatcccgcgagccttcgcgcgatcgcaaccgggaagccgagagcacgaagccgggacgcgacagcaagagcagcgccgagaccaagcaggacaagtctgcgccgcagaaatcgaccgcggagtccgagaagtccaagagcggcccttccggccagcagaacgagcgcgccgggactgcggccaaccagaacgagcgcaatcagtctcagccgccgcgcaatgccgccgagcaacagccggcgcagcagaacaaccggccggccacnnnnnnnnnngctggggcatccgggcggcgcgttgtcgtttcagtgcctcgcggcgatcagcgcgcttgcggttcgatcgtgacggtgcagtcgccctgcccctgcgtggcgaccaggatgctgccggcggcagcgtcgagagcaatcggcgcggaggtgccgccgcccggcatctgaaccgtcacgttcatcgaatccatgcgcgcggtcgagccgaccgtcgtcggctctgcctcggcgacattgccggaggcatcacgccgcatgatccgacaattcaagttgctgctcgtgttgctgcctgcagctgccacgttcgatgtgccggagccacccatctgcgcacgggctcgcgagggatcgcgcggcacctggctgacgatgcgctgcgtgcgcggctccacgatgacgatgtcctcttcggtggagaaatactcgtagccccggtattgcggctcgatcgcaatgatctctggcggaagcctatgcaatcgtacgcgtgacgggatcgtctcacccacccggatcgagacgttcagattgcgtaccggcggggccaggcgcgcgcgtctcgcggtttcggagatccgcacctgcttctcggtcgtcacctgggcctgctgattgacctgcgtgttggtctgcgtggtctgattggcttgattggtctgcgtgccggtggcggccggcgcagtctgcgcattgttggtcggtgcggtgcggttcgtgtcggtcgcggtggccggccggttgttctgctgcgccggccgccaccggcacgcagacca

SEQ ID NO: 272 - DNA, 1251 bp, Bradyrhizobium colbertium
ttttccagccccgcctttttggctgactatggcgattgttttcatattgctggcatagcagcaaaccgcattgacggcaagaacttttgcttaaatgccttattgctggcaatacagcaaatattaagccccgcccttgcccctcgctccctctcgaaagcccgtaggacggttgccgccggcgcgaacgtggcggttttgctgtgagggtgccgccccccgatccgccttatacgcggatcggaaccgccgcagggctgcgcaagcagcccgaacagcggcgaccgcttatgtttgccctcttagataaagatcagatggggattcagtctggttatcggactcacgtttcatcacactctttgccagcatcacgagggccttaccgagcgggctatcgccggtgtcgagctgcgtccgctcatcgaggggcagggtggtcttgtaggcgtcgattgcctcgctccatgcctgctgatcctgtccatgatcagcaggcgggggcggggccttgccgaacctgccgagaaactgacgggccttttccggcaaggacaggcgataggcgttgctcgtctgctggacctgtgggccgcgcccctcgttgccggtcggctcgtagcgccgcagccagtcgatgaaaccatgcgcccgcaggttcttcagcgcccgcacgatcgtatcgcgcgaccggcctagccgatccatgatcgtggtgattgacggctctaaccggccggtgcggaagtctatgagattgacgaacagccgcagcacgtcgagcgccaccgatcctagcgggccgcttcgctcgcccttctcgtgcaagccggcctcattgtagatttcggccgccttcaagattgcctgaacgtccttgcgcgtcgtcgaccgccatatccggccctccgatcggccccggatatgactatgccggcgaactggcgtcgggcatcgctcggccgggggcatgaccaggccaagcccggcctgtcccgatccccgccacgcctcgcggcgctcatgggcgagcgtggagagctgcccggcgtcttcctcggtgagctggccggcgctgtagcgcgtccatacctcccgcatgatctcatcaagcgcgcttgcgcgcgcgcagccgatcgcggccgcgatctgcgtcctcaacatgcctgtcgtccttccatttgaaggacatgacggcgcggacggcaggcacggctttccgggtgccgtccggaatgcggttggaattca

SEQ ID NO: 273 - DNA, 102363 bp, Bradyrhizobium colbertium
  misc_feature (15796)..(15805): n is a, c, g, or t
  misc_feature (78781)..(78790): n is a, c, g, or t
  misc_feature (95292)..(95301): n is a, c, g, or t
ggctcggagatgtgtataagagacaggcgtgccccgccgccccccccacccgcagccgtgggtgtcggcatcgggatcggaatcggcatgagccgcggtggctacggcggtggctatgttggtggccatggcggcccggcacgcggcgactaccgcagatactgatccgacccgccacaatatcgcaccggctcgcgctcaggcccgagccggtgcttcctgcgacagcgtcgggtggtcccgctggactgcttcccggatccagccggcctggatcgcgcgagacaggatctgcgcggtcttgagatcatcggccttcatgcagagattgacgatccggcgcacggcgtcatcgcgcatcagatcgtcggacatcttcatcgcgacttccatggcgacccgggcggcgcgttcatagcgctggcgctcgccggcctgtgccgcaatcgctgaagcggaatcgcagatggcgcgaatgcgcgcggcggcttcgatgtcgccgagcggcccttcgatcgcctcgtcccagatgtcctgtcgcatcttgcgcgccaaccagcgcattgcccgctccgtcaatgtcggagcgagcataagcggggtttgcgctgtgcgctatgcttccgggacgatcttgccggggttcagaatgttgagcggatcgagcgccttcttcagcgcccgcatcgcttcgatcgcctcggggccgagctcggccttgagatatttctgcttgccctggccgatgccgtgctcgccggtgcaggtgccgtccatggactgtgcacgctcgaccaggcgatgcatgaactcctcgccacgcgccatctcgtcggggtcgttgatgtcgcagaccagcgagcagtggaaattgccgtcgccgacatggccgacgatcggcgacagcagattgaggcgcttgagatcctcctcggtctcgccgacgcaatcggcgagccgcgagatcggcacgcagacgtcggtcgcgaccacgccgatgctgtcgccgggccgcaacgccttcacggaccaataggcgtcgtgccgcgcctgccatagcttggtacggtcctccggcttggtggtccaggagaaatcgccgccgccacactccttggcgatctcgccgaaggccttggactgctcggcgacctcgatttcgctgccgtggaattccatcagcaggagcggcgtctccggcagcgtcagcttcgaataggcgttgcaggccttcacctgcgcggcgttgagcagttcgatgcgcgccacgggaatgccggtctggatcgcaaggataacggcctggcaggcaccgtgcacggtcccgaacgacaccgcgccggcggcgatggtctcgggaatgccgcgcaggcggatggtcagctcggagatgatgccgagcgtgccctcggcgccgacgaacagatgcgtcaggtcgtagccggcggatgacttcttggcgcgcgtgccggtggtgatgatctcgccgtcgccgcgcaccaccttcagcgccagcacgctgtcgcgcatggtgccgtaacgtaccgcgttggtgccggaggctcgggtcgaggccatgccgccgagcgaggcatccgcgccgggatcaatcgggaagaacaggccctggtcgcgcagatgctcgttgagcgccttgcgggtgacgccgggctggatcacgcagtcgaggtcctcggcatgcaccgcgagcaccttgttcatgtcgcgcaagtcgatcgagatgccgccggccggcgcgttgacctggccttcgagcgaggtgccggtgccgaaggcgatgacgggcacgcggtttctggcacaaatccgcaccacgtcctggatgtcggctgtctcctgcgccatcaccacgccatccggcggctggttgggtagccatgttgtggtatggccgtgctgctcgcgcacggcctgcgaggtgatgaggcggttgccgaagcgtgcggcaagctgctccagcgcgctcgcaagggctttcggctccggccgcggcggattattggtgatgggggtgcccacggaattcctcccgacagaagaaccgtggcaaaggacataaaaccggtcaagtcaagcgaccggacgcatagctggaaggaaacatgccggacaccgccgcctcagcgcccaaagccggaccgttccgcgcctcgatcatgcaaatcgagccgcattggatcgactataatggccacctcaacatggcctattacaacgtgatgttcgaccgcgcgatcgaccagctctggctcgagctcgggatcgggcccggctacatgaaggagcgcggcggctcgaccttcaccgccgaatgccacgtgcggtacttgcgcgagatccatctcggcgatcccgtgcagatcttcgtctggctgctggaagcggacgacaagcggctgcacacgttcgaggagatgcggcacgcgagcgaaggctggctgtcggcgacctcggagaacatgtcactgcacatggacatgagcgcgcggcgcgtcgcgccgtttccgcccgatatccgcgagcgtatcgctgtggtcaccaaggcccacagcgccgtggcgcgaccggagggcatcggccggaacgtggcgatgccctcgaagcggtgacagcgtcgtgctgcctgcggttgacctctccctgcgggagaggtgaccatcgctgctatatcctgttgcggccgcgcgccaagccgaccacggccgagaccaggaacagcaccacggcgatgaagaagatgatcttggcgatctcgatcgaagcgccggcgatgccgccgaagccaaggatgccggcgatcagtgcaataaccagaaacgtcacaacccagcctagcatggtcaatccctcgtcctgatgttgtctgcgtcgacgcggcttgccgcgccacatgcccagacaatctcaaggcgggaacgattgttccgccccatccaggcgcgaaattcgcgtccttcgcgggaacaaatcggcttgtcccgcacgtggaaaacccggtttcggcaccccatatagccaccgatccctgttaagaaggctcccttccgtcaccccgcggtgccatcgtggggccaatgattcgcatgaccgagccaagcaagatcacagccgttcccgaccaccaacccgcagccggcggcatcgccgcgcgtgcgcgcgcctcggtgggcccgaaatacctctccgggctcaatccggagcagcgcgaggccgtggagacgctggacggcccggttctggtgctggccggcgccggcaccggcaagacgcgcgtgctgaccacgcgcatcgcccacatcctcagccagggccgcgcccgccccgccgagatcctgtcggtgaccttcaccaacaaggccgcccgcgagatgaagcaccggctcggccagatgctcggccatgccgtggaaggcatgccttggctcggtaccttccactccatcggcgggcgcatcctgcgcatccatgccgagctggcgcagctcaagtcgaacttcaccgtgctcgatgtcgacgaccaggtacggctgctgaagcagctgctgcaggccgagaacatcgacgacaagcgctggccggcacgcatgctggcaggcctcatcgacggctggaagaaccgcggcctgatgccctcgcaagtgccttcgggcgaagctgcgatgttcgccaacggcaaaggcggcaagctctatgcgagctaccaggagcggctgaagatcttgaacgcggccgatttcggcgatctgctgctggagaacatccgcatcttccgcgagcatcccgatatcctcaggcagtaccagcagcgcttcaaattcatcctggtggacgagtatcaggatacgaacgtcgcgcaatatctgtggctgcggctgctgtcgcaggcgccgtcctccagttcgtcattgccgggcttgacccggcaatccatcgcttcgtcacaagatggatcaccgggtctcgacgctgcgcgtcggcctgatgacgagagacatgatgcgaggcttgtttccgcgagcgaaaagggccccaccaggaacatctgctgcgtcggcgacgacgaccagtcgatctatggctggcgcggcgccgaggtcgacaacatcctgcgcttcgagcacgatttccccggcgccaaggtcattcgtctggaacgcaactaccgctcgaccgggcatatcctcgccgccgcctcgcatctgatcgcacacaacgaaggccggctgggcaagacgttgcgcaccgaggaccaggacggcgagaaggtaaccgtcacgggctcctgggattcggaagaggaagcccgcggcatcggcgaggagatcgagcagctgcagcgccagggcgagaagctcaacgagatcgccattctcgtgcgcgcctcctaccagatgcgcgagttcgaagaccgcttcgtcacgctcggcctgtcctatcgcgtcatcggcggcccgcgcttctacgagcgcgccgagatccgcgacgcgctggcctatttgcgcgtcatcaattcgccggccgacgatctcgccttcgagcgcatcgtcaatacgcccaagcgcggcctcggcgacgccaccgtgcagatgctgcacgaccatgcccgcaagcgccgcattccgctgttcgaggccgcgcgcgccgtggtcgagaccgacgagctgaagccgaaggcgcgcggctccttgcgcgatctcatcgcacagttcgaccgctggcgcgcccagcgcgaggtcaccgcgcacaccgatctcgcccagatcgtgctcgacgagagcggctataccgagatgtggcagaaggaccgttcggcggatgctgcaggccggctggagaacctcaaagagctggtgcgctcgatggaggagttcgagaacctgcaaggatttctcgagcacatctcgctggtgatggaccgcgagggcggcgccgaggacgacgcggtgtcgctgatgacgctgcattcggccaagggcctcgaattcgataacgtgttcctgcccggctgggaggaaggcctgttcccgagccagcgcacgctggacgaacagggccgcgctggcctggaagaagagcgccggctcggccatgtcggcctgacccgcgcgcgccgccgcgcgaagatctattttgcgaccaaccggcgcatccacggcacctggtcgaccacgatcccctcgcgcttcctcgacgaattgccggcggccaatgtcgagatcacggaatccaagggcggctccggctggggcggcagcggcggctacggcgcctcgcgcttcgacgacatggaggcgttcggctccagctactcgacgccgggctggcagcgcgcgcaggccaatcgcaatcgcggtggcggcagaagcggcttcgaggaagagacggcgacgttctcctcggcctcgtcatccggaccggatttcggcagcttctcctcgcgccgtcgcgggccgatgaccatcgaaggcgagttggtcgccaaatccaccggcacgacctcggaatttgcgctggacgaccgcgtcttccaccagaaattcggctatggccgcgtcaccaggatcgacggcaacaagctcaccatcgccttcgacaaggccggcgagaagaaggtcgtggacagcttcgtgcagagggcgtgacggccggtatggctcagtacgttgccatcatcgaggacgcagccccggacgcggtcagcctctggtttcccgacctgcccggctgcatctccggcggcgacgacgtcgacgaggcgctggagaatgcgcccgaggcaatcgcgttctacgcgcaggagctgatcgcggaggggcgcgagcttcctccgccgcggacgctggacgagctcagggccgcccctgaatttgccgacgacctcaggaaccacacggccgtcctggtcgaatggccgcccctcccggctgcggattgaggactgttcgcctcaccgggccgactcccgacagttctcgcccgaacaggtcttgaccatcgcgaacttccccgtatcagatgcgccccatggtccggggatccgtcacactgatcgtgcttgcattggggatgccgtcgcttgcggcggcggagaccatgagctttggtgattcgatcggcaagctggcggcgagctgcggtgcagagatcatcgccaattgccgcggcgtcaacccggattcgaaccggctgaaggagtgcctgtcgcgcaaccgtgacgtcctctcgccgcaatgcgcgagcgattacctcggcgctttcgaggccattcagaagcgcgtcgccgcgcgcgtgaccgtggcgaatgcctgtcagcgcgagatcgtcaaagtctgcgggggctcgaccaaggagacaagcaagtcgattccctgcctggtctcgacgcccaagggcatcagcaacaactgcctgaaggccgttgacgacgcggggtatcgctgatgcgcgcgcccaggcacatcatgactggagcggccgttgcgctggggctcgccttgctgccgggcaccgcgggcgcgcagacgtcagcgccgacccgcgacgagatcgtgagcaagctgaaccggttcgaagaagcggccgagctcgatctgccgacgctgaagcagcaggtgatggagcgcgccaagaccaggatcaagaacgatccaggacccgtgaaccggccgctgatagcgcccgatctggccaagctgcccgccttcaatgcgcagatccagttcgacacggacacgccgatcattcagccggcttcctaccagaccgtcggccgcatcgcggacgcgctggtgcattcctcgctgctgccctacacgttcctgatcgtcggccatgtcgaatccaattcgaagacgcgcgaggccaatgcgatcctgagccagcgccgcgcagatgcaatccgcgatgtgctggtgaacacgttcaagatctcgaccaagcgactgcatccgatcggcctcggcgaggagcagcttctcgaccgggccaagccgacctcgcccgtcaacggccagttgcagatcctgacctatgccaagctgccggaggaggcgccgcgtccggctgctcctgcgcctgcggcgaaaaaacccgccaggaagcactgaacgaacgcgggcttcgctgccgacggaacctgttgaagtgctgttgatttgtagcgtgttccaggcgcgccaatgcggcttcaagcgacaaagcaccggtttgtgcaccgcccggtccagtgctatagccaatgttcgcccttcccgaccaacatgctgcatgagaccgaaatgggtggctttttccagcgccaacttgccgtctacgtcgagtatcatcgcgatccccggaacacggcgatgcatgtgatcggtattctcttgctcttcaccggcgcagtgctgccgttgacgctggtcaagtttccgctgttcggtttcgacgtcagcttggcagtgatcctggccctgccggtattgatttattggctgctgctcgacgtggcgctcgggctcggcattctggccgtctccatcgtgctgttttcggtggcgacgacgatcacggcccaagtcagcatcgcgacgatgtgggcgattttcgccgcgctggtggtgctcggcctcgccgcgcaaaccatcggccacaaggtttttgagggccgcgaggcctcgttgttcacttttccctcgcatcttttgcttggaccgatgttcgtgatggcaaaattattcattgccttgggcttccgtcgcgaccttgccgcgattctggcgcctcttccgaccaattccctttccgcccgataaccccaaaagcgaaacagcaaccttctgcatggctctcgtcctggttaccggtggcagtggcttcatcggacatcatctcgtagaagcgctccgcgcccgtgggcagcgggtgcgggttctcgatgtccgtccaccggccgccgcgaacgcggacgttgaatatgcccatgcctcggtgctggaccgcgatgcggtggatgcggcgctcgccggtgtcgatcgggtctatcacctcgccgccctgcccggcatgtgggtcgccaacaagcaggacttccacgaggtcaattgccgcggcaccgagatcgtgctcgcggcggcgatgaagcgcggcgtctcgcggttcctgcattgctcgaccgaatcgatcctgttcccttattccgacctcaagggtgttcccgccgaggaagcgctgcaggcggccgaggcaatgcccggcgcctatacgcggtcgaaggcgctcgccgagcatcatgtcgcaaaggctgcagccgcgggcttccctcttgtgatcggcacgccgaccatgccgatcggcgctgccgaccacaatctgacgccgccgactgcgatgctctggtacttcctccagaagaaggtgcagccgcatctcgacttcctggtcaatctcgtcgacgtccgcgacgtcgccatgggcctcctgctgaccatggagcgcggccgcgccggccagcgctacatcctcggcggcgactgcgtcacgctcgggagtgtcctgcggatgatgtcggcgatgagcggccgccggcagcttccggtcgtcgtgcccggaaagctcgctgagctatcagccatcatgctcgaatacatcgccgatcacgtgacccgccggccgcccaacggcaccgccgagggcgtgcgcatcgcgcttgccgcgagcgatctgtcgatcggcaaggctcgcaccgagctcggctattcgccgcgtccgatcgagccggtgttgcgcgaaaccattacccatctgctcgcccgcaacggcgagcagccctccggcgccctcaagcatcacgcgctctcctcgcgcgcgagctagagtcgccgcccaacgcaaagaaccttcatgtccttcgatttcagcaaacttctgtctgtcgcctggggtggctggaccacgacctggccgacgcaactcctcgccttgatctggcttgcctggctcgccagctggatcggcgcctcgttctggcagggccgcacgcagaagcaggtgatgacgctggagtccggccgctatcgcatcccgattctcgtcggtggcatcctgttcacgccgtggactgcggaagtgctgaacgagaagccgctctgggtgttcagcaacacggctgtctatgtcaccgcgctgatcgtgctcgccggcatctcgttcacctggtggggccggctgcatctcggcaagttctggtccaacaccatcacccacaaggaagaccatcgcgtcatcgacaccggcccctacggcatcgtgcgtcatccgatctacaccggcctgatcgcgggcatgctggcgaccggcatcgccgtcggcacggtgactgctatcctcggcgccatcctgatctcgctcggcatgtggcaaaagggccggatggaagaggtgttcctgtcgaaggaactcggtgaagatgcctatggtgcttattgccgccgcgtgccgatgatcattccgttcctgtcgccacggtaggccgaagcgcgagcctgtagcccgcacgagcaagacgacatgcgggacctgtcgtcccggagatcgcgcttcgctcatccggcgacgacgctgttggccagggaaccgcccctccccacgcccgttactccctcgacacctgtaccattcgcagagcaccgagccatgtcggacgcctacgattattttcgcgagcacgccattgccgccgtccgcaaggcgcgggcgcttccgcgtggccgggcgaagcagaagcagcgcacggtggcccgggtctaccatctgttgtccagagaagccgcgctggcccccaacatccaccacctggaagattttcgcgcggcgcggcggctggagcggcagatcggccgctgatcgcggcgacgcggcgtcgatcccatgcaaattcgatcggctgccattccccgggaataggccccggtggccggccgcgcaggttgacgtcagccccgtcagccagttggatgcgcgcgcacacgggggcctgtcatgacgttttccagcatcttcgcgcagttcgtcgctctcatcggcggcatcgcgctgcaatggcgaaagatgtcgggcactgagcccgcgccggcctggggcgagacgccggcgattcccgaggcgaagccgcaaggcgcgattccgacgttgaagatgccgaccgcgcgcggctggcgcgagggtcagaagccgactgttgcacccggcctcaaggccaatgcgttcgcgaccggtctcgaccatccgcgctggatcgaagtgctgcccaatggcgatgtgctgatcgcggaagcaacgcagatcgcaggtcccccgcgcacggtgtttcactttgcgatgcaggcgaccatgcggcgtgccgcggcgcttggcgtttccgctaaccgcatcacgctgctgcgcgacaacgacggcgacggcgtcgccgaagttcgcggcgccttcatggagaacctgagccagcccttcggcatggccctggtcggtgacaccttctatgtcggcaacaccgacggcgtgatggccttcccttacgttgccgatgccgatcgcatcaccgcgccgggcaagcggctcacgacgttcaagccgggcgggcactggacgcgcagtcttctggcaagccccgacggcaagaagctctatgccggcgtcggctcgctcagcaacatcgccgagatgggcatggaggtcgaggaaggccgcgccgcggtctacgagctcgacctcgcggccggcacgcatcgcatcttcgcaagcggcctgcgcaatcccgtgggcctcgcctgggagccgaacacgggcgtgctgtggacggtcgtcaacgagcgcgacggcctcggcgacgaaaccccgccggattatctcacctcggtgcgcgacggcggcttctacggctggccctattgctattggggcaggaccgtcgacgaccgcgtgccgcaggatccggcgatggtcgccaaggcgcttcagccggactatgcgctcggcggccacaccgcttcgctcggcctgtgctggatgcccgccggcaccctgcccggcttcggagacggcatggtgatcggccagcacggctcgtggaatcgcagcaagctgtccggctacaggctggtgttcatcccattcgaaaacggcaagccgtccggccccggtcgcgacatcctgtcgggcttcctgtcgccggacgagaaggaatcctatggacgtccggtgggcgtcgcgatcggccccgacaagacgtcgctgctgatggccgacgacgtcggcaacgtgatctggcgcgtgacgggcgcgtaagccgtaagacttacgtcccgacgcagagcgtggcgcgctgcttgcgcagcagcgcgatcacggacagcgcggtgatgatcccggtcttgggattctcggacgggatgttctcgatcgacatcgagaagcgggccgaatccgcctcgacctcgatgcggtgaacgttgcgcgtcacagtcgggtcggcccagatctgcacctccgtgcgatcgggcccgacgccggcgagcgacagcgcgaccgcgacgttgagattggccggaaagcccttcgcggcctcgcgcgccgtaccctcgaacagcttcagcggctcgcgcagcttgtcgatgtcgatgttgttctcgacgatgaacggcgcgcccttcaggccgtcgatcggcttgcgcgtcaccatcttcacggaatgaatggtgccgattgcagcggcgttcaccgcatcgagcccgatcagcgcgccggtcggcacgaggatgcgcccgccattggcgcgggcgagatcgaccagatcgaaattgtcgagcagcccgccgacgctgacgacgagtgcggtcttgccccgcttcacggcgggctcgacgatctcgcgcagatgccggctcggcgcgcattcgatcacgatgtcggcggcaccgccgagctggtcgatcggcatgatctgcggcgggcgccgcaggccgccgatgaaagcgtgatgcttggcgggatcgcgtacggcgactgcggacagcgtcagtccctcgataccccgatccagagcagccgcgatcttggtgccgatcgagcccagtcctgcaatggcaactttcagttcgcccgccgctctctgtccagtcatcgcgtcccgcttcctcgctggccggcatcatagcgcaccgttttccgcataggccagcgcggccgcacgcggggagcgcgaagagctgttacttccgcgatgtcgccggagccacgggaggagccgccatcgcggcggccggctcgggcggcgtgagatggcgcgggacgatgatggtctggcccggggtcagcggcgcgttctcgggcagtgaattgctctgcgcgagcgtccacagcggcacacgattggcagcggcgatgctttccatggtgtcgccgcgccgcaccggcacccggacgccggaggcccacaattcgaccagcgtgtccgccgggaccaggtagcgcagcggcacggcatcggcctgggtctgcggcggtatgcgcggcagctgcgtcaccatctcgacgatctgacgatggatgtcgtccgacttctcgatgttgatgtggctgacgcgcgcattttccttgaggtcgtagctcgcgtaatggccgcgaaagccgggcacggcgacgacatcgccgccgccgagcacgctgtcggacaggaagatgttgatgaagcgctcgacgttgagcggcacgtcgccggtcgcatgcgcggggtcgatggcaatgacgaggctgatcgggacgttctcctcggccgccatctcggagatgacgatcgagcacagcccgcccatggagtggccgatcaagacgatcggcgccgccttttccttgtagctggcgatgacgcggttgccgatgaaccggcacaaggtgaattcatagacgtcggcggagaagccggcctgcgtcagcttctcgccgagccggtccatcccggtcgagaagatcggacccatggcaccgcggaagaggtagaccttcggcggcggcaacggctcgaacggcggaggcggcggcgcaacaggcgtggccgcggccggcttcgttctggcctgtgaggcaccggtcgcgccggtgccgagggcgagcagcccaaccgctgccagcacgaggagccgcctcaaatcaatcatcagtccagcagtcccaccacgggaggcaaaggcctcccccgtgtcttcatgaccgcggaattggcagattttgcggcgcgaaactgcccgccagctcagttcctcgccggagccgccgctgctgccgagcgcgcctgccgcggcgtgccctggtcggcgaccggggcggccggcgccgcgggcgcgcgcgagcgcatgatcgcggcatcgatctcggcgatgacgcgacgctggatcgcttcgttcttgtcgatcgagatatggccgacgccggtgccacgcacatcgacgttgtcgagcttgccgcgaaaacccgctgcggcccgcaccggctcgccgggaccatcgccgatatagatgttgatgtagcggtcggcgccggtcgagagcttggtcttgaagacggaatcgaggccgatcgcgagcttcacggggacgccgagctgattgagcttggcgatcatgtccggcagcgcggtggcacccgaggaatgcccgacgaggatgatggttttgagccggccggcccggtaggcggcggcggcttcatcggcgagcgaggaccaggagacgaagttggcgacggtcaccggaacgccccgcgcctggagccgggcaccgatggtgtcgagcccgagcgagaagatgttgagcacgccgcggagcaaatagacgtgcgtggtcgcgaccgcggcctggctcggcgccgccttggcggcggtcgggctgatggcaacagctgacagcaggagcaggcccatcgcccacatgcgaagggtggacgattggctggcgccagcggtgtgacggccgttcggactcatcgatgttttccctggagacgatacgcttcgcgattggccggaatcgtagccacggcccgctcgcagacgcaacaaagagccgcgtgaacgaccatcttagcagcacgccgtgaccatcgcgcaacacttgcccggatcatgccactgaacggcctgttttcggaccatttttctccggggaattgcggggcggcaagcgcgttcctatttcagggctccgctgatctgcccatccggacaggtccggccctcccccttccccagccattcagccttgcggccatcatgccttccatcatttccgtcgccaatctgtcgaagacctatgggtccggcttcaaggcgctcaagaacgtcaacctcgacatcaagcgtggcgagatttttgcgctgctcggccccaatggtgccggcaagaccacgctgatctcgatcatctgcggcatcgccaatccaagtgaaggccgggttctggtcggcggcgaggacatccagacctcctaccgcaaggcacgttcgctgatcggcctcgtgccgcaggaattgcacactgacgccttcgaaagcgtgtgggcgacggtgagcttctcccggggcctgttcggcaagccgaagaaccccgcccatatcgagaaggtgctgaaggatctctcgctgtgggacaagaaggacaacaagatcatcacgctctccggcggcatgaagcgccgcgtgatgatcgccaaggcactgtcgcacgagccgcagatcctgttcctggacgagcccacggccggcgtcgacgtcgagctgcgcaaaggcatgtgggaggtggtccgcggccttcagcagtccggcgtcaccatcatcctcaccacgcactacatcgaggaagccgaggagatggccgaccgcatcggcgtcatcaacaagggcgagatcgtgctggtcgaggacaagacgaccttgatgcagaagctcggcaggaagcggctgacgctgcatctgcagaacaaggtcacctcgttgcccgaaagcctcgcgcattacgagctcgagctctgcgatgagggcgccacgctggtctacgattacgacacccagggcgagcgcaccggcatcaccagcctgctcggcgatctgcgcaccgccggcatccgcttcaacgacctcgacacgacgcaatcgtcgctcgaggacatcttcgtcgacctcgtgaggacgtcatgaatcatcgcgccatccgcgccatctacctgttcgaaatggcgcgcacctggcgcacgctgctgcaaagcatcgtctcgcccgtggtctcgacctcgctctatttcgtggtgttcggcgccgccattggctcgcgcatcagccaggtcgagggcgtcagctacggcaccttcatcgtgccgggcctgatcatgctctcggtgctgacgcagagcatcgccaatgcctcgttcggcatctacttccccaaattcaccggcacgatctacgagatcctgtcggcgccgatctcctatttcgagatcgtgatcggctatgtcggcgcagccgcgaccaagtcgatcattctgggcctgatcatcctggcaacggcggggctgttcgtgccgctgcacatccaccatccggtctggatgctcgcgttcctggtgctcaccgccgtgacgttcagcctgttcggcttcatcatcggcatctgggccgacggcttcgagaaacttcagatgatcccgatgctggtggtgacgccgctgaccttcctcggcggcagcnnnnnnnnnngctcaacccggtcgtctacctgatctccggcttccgctggagcttctacgagatcgccgacgtcagcatcgccgtcagcgttggcatgacgctggcgttcctggtgatctgcctcgtcgtgatctggtggattttccgcaccgggtaccggctgaaaaactgacctgcgcccacattccggatgcgacaaagtcgtgagtccggaatgagcgcggtggactcaccgataacaatggaagcggtgatgtcggtcgtaatatccacgacagccgcggcgggaatgacggtggggaataccgagcaccccctcgactgcgccgactgcgccgccgacgcctgccccgacgacgccaccgactgcgccgcccacgggacccccaatgcgattaccctcataggcgccctcccgggcgccgcgcacgatgccctgggcatggcccgcctgcggcagcgacaacagcgcgagcacgagagcgacggctgcgaacagcaggcggacgggcgaaccggccggcagcgcggcgacatgggctttgttcatgttcattccagggtctgtgaggtgcttggcggcatgcgccggtgcagggtgaacacgatcaacgttcgacgcggtggaatggttgcggcttttgtgacgaattgtcggcgtcgtgagcgcaggcccggatcgcgaaaatgtcagcgccgccgcactctcacgccacaaggcgggcttgcttacatcaggcgtcgcgttaacgatgggcggccaggtcgctggaacgaaagccggattgcaggcatattgcacgccggcgacggagagccgcggcgcctagcgtgaacaggccggaggccaggactcgatgcgtttccagatgcgtacctttttcatcgctttctccacagtgctggttttgggcacgggcaccgcgcaggccaaggtcgagatcaccgtcgacaaggacaatcagcagatgatcgtcgcggtcgacggcgtcgcgcgttatcgctggccggtctcaaccggcgtcccctcgcgcgagacgccgaacggatcgttccgcgcctttcgtatggaagaggatcactactccaaggaattcgacgacgccccgatgccgcacgcgatcttcttcaccaaggtcgggcacgccatccatggcaccgactcggtcgggcggctcggctcgccggcctcccatggctgcgttaggctgtcgcgccagaatgcctcggcgctctatgcgctggttcagcagcagggtgtgctcaacaccacggtgacgttgacgggctcggcgcaggtggcgatggcgcgcaatccgcgtggccgcaatgccacgacaatggcccgcgcaccgcaacccgctgaagagcagtacgcaaccaccggcgatcccgtgaatctgacgccgccggcgcagcccgcgcgccgctacatgccgcaggacgataattacatctatccggcagacggcagcgacaccggcgcgcgatatccggcgccgcgctcggccggccggccgctctatgacgcgcaagtctatcagcagcagccgcgaccctattacgatcagggctacggccagcaaggttactattatcaacctcagccccggcagtactatcagccgcgcggctattactatcagaattgacgcgaccgccatcaaccgccgttgcgggccgaggcaccatgccgtcgcgtgccacgaccattctgattgcgctctgggtgttgatggcgggaccggccatgggatctgatgcgaccttcgacatcgaggcgcatcgcggcggtcgggcgctgttgccggaaaattccctgcccgccttcgccaacgcattgtcgatgggcgtggacacgctggagctcgacgtcggcgtgactgccgatggcgaggtcatcgtctcgcatgagcgcgggctcaatcccgatctctcacggaggcccgacgggacctacatcactccgcccgggacgcccttcgtgaaattgcggctcgacgaggtcaggacctatgacgtcggccagattcggccggacagtgcctacgctaaacaattcccgagccagcgggccgtgccggggacgcgcattcccaccttgcgcgagctgttcgcgctggtgcgcaagtccggcaacacaaaggtgcgcttcaacatcgagaccaagatcgatccgaaccgtccggatgaaacgcttggtccgcaagatttcgtcgcgaagctgcttggcgtgatcgagagcgagggattctccgagcgcgtcatgatccagtcgttcgactggcgaaccctgcttgtcgtccagcagcaggcgccgaacatcccgaccgcatacctgacgatccagcgcggctcgagccagaccgtgacacgcgacagggcgacgaactggacggcggacttcaatccgtccgatcacggcggctcgctcccacggacgatcaaggctgcgggcggcgcgatctggtcgcctcatttcggcgatgtcaccgccgcgctgatctcagaggcgcacgaactcggattgcgcgtcgtggtctggacggtgaacaagcgcgaggacatgacgcgcatgatcgagctcggcgtcgacgggatcatctcggacagcccggacctgttgcgccaagtcgccggcgcgaggggcattgcgctgccggcggggacgcctgtggagccgtagaaacgcgctcctgcgtccggaacgcccctactccccgttcttccaacgccgatacaacgcgcccaggatgttggaatagtcatccgtccagacccgagccctgtcgtcggcttcggtctgttcccattgcttggaggacgcgagcttgccgatgtcggcctcctcgcgggcggagatgacgacgtcggtcgagaagatgtagtcggaatcgcgacccgaatcctcgttgaagacccagctcttgaggtcattggcgtcggcaatgccgaccacgacggtctcgagatcgagatgccggttggagacgtgcatcaccaccgccccatgcggtgcgagcttgtccttgtagatcttcatcgcctcctcggtcgcgaggtgaatggggatcgcgtcggatgaataggcatcgacgatgacgaggtcgtaggcgccgtccggctccttggcgaaggtgagccgcgcatcgccgatcacgggcttcatgtccggcatgcagctcggtatgtagcggaaattcctggggtcgcgcgccgcatcgaccatggactggtcgatctcgaagaaggtccagctctctcccggctcggccgcgcaggcgagcgtgcccgagccgacgccgatcgcggcgaccttgagcggcgcgcccttgcgctcgcggatcgcgctgacggcctgaccgatgccgccgtcttggtgataataggtgatcggctcgggccggccgacgaccggcgtgccgtcattgttgcggaagcgctcggcaccgtggatggtggtgccgtgcatcagcacatggaaatagccgccgggcgtcaccacgatcttgtgcacgccgaagaagctgcgcaccgtcgtgacgcggccttcgtctgcgggataaacgcggatcaacaccagcgcgagcgcgacggtggcgaagatcttccagcggtcggcgttgaggaccagcgcgagcagcgcggccagaacgccgatggctccggcgacccagacgcgatgatcttcgaaccaggtcgtgaggtcgcctgtcgtataggagggagccacgagcgccaccgcgagcacggcgagcgccagccagtaccatctggcgatgcccgcaaggcgttcgttcgcggacggacggcacagcgcggcgagcgcgatcaggatcgggtattcggcgatccacgagaaggtgtagggcgcaacgagcccggcaaacaagccgccgaccatgccgccaaacgacagcgcgacatagaagccggtgagatatctggccgccggcctggtccgtgccagttcgccatggcaggccatcgcgatcacgaagaagcagagttggtgcccgccgagcgtcagcagcagattctgctcgccgccataggccagcagaagcaccacgccggcgatcgcgaccggctggagcatcagcatccatttgtgcggcaacaacggccgcgactggaacacgacgacccatgtcagcagatacagtgacagcggcagcacccagagcagcggcgccgcggcgacgtcggtggagatgtgcgcggtcaccgcgatgagcaggccggagggtaccgccgcgaggaagatccagcgcagtcgcgtcgaaaggctgggcgccggcgcgtccacgtcctcggcccgcgcatccaccgccaatgccagcttcggggaacgcaagagcagcacgccgcaggcaccgatcagcaggatcaggaggccgtaacccgcggtccagaaccggttctgcatctgcaacgtgaacatcggctccagcaggaagggataggacagcagcgcgaggaagctgccgatgttggaggaggcatagaggaaataggggtcgtgcgcggcggggtggccggtgcggacgaaccaggcctgcagcagcggattgttggcggcgagcgcgaagaacggcaacccgatcgagaccacgaacaggccgagcagccagaacgcatagcccgtagcgggcggctcgccataggcggatgcgatgccgagcggcagcatgacgaaagccgcgatcagcagcaccagatgcaccgccacaggaacgacgcggtttctgacctgcatcagcagatgcgcataggcatagcccgcgagcagcagcgactggaagaacaccatcgccaccgaccacaccgccggcgagccgccgagccgcggcagcaccatcttcgtgaacagcggctgcaccgaaaacagcagcagcgcgctgacgaagatcgcggccgtgtagaccgccagcaacagccggttgcgcgacgaggacggcagctccgtggcggcgggttgcacgatggaatccatggaagctccggctcgaaccccggcgggcgccggaccgcgcgcaatggagcacaccgtaccgcaacgggcaataaagtgtggcgcgatgttgcagccggagatgcttgatattagagggtcgttccggacggtgcgtagcatcgaacccggaaccccgagattccgggttctcgcttcgcgaactccggaacgacagtccactggctcttgcatccttcatgacagaaaccgacgtcgtcatcatcggcgcgggccataacggcctcacctgcgcggcctatctcgccaaggcgggcctgcgggtgcgcgtggtcgagcgccgcaaagtggtcggcggcgccgccgtcacggaggagtttcatccgggataccgcaattcggttgcggcctacaccgtgagcctgctcaatccgcaggtgatccgcgacctcaggcttgccgagcacggcctgcgcatcgtcgagcggcgcgcccagaatttccttccggcgcccgacggcagctatctcatcaccggcgaggggcggacgaaggcttcggtcgcgcggctcagcgcacatgatgcagaggccctcgacggcttctcgcgcgagctggaaggcatcgccgacgtgctcaggcagttcgtgctgcgcgcgccgccgaacctgcccgagggtttcggcacgagtgcgatccgcgagtccgtgaacgcgttgaagacggccaatatcctgcgcggcctgacgctggaacagagccggagcctgctggatctcttcacccgttcggccggcgaaatgctggacgagcgtttcgaacatgatctcgtgaaggcgctgttcggcttcgatgccatcgtcggcaactatgccagcccctatgccgccggttcggcctacgtcatgctgcatcacgccttcggcgaggtgaacggcaagaagggcgtctggggccacgccatcggcggcatgggcgcgatcgcccaggcgatggcgcgcgcggcacgcgagtgcggcgctgtgatcgacaccgatgccggcgtccgcgaggtcatcgtcgagcgcgaccgcgccgtcggcgtcgtgctggagaacggctccgccatccgcgccaaatatgtcgccgccaacgtcaatccaaagctgctctacacgcacctagtcgcgaccaacgcgctgcctgcggacttccttgctcgcatccggcactggaagaacggctccggcaccttccgcatgaacgtggcgctggaccacctgccttcctttacggcgttgccgggcgaaggcgatcatctctcttccggcatcatcctggcgccgagcctaggctacatggaccgcgcctggctcgatgcccgtgcgcaaggctggagccgtgagcccgtggtcgagatgctgatcccgtccacgctcgacgatacgctggcgcccgaaggcaagcacgtcgcgagcctgttctgccagcacgtcgcgccgcagctgccggatggaacgtcctgggacgaccgtcgcgaagaggtcgccgacctcatgatcgcgacggtggacaaatacgcgccgggttttgcggcgagcgtgctgggtcgccagatcctgtccccgctcgatctcgaacggcagtttggcctgctcggaggcgacatcttccacggcgcgctgacgttgaaccagctgttctcggcgcgaccgatgctgggccacgccgactatcgcgggccgttgaagggcctctaccattgcggctccggcgcccatcccggcggcggcgtcaccggcgcgcccggccataacgcggcgcgggcgatcctgcgagatcaccggtcgctgttcggacgccgtggataggcctgtggattgcttgtgggctggctgttgaaaggctgtggtcgggcagaggacgcccggcaatccggtcagcgccgatcctggggaaggccagtggaaaattgcgggaaaagccggtggacagaatgccggcaacggggcggacaagctgtgggaatcggcagaaccccgccgggaaagaactcgcccgccaggggatttcccctggcgggcggttgatcaggaatagcctcagaagaaaaactgcccccgctgggaaacgcaggcggaaattacttcaaggaggtgctaatcgaagtgaacttctcgttcatggtggtgcccaggctgttcaccacggtgatgatcgccagagcgatacctgcggcaatcaggccgtattcgatcgcggttgcaccggactcgtccgaccagaacttttgaaccatgcgcttcaagactcgcctccgtttcaattccaggctgtgctagctggattcaacacccgagaatgtacgggcagcgaccttcagtcgagttaacccgggaaccgcaacttgtcgggaaaatcggtacaaaaagttccaaaaattgagctcaacggaaccctgaatgcagtcttctcctacccatcgcgccagcttttcgatcggcagcgaggccgacgcgaagcgcgtcgtcgacgtgctcaccgaggtgtttttcgacggcgatgcggcggttgccgccttcgaacggccggacggacaatgggacgtcacgctccatttcgccgagccgccggatcaggcgcggctgcgcgaactcgttgaaaattcagcaggaaatgcaatcgccgcgacgctcgccttggacacgatcgaggccagggactgggtcaaggccagcctggaagatctcgtcccggtcccggccgggcgcttcgtcgtgcacgggagccatgaccgcgatcgcgtggcgccgaacaagcttgccatcgagatcgaagcggccctcgccttcggcaccggccaccacggcacgacgcgcggctgtttacttctgcttgaccatgtcctgaagagttccaggccgcggaacgtgctggaccttggcaccggaaccggcgtgctggcgatcgccgcggccaaggcgctgcatcgtgccgtgctggcctccgacatcgatcccccctcggtacgggtcgcggccgagaacgcggcgctgaacgaagttggcagccttgtgcgggtgatccgcgccaccgggtttgcggcgccggattttgcgcgggccggtccgttcgacctggtgctcgccaacatccttgccaatccgctgcggcaattggcgagcccgatggtgcggcacctctcgcccggcgcccgcgtcatcctctccggcctgctgacgcaccaggctcccgccgtgatcgcagcctaccgcgcgcgcggcctcgtcccgttgaggcatctgcggattgaggagtggagcagcctgttgctgaggaaggtgtcttaggtggatcagccctgcgattgcgcgaagcgcaatcgccccgcgtaaccaccaccttgcttttcatacgggtggacgttgccgggtcacaccttcggcgaacctcccgacgaagtctcagccgccgccttgctccggcgtctcgtcgcggcgctttgcacgctcgtcctgcaaggcgcgccttgcgcggcgctcggcgacacggtcgatcatctggctgatgaggccgcgtggcttccgcggtgccgccgcagccggggcgccgcgcaacggcggtgaaatcttctcaaacgaaaacgctggcatcgtgtgtcccctcgccgttgagatgaaccacttgctcaaatgtccctgttattcggacgaagcgcaactgccgcatcctttactccactcttcgaatggaactatttcaagcacagtccatgccagatgcgacgcaaatgcgacgagattgcggatcgatccccatgatcctagagtgtccacatgttcgaagcacacttccagacattcgaggagccggaggcgggcgtcgcattgacggcccggctcgccgcgctacgcgaagagctcgcccggcgcaagctgaccggcttcgtcgttccgcgtgcagatcagcagcagaacgaatacgtgccgccgtctgaagagcggctcgcctggctgaccggctttacaggctcggccgggctagcggtggtgctgccgcaggaagctgtagtgttcgtcgacggccgctacacgcttcaggccgccaagcaggtcgatgcaacggcctggactgtcgaatctttgatcgacccgccgccggaaagctgggtcgcggcgcgtatgaaggccggtgaccgccttggatttgatccgtggctgcacacttttgcggcagccgagcgcctggccgctgcgtgcgccaaggccggcgccgagctggtcgccgtcgacagcaatcccatcgacgcgatctggccggaccggccgcagccgcctctcgcccccgtcgccatacacgggattgaacatgccggcgtcaccgaagcggagaagctgacgcagatcaggggcgagatcgccaggctcggcgccgatgcgctggtgctgtcggacagccacgcggtggcctggacgttcaacatccgcggcgccgacgtcgcccatacgccgctgccgctgtcctacgcactggtgccgaaggacggccgtcccaccatcttcatcgaccaccgcaagctctccaacctgacgcgcgaccatctcgagcaatccgccgacgtgcgcgagccggacgcgatggcgccgacgctgatggcgctggccaagggcggtggatcgatcgcgctcgacaacgccaccgcggccgacgcgctgagccggttgatcgcgggcgccggcggcaagccgctgcgcggcagcgatccggttgctcttctcaaggctgtcaagaacgcgaccgagatcaagggaaccaagacggctcacgtgcgcgacgccgtggcgctggcgcgcttcctcgcatggattgatcgcgaggccccaagcggcaagctcacggagatcgacgccgtcgaggcactggaaacgttccgccgcgataccggcgcgctcaaggacgtatcgtttccgaccatctccggcaccggcccgaacggcgcgatcgtgcactaccgcgtcacccgcaagagcaaccggcggatcgcgtccggcgacctgctgctgatcgattccggcgcgcaatacgaagacggcacgaccgacgtcacgcgcaccatggcggtcggcgagcccacggacgagatgcgcgaccgcttcacccgcgtgctgcgcggccatatcgcgattgcgcgcgcggtcttcccggacggcaccacgggcgcgcagctcgacacgctggcgcggcaatatctctgggctgtcggcctcgatttcgagcacggcaccggccacggcgtcggcagctatctctcggtgcatgaaggaccggcgcggatctcgaaactgggcaccacgccgctgaaacgcggcatgatcctctccaacgagcccggctattacaagaccgacggcttcggcattcgcatcgagaatctcgagctggtcgttgccgccgacatcgagggcgccgagaagccgatgaacgcgttcgagacgctgaccctggcgccgatcgatcgccgtctgatcgatgtggcaatgctgagccgcgatgagctcgactggctcaatggctaccacgcacgcgtccgggccgaggtgcggccggcgctggacggggcgacgaaggcctggctcgatcaggccacggcggagctgacgtagcctcgcgcatagccgcattccgaaacgtcgatgttcgcagccttggcgatgcggctagtgtccggtcatgcacggcatgaccagcaagccgccggaagcggcgcccgacaggagtgtggcgacgtcgcgcgtggtgctgttgctgctggtcgtcatgaccgggatcgcgccgatctcgctctacatgctggttccggcgctgccggtgttggcgacgaatttcggcagcgacatctcgatcgcgcagatgactgtgtcgctctacatggtcggcatcgcgctgtcgcagttgatcatggggccgctgtccgaccggttcggccggcggccggtgctgctcggaggcctggcgctgatggtggcggccagcgtcgcgtgcatcttcgcgcaagacctgcctcaattgatcgccgcacgcttcttccaggcgctgggcggcgccgccggcatggtggtgagccgcgccatcatccgcgacatctacgagcgggatcgcgtcgcctcgatgatcagcctcgtggtcgcagcgctgatgatcgggcagatggtctcgccgctcaccggcggcctgatcgagaccgccttcggctggcgcgcgatcttctacgccatcaccatcgccgcgatcgtcgtcgccgtcgggatcgcggtggcgctgcccgagacccgccgcagccgcgctgccggcagcggcttccgtggcgacgtcggcgtcctgatcaagagccgcgccttcgtcggctatgtgatgtgccaggtgctggcgtctcagatcatctttaccttcgccggcggcggcccctatatcgtcgtgactcagatggaccggagcagcgccgaatatggcgcctggttcgcgaccaccggacttgcctatctcgtcggcaatctgctctgcgtgcgctttgcgccgcggcattcgctggagaggctgatctggctggggcttgggctccaactctgtggcagcctcttgaatctgctctggagcttcatcggctggaacgaagcgcccgcctggctgttcggcacgcagatgatcgtgatggtcggaaatgccttcgtgatggcgaactccgcggccggcgcgatcagcatccgcccggaagcggccggcaccgcctcgggtgcgatgggattcctgcagcagggcatcggcgcgctgatgtcgcaattcggcgcctatctcggcggccactccgcaacgacgctgccgctcacctcggcagttctggcgatctcgctgctctgcgcctgcgtgatgatcttcgtcgttccccgccgcgacatggtggtgagcgagaagctgatcgagcaggcggaggaggaagagcgcggcatgatttgagggggacgccggctccggcagcttcgatccaacatcccgctaccgcaaccattacgcatgatcgtcggtcgacgctcgccgcggttgacgaggatcaatgcaagctggccgaccttcgccgagcctgacgggggttcacgcagggaggacgtcatgaccgaacgccgcgccggctacgacagcaaaagcgcaatcgatcctcaagacgtagccaacatgctcgaggcgatgaagcaaatcggtctcgatatctccgtccccgccgtcaacgaagaagcccggatcggtaacgtcctgtacgccagcggcggctgcgacccgcacgattgctccggcttcaagccgggaagctgcagcggcgtcacgtgccccaccaagtccagcgcctgtccgactgaatcgtgctcgacgaaagtctgcgccaaccatacgtgtcaaagtgtgagttgcgaaaaagtctcctgcaacaactaccaccattgggaatcgcgggcatcgacgcacggcgccttggtcgaagcaatgtccagcctgccggacggatcctggtcgcaactgtcgtcccgttcgctctcagcacccgatcgcgcgacctgacgattcctgccggggcggcacagcgatgaagatctcggcctacaattgtctgacctcatctttcgttccgggcaagcatctcgcgttcaacgcgctgactggtgcattcctgtcgctggatgacgaacggctcgacgactacgccactctgcttcggtcgatcgacgccacggggtgcccacccgaccccgtcaggccatttcagaagaccttgatcgagaacggcttcgtcattccggacgaatgcgacgaacaggccgagatcagcaaccgctaccatcgcggcaaggccgcctcgcgcggccttggcctcaccatcgcgccgaccatcacatgcaacttcggatgcagctattgcttccagagccattcgaacacccgcatggacgacgaacgaatcgacgatctgctgacgttcgtggaagcccggctggaggccgggacgtcgctcagcgtcacctggttcggtggcgagccgcttggtgcgttcgacgtgatcgaaaaactggcgccccgacttcacgcgctcgcggtggagcgcgactgcacgttcgggcacagcatcatcacgaatggctacctcctgacggagccgcgcgctgccttcctggcaagcatcccgggattcggggatgcgcaggtcacgctcgatggcgcaaggaagcaccacgatgctcgtcgaccgacccttgccggcaacggcacgttcgatcgaatcctggagaatctggttgccgcggcccggcatatcccgatcctggtgcgcgtgaatgtcgatcgtcgcaatatcgacggagtggaagatctgctggatgcgctcatcgagcgtggattgcgcaacgtcggcgtctatctcggccatgtctggcgctacactgacgaggtcggcgcgacggatctccttaccaaggaggagttcgcggccatcgagacgcgattcaagtttctcaagttccgcaagggattcgcaatcgggtcttcgttgccgcaacccaaactcggggcgctctgctcggcggacagcagcaacagtttcgtgcttggcccgggcggcggcatcttcaactgctggaatgaggcccaccgggacgtgcatcaggcgcccggccgctatagtccggcgacggagccgcaccccggcgatgtcaagcagcaatgggcagggtatgaaccgtcggccaagcccgcatgccggagctgtcacgtcgcgccgctgtgcatgacgggctgtccctgggaggcggcgaaactgaacgacagaggcgactgtatttcggcgcgcttcaatctcgccgaccaattgcggttgtacgatctcgagcagtccattgcgctcgccgaaaaggcgaggcaaccgccagcgcgacgcaccgagatcgtctgaagcgtttcagggcgccgaccgtcactccccgatcagcttcagccactcgtcttcggtcagcaccttgacgccgtgcttgttggcgtccgccagcttggagcccgctccggggccggcgacgacgagatccgtcttcttcgagaccgagcccgacacctttgcccccagacgttctgccgtggccttggcttcgtcccgcgtcatcttctccagcgatcccgtgaacaccacggtcttgccggcgaccgccgaattgctcttcggcttctcggcgtcgacgatctcgacctccctggtcagccgctcgacgatgccgcggttgtggctctcgccgaaataatcggcgatgctcttgatcacggtgtcgccgatctggtcgagcgcgtccatctccgcgatcgcctcctcgtcgcccttggcgaccttgaggcaggcatcgtggaaggcatcccacgagccgtagccgcgtgccagggccagcgccgtggtctcgccgacatggcgcatgccgagcgcgtagatgaagcgctccagcgcgatcctgcgccggctctcgatcgcgccgaacaggttgcgcaccgaggttgcgccgtagccttcgacctcctcgagcttgagcttggcgttgcgcttctccagggtgaagatgtcggcgggctccttcacccagccttcatcgaagaaatattggagctgcttttcacccaggccgtcgatgtcgaaggctcgccgcgagacgaacagcttgaggtgctcgatcttctgatagggacaggcgaactcgccggtgcagcgggcgcgcgagccctcctcgcccgttgccgtctcctcacgcacgacgtcggtgtggaggggacacgggcacttcttcgggaagtggaattccttggcggtcttcggccgcttgtcgaggacgacgtcgaccacctgcgggatgacgtcgccggcgcgctggatcaccacggtgtcgccgatccggatgtcgcggccttcgcgcaacacctcgcccttgttgccgatgcccttgatgtagtcctcgttgtgcagcgtgacgttctgcacgatgacgccgccgacgccgaccggctcgagcttgccgaccggcgtgaacgagccggtgcggccgacctggatctcgatgtcgcgcagcaccgtcatggcgcgctcggcggggaatttgtgcgcgatgccccaacgcggcgtgcgcgagacgaagccgagccgctcctgccagtcgatgcgatcgaccttgtagacgacaccgtcgatgtcgtagtcgagccgggcgcgctgctcctcgatcgcatgatgaaaggccagcagcccctcgacggaatggcacagcttggtcagcggattggtcctgaagccgcagcgctcgaaccagtggatcatgccgctctgcgtatcttccggcatcgcactcatctcgccccacgcataggcgaaaaagccgagcgggcgcgaggcggtgatggtcgggtccttttgccgcaaggagcctgcggccgagttgcgcgggttggcgaagatggtgccgccctccgccttctgccgctcgttgagcgcgaggaaggccttcttggtcatgtagacctcgccccgcacctcgcagatgtcggggacgttgcggcccttcagcttctgcggcacgtcttcgagcgtgcggatgttggcggtgacgtcctcgccgaccgcgccgtcgccgcgcgtcgcggcggtaacgagctcgccgccctcgtagcgcagcgacatcgacaggccatcgatcttcggttcggccgagaagttgatcttgtcgtcatcgagcttcaggaagcgaacgatacggccgacgaagtcgcgcacgtcctcttccgcaaaggcgttgtcgagcgacagcatgggcacggcatgccggactttcctgaagcggcctgatggcgccgcgccgaccttctgcgagggggagtccgcggtgacgaattcgggaaagcgcttctcgatcgcattgaagcgctgccgcagcgcgtcgtactcggcgtcggtgacggtgggcgcgtcctcttgatagtagcgctcgttgtgcccctcgatctcgagcgcgagccgcatgtgctcgaccttggcctgcgccttggtgagatcggcgacatcgcgcggcggtgctgctttggattttgctgctctggccatcatactaaaggttctagcgcgtcgttccgggatggtccgaaggaccagacccggaatctcgagattccgggttcgatgcttcgcatcgccccggaatgacgggtgaaaactaggccgtcgccgccttgagcagccgctccgccgccgcccgcgcctcagccgtgatctcggcgccggccagcatgcgggcgatctcctcgcggcggtggtcggcggccagcgcgttgacgcgggtggcgacgcgcttgcccttgtcgagggcgtccttggagatgagcaggtgctggtcggcgcgggcggcgacctgcggggcatgggtcacggccatcacctgtaccttgccggcaagccgcgccaggcggccgccgatcgcgtcggcgacggcaccgccgacgccggtgtcgatctcgtcgaagacaagggtcggtgccgagccgcggtcggacagcacgaccttgagcgcgagcaggaagcgcgacagctcgccgccggaggcgaccttcatcagcggccccggcttggtgcccggattggtctgcacccagaactcgacgcgatcgaagccttgcggccctggggcggcctcgtcggtctccacctgggtcatgaatttggcgcgttcgagcttgagcggcgcgagctcggcattgacggccttgttgagtttctccgccgatttctgccgcaccagcgacagcttcttggcggcggccgcatagcggctgtctgcctcgatcgcgacctgctccagcttcttcaaacgcgaggcgccggcatcgatcagcacgacatcggcggcgtatttggcggcaagcgcggcaaggccgtcgaccggcgtcgaatatttgcgcgaggccgctcgcaaggcgaacagccgctcctcgatgcgttcgagctccgccggatcgaaatcggttgcggcgagcgccgcctggagatgctggtcggcctcctccagcgcgttgatcgcagcgtcgatcgccttgaccgctggctcgaccagcgccggcgagttgatcccgcgccgctccagccgccgcaccgcggccgacagcgccgcaaccggcgaatgattgccgccgaccgcctcctgcgcctcgcgcagatcggaggcgatcttctcgccctgcatcatggtggtgcggcgcgaggccagcgccgtctcctcgccgtccttgggcgccagctgcttcagctcgtcggaggcgtggcgcagataatcggcctcgcgcgcggcatgctccatggcggcgcgatgctcctccaaagcggtgttggcggtgcggcgcgcctcccaaagcgattcgaccgcggcaacgtccttctcgaggccggcgaaggcatcgagcaggcggcggtgagtggccgcatcgaccagcgcgcgctcgtcatgctggccgtggatctcgaccagcgcggcgccgaccgccttcagcgtctgcacgctgatcgactggtcgttgatgaaggcgcgggtgcggccgtcggcgagttgcacccggcgcaagatcatctcgccggtatcgtcgaggccgttctcggccaggatctttgctgcggggtgattcttggggacatcgaacacggcggtgacctgcccctgctccgcgccgtggcgcacgaggccggcgtcgccgcggccgccgagcgccagcgcaaaggcatcgagcaggatggacttgcccgcaccggtctcgccggtcagaaccgcgaggccggaggcgaattcgatatcgagccgttcgatcaggacgatgtcacggatcgacagacgcgccagcatggaaccaaatttcctagccgagacccatcttcttgaaggtccggctgatccaggacccctgattctcgctcggctcgagaccgccggattttacaagattataggcgtccttgtaccagcggctgtcaggaaaattgtgtccaagcacggccgccgcggtctgcgcctcgccgacgatgccgatcgccatataggcctcggtcagccggaacagcgcctcctcgacatggcgggtggtctggtattgcgtgacgacagtcttgtagcggttgatcgcggccgtgtagtcgcgcttctgggcgtagtagcggccgacattcatttccttgccggcgagctggtcgcgcgcgccctcgatcttggccttggccgaggtcgcatattcggaggtcggatatttgcgcaccacctcttccagggcggcgatcgctttctcggtgcgcgcctggtcgcggctgatgtccgggatctggtcgtagtgggaggcagcgatcaggtactgcgcataggcggcgtccgggctgccgggatgcagcgtgacgtagcgggtggcggcaccgatacagccgtcatagtcaccgccttggtaggacgcgtaggccgacatcagcagcgatttgcgggcccagtcggaatagggatgctggcggtcgacctcttcgaacttcttgttcgccgccttcatgtccttcttctcgttcatgaggtacaggccctcattatagatcttgtcggcgggctcctcgacgaaggtgtcgtccttggcggtgaacttgtcccagagagagccggtgccgcagccggccagcggcagcgccagcatgaagaggatggccgcctggaccagtcgaccggctccgaccgagagatatccgcgcgtcatacgctgtgccgacatgagttctgccttgacgccctgtgatgcggtgcccgccagcccatgaactccgccatgggcgcgaaatgtgaccgtggtgcctgccatgcgaccacgccgatccatccgaaaaacgatcgctaactaaccggataggcaggcatttcgcccggattaaggcgaacgcgccgcaatcctagccgatcacggttaccaggagtttcccgggggctgccaaccgaacgcccagggagaccgtctctctaggagacatccggtccgaacgccgcagcgatccgaccgccgacgatcccgcgaccgacttcgccgacgggacgggcggtgcggcgggcagcctcgccctcgaccacccgccaggcggtacggtcggcgagcagcgcggtcaggacggcgtgattgagcttgtggccgccacgaaccgagcggtaggcgccgagcagcggcaggccagccagcgagagatcgccgatcacgtccagcaccttgtggcgggcgcattcatcggcgtagcgcaggccctcggcattgagcagccgctcgtcgtcgaacacgacggtgttgtcgaacgaggcgccgagggcatagcccgcgctccagagccgcgcgacatcgcacatcagaccgaaagtccgggccctgccgacttcgcggcggaaaccttccggattgaggtcgaaggcgtagctctgctggccgatgacgggattgctgaagtcgatctcgacctcgacgcggaacccgctggcgtgaggcctgatctcgccgaaggagtcgccaatcttgactgagatcggcttcaagacctgaatgaggcggcgctgcgccggctgggtaacgatgccggcttgatcgatcgccgcgatgaaggcagcggcgctgccatccatgatcggtacttcgggcccatcgacctcgatggtggcgttgtcgacgcccatgcctcgcagtgcagcaaggacgtgctcggcggtggataccagcggaccgttgcgatcaccgaggacggtggcgaagtcggtcgcaatcacctgctccgccgtcgcctggacttcgcggtcacttccctcaagtcccgtccggacaaaaatgaaacccgcgtcgacaggcgccggcccaagcgtgagagtgactgggagaccggaatgaacgcccacgcctgccaccgaggcttgcgcacgaagcgttgtttgccggttgaatttcatcaggaaccgccccactacgaccatcgcgacttatacgagacccacctggccggccactgccgacgccccgcgaatccgtatccccaagtcacgccaaaccatagtcactgccccaaacagcgccaactcacgcttttttaccgattgttaccccaaacctgccgtattcgcgccaaggcttaaccaaattgcgccgaggttttgggccgctgccggcagctttattgaaccaccgaatgcataattaatgatttaaaatcagttgcttggttgcagaacccggatgaccccggtgcaaaaggaaaggccccggcaagcttgctgccgggaccttttttcgtctgccttattgtaacaatcctcaggtcgcctgccgccgcaggaaggccgggatatcaagatggtcgtcaccctgtggtgccggcgcaacaggtgcggggcggccgtgcatatcgagaccctgcggcgcgggacggcgagcgtactcggacaccggctcgttggatgcgatctgctgcgccacggtcttctgcggccggcgttcgggcagcggcggcatggcaggaccagcggtgcgagcagccaccggcggctcgctttcctcgtcgcggcggccgaggccgacattggcgaggcgctgcagcagcgacaggcggctcttctggggagtctcatcttcgacttcgccgcgggcctgacgaatctcggcctgggccggcatcggcagctcctcgatgcgcggcatccgcggcgtacggaccggcggacgctcggcctgcggggggatgaagttctcgggcgtcatcggctcctgcatcgcaaccggggccatctcaggctcggggaaaagggtcggcttctgcgcgatcggccgcacggtgacatcgccataggtttgcggcgcagggttctgcgggacctcggcaacggcagcggcgatggcggcgagcgcagcgcgctcgacgttcggacgggccggaccaggggccggagccggcgcggcagccgggggctgcgcttccagcttctgggcgcgctcggccagacgctggttgtcggcccggagccgggcggtcaggtcggcgagacggctctcggcagcggcggccggtgcggcagcctgctgcacctgcggtgccgggttcgcgaccggagcggaggtcgcctggctgttgcgggcgatcgcggcctgctcgatgccggtggcgaccaccgagacgcggatcaggccgtcgagcgcttcgtcgaaggtcgcacccacgatgatgttggcgtcctggtcgacttcctcgcggatgcgggtcgcggcctcgtcgacctcgaacagagtgagatccttgccgccggtgatggagataaggaggcccttggcgcccttcatcgagctgtcgtcgatcagcgggttggcgatcgcggcttccgcggcagtcagcgcgcgcttgtcgccggaggcttcgccggtgcccatcatcgccttgcccatctccctcatcaccgccctcacgtcggcgaagtcgaggttgatcaggccttccttgaccatcaggtcggtgatgcaggcaacgcccgaatagagcacctggtcggccattgcgaaggcatcggcgaaggtggtcttctcgttggcgaccctgaacaggttctggttcgggatgatcaggagcgtatccacgaccttgtgcagctcggcgatgccggcttcagccgtgcgcatgcggcggccgccttcgaaatggaaaggcttggtgacgacgccgacggtgaggatgcccatgtcgcgcgcggtcttggcgatcacgggcgcagcacccgtgccagtgccgccgcccatgccggcggtgacgaacaccatgttggcgcccgagagatgatcgcgcagctcgtcgatcacctcttccgccgccgcggcgccgacgttcggctgcgagccggcgccgaggccttgcgtgaccgccgtgcccatctgcacgatgcgctgcgccttcgacatcgtcagcgcctgcgcgtcggtgttggcgaccacgaagtcgacaccctggaggcccgccgtgatcatgttgttgacggcgttgccgccggcgccgccgacgccgaacacggtgatccggggcttcagttcgtgaatatcaggaacattgatgctgatggtcatggttgctgcctctcgatcacgcgcgcgtgggttcgccccggccggcggccgcgggagttggtgaaaaacgaagattgcggaaagcagtcattagaagccctcgcgtagccatcgtccgacctttccgaaatatccgccggtccctgtcttggcctgctgccgcgtatgccgcggttcgacatgttcgaggtgaacatattgcgggtagacgaggagcccggccggcaccgcgaacgcagcgttcttcgcctcgttgggcagccggccgaaaccgagcggacggccgacccggacgggccggccgagaatctgggtgccgagctcgacgaggccggtcaactgggaggcgccgcccgagagcacgacgcggcccttgggctccgcggcgaagggcgaatccttcagcttgtcccgaaccatttcgaagacttcctcggcacggtgcttgacgatgttggcgatggtggcgcgggagacgatctgcggcagatcctgctcgtcaccggctgtcggcacagacatcagctcacgcgagtccgatccgccggtgatgacggtcccatataacgtcttgattcgctcggcatcggcaatggtcgccgagagtccgcgcgcgagatccatcgtgatgtgttgcccgccgaccgcaaagccggccgcgtgcacgaagcgcccgcctgaataaacggcaatcgtggtggtgcccgcgcccatctcgacgaccgcagcaccgagatcggcctcgtcgtcggtcagcaccgacaggccggccacatagggactcgccgccatggcttcgacattgatgtggcagcgctccaccgccagcatcaggttgcgcgccaccgtggcgtcgcaggtgaccacgttcatgtcgacgccgaactgatgcgcgaccatgccgcggggatcgcggatgcccttgacgccgtcgagcgtgtagccgaccggcagcgcatgcagcaccgtgcggccttcgccggtggcgtggcgcatgccggttgaggtgacgcggctgacgtcggccggggtcaccgcgccgccacggatgtcggcggcggcttcgaccagctggccggagagccggccgcccgagaccgagagcagcaccgagtcgacccgcaccttggccatcttctccgcgagcccgacggcctggcgcactgcctgctcgcattcattgagatcgatcaccgcgccggccttcatgccgcgcgactggatctggctgtagccgatcaattccaccgcgtgggtgcggccgcgcagcgcatcgctcggcggcgacggcttcagccgtgcgatcatgcaggcaatcttgctggtgccgatgtcgagacatgcgacgaggccgccgcgcttgtgcggcatcgggcgcgtcttcggcgtctgggtgcgatcgagaccggtcatgcggaatccccggccttctttttcttcttgtccttgaacagctcctcgcgcgccttggcggcgtcctcggacagctgcaccaccagccgatcgggcaggcgcatgtcgacggcgacgatgtcgcgggagaacagcctgtcttcccggtcgagcttcgagagcatcgcaagcgcgttgccgacgtcctgctccggcaggcgaatgtccaggccatccttgagccgcagattccagcgccgctcgccaacgaagatcgcggctttggtgatcgaattgacttgcggatagcgcgccagcagcgccaggaaatcgcgggcctgcgtttcggcgcccttgccgaccacgaggggcaacgtcaggaagcggcgcgagacgtagggctcgagcacggcgccgtcatcggcgatgacggagaggcggccggcctcctgccacagcgcgaatgccttgcgctcggtgagctcgatcatgagccggcccggatagagcttcagcacggtcgcatcagcgatccagggattggccttgagcttgtcgcgcaccgcgtcggcatcgagaaacagcagcgaggaacggccgctgatgccgccgatcgcaaggatctcgtcctgggtgagctgcttgcggccgttgatcacgacggaggtgatgcggaagccggcggaattggccagcgcgttgcgcgcgtcgccgaccgcggtggtgaagtcctggagatggccgcccttgacgatgccgaagccgcagcttccgatcaggagcagcacggtcatgctgaggccgacccggtgcggcagatagcgctcgaccagcgcaaccattcgcggcggcggctcgcgctcgacgaccgccttggcgcggctcctggatttcgctttgtcctcggcggcagtgcgcgccgcggcgcgcttgtcctgcacccactcgcgcaacagcacgaccgctccgatcgcggccgccttcaggtcagcttggggcctcagcgatctgaaaagcgaccgggtgaggcttcctgctccatccattgcacgagctcgtcaacagtttgcccgcgacatcgcgcggatcctggcgaacatgacgtctcggacatgccgggccgggtgctggtcttcagcagaagaaaacctctccccttcaaagcgtacgctggaggtgacatcacccgcgacagctcacgcgccggcagccaaagcgccatatgcgccgccagcgttaaccttcggacgtcctggtaaacaaaaggtaaagttcgttaacgaactgcgcattttgccccgcgatgtgaggcatttgcgccgcgatgtccggcattttaccggttttggtcgccaaaccgggcggtttcgcccctccggccgttaaccagtcccgactatttccgcacgcgctgcccggcgagctcgaccaggccgcgcaggaagtcgacgaattcgataccttcggctttcagcgccttggggtagagcgaagacttggtcagcccgggcagcgtgttcgtttcgagatagacgagccccttgttcgagacgatgaagtccgaccgggaatagccggcgcaggacatcgcacgatgggccagcatcgcctgctccttcagcgcggcggtgatctcgggtgcgaagcggcccgggcagatctcctgggtcgacttcaggagatatttcgccgcatagtcgaagctgccctcgcccggaatgatctcgatcggcggcagcgagatgatcgacccatcgggccgctccagcacgccgcaggtcgcctccacgccggcgatgtagggctcgatgacatactcttcgtgcttggctgcattgcgcacggcgacaagatcctgcttggcgttgacgaagatcaggccgtagctcgatccgtcgcgcgccggcttcgcgatcaatcttccgtattcggcgaacgcctcgtcgatgttcgcgagcgcaatgttcgccggcggcgtcacgccgccgagcgcggcaaaccgcttggccgcgatcttgtcgaaggcgagatgcgaagatgccgaacccgagcccgtgaagggcacgccgcgcgcctcgcacatcacctgcaattcgccgttctccgcacgcccgccgtgcaggccgagcaccagtacgcgcccttccgacttggccctatcgagcgcctgttccagcgggatgcctgatgtgcccggcttgaactcgtcctcgaatggacgggcatgttcgagcagctgcttcgaatgcacgacatgcaccttgtcctcgacgtcccaccaccaaaggtcggcctcgggcaacgcctgatgcagcgcctgggctgaggcgaccgaaaccagacgctcccggttggagccgccgaacaggatggtgatgcgcatggtcataatctttctcgttcgtcattccggggcgcgacgaggtcgcgaactacggtgcgcaactgcatacctgagaatccatacatccacggccgcctgatcgattccgggctctcgcttcgcgagccccggaatgacggtgatcatgaaaccccgatccgcttgatttcccattgcagctcaattccggaattcgccttcacgcgctcgcgcaccgtctcgcccagcgtctcgatgtcgtgcgccgtggcctcgcccgtgttgatcaggaaattgcagtgcatctcggagacctgcgcgccgccgacgcgcaagccgcggcacccggcggcgtcgatcagtttccatgcggagtgtcccggcggattcttgaaggtcgagccgccggtcttctcccggatcggctgcgccgtctcgcgatgcgtctgcacctccgccatgcgcgcgcggattgcttccgcatccctgagctcgccgcgaaaacgggcggaggtgaagatgatggagggatcgacgccgctgttgcggtagacgaacttcatgtcgacgttggagaagacatgcttcgtgccgtcgcgccccacgcccctcgcctcgatcagcacgtccttggtctcgccgccattggcgcccgcattcatgcgcaatgcgccgccgatggtcccgggaatgccgaaatagaactcgagcccgccgatattcgcggacgccgccacttccgccacgcgcttgtcgagcgctgccgcgccggcggtgacgacgtctccgctcgcactcgcctctccgaaggcgcgcggcgacaggcggatcacgacgcccgcaatgccgccgtcgcgcacgatcaggttggagccgacgccgacgacatggaccggaatgtcgggagcgagatgcgcgaggaaataggcgagatcgtcctcgtccgccggcgtgaacagcacctgcgccggccccccgacacgaaaccaggtgagatcggccagcggctggttggcgagcaagcggccgcgcaaatttggcatcgcggctttcagcgagggggtgatgtcggggaagctcatgcgattgcgccgcctccgcgaaaatccagcgcgtgtagggcaggcgcattgcttctattcccttcccccttgtgggggagagtcaggaagaggggtagcgccaagcgaggtcggagttcgtggctacccctctcgcccaccctcctccacaagggggaagggagcgcagtgtgcttcatggcgaacagcgaaatcacaatcaccgccctaccccagcgccttcaattcaccgggcaatgcatacgcccattgcgtgatgttgccggccccaaggcacacgacgagatcgccgggcttcgcaagccccttgacgatccccgcgagctccgaggccgccggcaacgggatcacctcgcggtggccgtgggcgtgcaggcccgcgacgaaatggtcgcgatcgatgccctcgatcggcgcttcgcctgcggcgtagacctcggcaacgaccaccgcgtctgcatcgctgaaacaggtgcagaactcctcgaacagcgattgcaggcgcgtgtagcgatgcggctgcaccacggcgatcaccttgccggtgtaggaatcgcgtgccgccttcagcaccgccgcgatctcgacgggatgatgcccgtaatcgtcgatgattgtgacgccgttccactcgccggtcttggtgaagcggcgcttgacgccgccgaagcccgcgagcgccttgcggatcgcatcgtcggagacgccgagctcgtgcgcgaccgcaattgcagccgtcgcattcgaggcgttgtgccgtcccggcatcggcagcgcgaggtcggcgatctcatgcacagccccgctcttgcggtcacggatcacgacgttgaatttcgagccgccgccgcccgcggtgagatcgaccaggcgcgcatcggcctgcgggttttcgccgtaggtgatgatgcggcggtcctcgatcttgccgacgaggctctgcaccacgggatgatcgatgcacatcacggcaaagccgtagaacggcaggttctcgacgaagtgccggaacgcgtcctgcacggcctcgaaggtcttgaaatgatcgagatgctcggggtcgacattggtgacgatcgccacatccgtcggcagcttcaggaacgtgccgtcgctctcgtcggcttcgaccaccatccagtcgccggccccaaggcgcgcattggagccataggcgttgatgatgccgccgttgatgacggtgggatcgagcccgcctgcgtcgagcagcgtggcgaccatcgtggtcgtcgtggtcttgccgtgggtgccggcgatggcgacgcagctcttcatccgcatcagctcggccagcatctcggcgcggcgcaccacgggaatgcgcttctgccgcgcggccaccaattccggattgtcgcgcttgatcgccgacgacacgaccacgacctcggcaccgccgatattctcggccttgtggccgaccgaaaccgtcgcccccttcttgcgcaagcggtcgagattgtaattgtcggacgcatccgagccctgcacgacatagccgagattgaccagcacctcggcgatgccgctcatgccgatcccgccgatcccgacgaagtgaatgggtccgatctcgcgcggcagtctcatggctgtatctctgtctatccttgcccgcccggcattcaagcctgaaccggccggcggcgaatctcctccacttcttgcaagaccggacgcaccgggacaagcccggtgctgtcgccaagcccggcaatttcaggctggaatgccccattttggccggtttcccggactgcacggcccgccgcccgatccggggacgggaacgggtcactctggatgtcagatggcgccgatgcgcgcggccgcttcgtcctggaactccagcacgcgaagatagttgcgaaggcgattggcctcgagcgcgctcacgagcctgttctggtgatacggcaacaagagatcggcgagcgccgcgctccagggcgcgtcgagatcgaagatcacgccgagcccgaacaccgccgggatctcggcaaagccgaactctcttccatccctgagcgcctcggcgagaaagtcgtcgatcgccgtcatcacgccattgcgcgggccgcccgaaaccttggcgatcgcgaactgacccatgccgcggaatccgcgcccgtcgaccagccggtcctggcccagaactacgccggcctcgaagctatgggcatggcgatattccccggggattttctcgggcgcgtagtagaggtcgcgccgcgcccacggccagccgatgtcgtgcaagaacaccagcagcggcctgccggcgcgacggctgatcgcatcgatgtggccgagctcgttgtagaccgtgtaccagttgtgatcgccatcgacgacccaggcatcggcctcgtcgacatcgacgagcgcctccaggctcgcttttgcgagatggcgaacgtccgggctgatcttcagccactccatgaattcgcgcttcggcgacggatcgatggtggtgagccgcccaccgcgcgcgcggcaatgctcggcgaggaagggcgacatcccgccgtattccgaaccgatctcgacgatctctcgtgcatccgccagcgcgagcgcctcgaggataaggtcggagaactccgagagggaatgaatcagcaggcctgccacgggcaaatcctccgccttgtaagggagtaagcagcgtgatcggcccggccgcacgcgaccatcgagccgaaagagctgtccgtgatcttgtacggcgcgcggcctaaattccggcggtcttcaccacgaggtcggcgagcctttcggcggcgtcgagccgccccgcccccttggcggccgcggccatggcggcaaggcgcgcgggctctgcggcgaaggcggagatttcggacgccagccggtcggaggtgaattcggtctgcgggatgcggatcgcaccgtcgaccttggccagcacgccggcattggcgaactggtcctggtcgatcgaacccggcagcggcaccaggatggagggccggccgatcgccgcaagctcggcgacggtgccggcgccggagcgcgacacgacgagatggttggaggcgagccgtgccggaaggtcggtgaagaatggcgcgagctcggccttgatcttgagcttgtcgtagaccgcacgcacgcggctcatgtcctcttcgcgcacctgctgggtgaggacgaggcggctccataaggcgggctcgagccgctcgatcgcgcccggcacgatgtcggccatgatacgcgcgccctggctgccgccgacgacgagcaggcgcagcggaccgttcgcttcaggcgcgacgtagggcacggcggccgcagctaggatcgcgggacgcatcggcgtgccgaccatcgtggttttcgccgacagtgccggatcacggtcgagcacgccgggcaatgacgtcgcgatggcgcggacgtggctcgacaggaaccggttggcgcggccgagcacggcgttggcgtcgtggatgatgctgggcacgccggcgaatttcgccgcgacgagcggcggcagcgtcggatagccgccgaagccgacgacagcaaccggtttcaatcgcttgatcagggcataggcagagagcgtgccggccgcgagcgtgagaccggcaaaagcgagctgaaacggattgcggccgcgcgcggtctcgcttctgacgacgtcgatcatgtccttgctgaacaggccgctgtagcgcagcgcgcgctcgtcggtgacgagacggacgtgaaagccgcgccggatcaactcgaccccgagtgcctcggccggaaacagatggccgccggtgccgcccgcggcgagaagaatcaggggggacgtgtccatgatcagggagttctacattgtctcggccgtcattgcgagcgaagcgaaacaatccagtgtccctccgtggcgacaggctgaattgcgtcgtcgtttcgctctacgcaatgacgagtcaggcgtaactccgcatcgcttcggcgtgaccgctcgcctcgacctcggtgcgcgggcgctgccgcgtcagcgccagcatcatgccgacgccgtaagccagcgacaccatcgaggagccgccataggagatgaacggcagcgtcatgcccttggcggggatgagctggaggttgaccgacatgttgatcgccgcctgcacgccgaacaggattgcgaggccggacgcggcgaagcgtgagaacatgtcctcattggcataggcgcgcgacagcgtacgcatgacgacgaaggcgaacagcgccagcatggcaaggcacaggatgatgccgaactcctccgccgcgaccgcgaacacgaagtcggtatggctgtccggcaggctgcgcttggcgacgccttcgccgggtccaagtccgaaccagccgccgttgtagaacgcctccatggccgtatcgacctggaacgtgtcgccggaggccgggttcatgaagcgcctgatgcggccggcgacgtgagggacgaagagataggcgctgaacagcccggccgcgccgaggcctgcgaggccgaacacccagatcatgcgcatgccagcgatgaagaacagcgagccccataccatcaggaccagcatggtctggccgaaatccggctccatcaccagcagcgcgaccagcatcaggagcagcactaccgccatcgaggtcgccggcatctccggccgcctggtcgattccgcgaacagccaggcggcgatgacgacgaaggacggcttggcgatttcggaggcctggatattgacgccgagcagcgtgatccagcgccgcgagcccttcacctccgggccgatcgcgagcgtgagcacgatgaggacgatgctcgccgcgaagatgatcagggccgagcggcggatcgcgcgcggcgagaggaaggacaccccgagcagcacgatgcaggacggcaccaggaacagcacgtgacggctgaagaaatggaagggatcgagcccgatgcgggtcgcaaccggcgggctcgccgccagcgacaggatcaccccggtcagcatcagccccaggatagcgcccatcagcggcttgtcgacggtccaccaccactcggaaaagggggtgcgttcttcacgggagagcatgggcggccgctttcggacagaggtccgtccattggtcgccgaggttggttaccggagggttaaggaagtgcggatgtttggagatggaagggagagcgaactggtgggacaatgcagccctacaccaccggcttaacacccggcagcgcctgcaccagctcgcggaacttggtgccgcggatctcgaagttgcggtactggtcgaaggaggcgcaggcgggggacagcagcacgaccgcgtctgtgagacccgcggcctccgcatcgcgcgcggcatgctcgaccgcgacatcgagggtctggctgatctcgtgcggcacctcgctgcccagcgtgcccgaaaactcctgcgcggcctcgccgatcagataggccttgcggatgcgcgggaagaagcccgtcagagtggtgatgccgcccgccttgggcttgccgccggcgatccagaagatgtcggcgaaggacgacagcgcatgcgcggtggcgtctgcgttggtgcccttggaatcgttgacgaacagcacgttgccgcggcggccgacctgctccatgcggtgcgcaaggccgggaaagctgcggaggccgccctgcagcacatcgaggctgatgcccatggcaagcgcggcggcggcggcacaggcggcgttctgcgcgttgtgcaggccgcgcagcgagccgatgccgccgagcgccgcgacctcgctgctggccccgcccgaggctagaacgatattcccatgctcgacatagattccgctcgccagcgggttcttgacggagatgcgcacgacattcttgccggcccggtcgagccggtcggcgatgtcgcggcaaaagccgtcatcgacgccgacgatggctgttccgccggccttcacaccggcgacgaggcgctccttcaccgcggcgtaatgttcaatcgtgccgtggcggtcgatatggtcttcgctgacgttgagcaggatgccgacggaggggtcgagcgagggcgtgaggtcgatctggtacgacgacatctcgatgacgtggacgcggcccatgcgcggcggctccagcgacaggatcgcggtgccgatattgccgcccatctgggtgtcgtagccggcgactttcgtcagatgcgcgatcagcgccgtcgtggtcgacttgccgttggtgccggtgatcgcgacgaacggcgcgtctggtgcatgccgccgccgttcgcggcagaacaactcgatgtcgccgatcacctcgcagcccgcctcgcgcgccttcagcacgctccagtgcggcaccggatgggtgagcggcacgcccggtgcgagcaccagcgcggcaaaattcgcccacgagacgctgcgcagatcggcggtgatgaaaccggcctgcacggccttggcgatgttctccgcattgtcgtcggcggcgatcacctcggctccacccgctttcagcgcatgacaggacgccatgccggacccgccgaggccgaacaccgcgacggtcttgccggcgaaggatgtaacggggatcatgatgaattcacctccgtcgttccggggcgcgcgcagcgcgaacccggaacctcgggattcccgatcgccccttcgcgtcgtccggaatgacgatcctgggcagccactatcttcaccgcagcttcagcgtcgacaagccggcaagtgccagcatcacagagatgatccagaagcggatcacgatctgcggctcggtccagccgagctgctcgaagtggtgatggatcggcgccatgcggaagatgcgtttgccggtgagcttgaacgacacgacctggacgatgacggagaccgcctccagcacgaacaggccgccgatcaccgcgagcacgatctcgtgcttcaccgcgaccgcgatggcgccgagcatgccgccgagcgcgagcgagccggtgtcgcccatgaagatcgaggctggcggcgcgttgaaccagaggaagccgagcccggcgccgagtagcgcgccgcacagcaccgcgagctcgccggtaccggcgacatatttgatctgcagataatcggcgaacaccgcgttgccggcgagataggcgatcatcgcaaagctcgcggtcgcgatcatcacgggcacgatggcgaggccgtccagaccgtcggtgagattcaccgcattgccggcaccgacgatgacgaaggcgccgaacaccacgaagaaccagccgaaatgcagcacggtgtccttgaggaacggaatcgtcagcgctgtcgaggcgggatctcggttcagccgcaccagggcgtagcaggcgaccagcgcgatcaccgcctcgatcagcaggcggagcttgctgccgaatccggtcgtggtctgcttggtcaccttgaggtaatcgtcgtagaagccgacgaagccgaagccgagcgtcaccgccagcacgatccagacataggggttgagcggattggcccacagcacggtgccgaccgtgaggccggacaggatcatcagcccgcccatggtgggcgtgcccttcttggcgagatgcgattgcggaccgtcggtgcggatcggctggcccttgccctggcggatgcgcagatgatcgatgatccagggcccgaacaagaatacgaacagcgcgccggtgacgacggcgccgccggtgcggaaggtgatgtagcggaagacgttcaggaaggtgcgaacggcaccgaagcccggaaatgtgttggagagctcgatcagccagtaaaacattcagacggtcctatggcgcctttgcacacgcggccttggccttcttgtaagcctcgcgcctcgcgcgcattcgctggtcttcatcatcgggcgggcgcgatctcggggataacgcacggcttggtgccgcaagggtgggattcgaacggcgccttccaagcagtttacgcctttgcctgcaaggcggccaccagccccggcacaaacttgttgacccagaacatcttcttgctgcccttgacaaccacgacgtcgcctgccttcagcaggctcgcgacctcgctgggcttcagcgtggcgggatcgtcatgccagccgaggcccttgccggccgggagcacatcatagaggtggcgcatcagagcgccgacgcagtagacggcgtcgatgccgtcgagatatttggcgaggccggtgtggtagcttggtgcgtcctcgcccagctccagcatgtcgccgagaaccgcgacgcggcggccctcgcccatgtggcgggcctggagactttgcagcgcagccgccacgctggccggattgccgttgaagctatcgtcgatcacggtgatatcaccgacggtctgctcgacgcctcggccggtcatgatgccgacgcggtcgagcttgatcgccagcgtcgcaacgtcgagatgcgcagcatgaacggcggcgagcgcggccagcgcattgtggacccggtgcggcgcgccaggggtgaggctgaaggcgatctccttcttgccgatcgccgcgacgacctgccagctctcgccgtggggcgcgtgcgcgacctcgtgcacctcggcatgctcgccgccgaagcgcacgaccttgcccttccactcgggcgccttgagcccggcgggcagcaccagcacaccgttctcgggcaggccgagcgagatcgacaccttctcgcgcctgatggcctcgagcgagccgagcttttccagatgcaccggctggacgttgacgaccagcgcgaccgtcggctgcgtcaattcgctgagccgcgcgatctcgccttgctgattcatgcccatctcgacgacccaaaggctggcgtctcgcctggcgttgcacagcgtcagcggcacgccccagaaattgttgaagctcgacgggctggcataggcgttcggataggccgccaggaactccttggtgctggtcttgccggcgctgccggtgaggccgatcaccggccctttgaagcgcgcgcgtgcggcacgtgcaaggcgccacaggccatcgatcagcgtatcctccacgacgatctgcggaacgcggatgcctgggatctcgtgcggcacgatcatcgcgaccgcgcctgcggcttcggccttgtcggcgaactcccagccatcgcgcgcgctggcgaaggcggagacgaagccgccgctcggcgtcccgctcagcgcgacgaacaggctgcccggcttcaccaggcggctgtcctgcgtgacgaagtcaatgggcacgtccggaaacgatccggtagcgccaagcgcccgcgcgacttcggcaatcgtccatattggcgcgctcatgcaaccctcgacgctaatgcggcggcaaccgcctcgtgatcactgaagggcagaacctccgtgccgacgatctgtccggtctcgtggcccttgccggcaatcagcaatgcatcgccctcctgcaagtcctcgatcgcagcgcggatcgcagcagtgcggtcgccgatctcgcgggcgcccttcgcggtggcgaggatcgcggcgcggatggcttccggcttctcgctgcgcggattgtcgtcggtgatgatgacgccgtcggcgttttcggccgcgatctcgcccatgatcggacgcttgccggcatcgcggtccccgccggcgccgaacacgacgaccagcctgcgcttggcatagggacgcagcgcctgcagcgccttcgcgagcgcatccggcttgtgcgcgtagtcgacgaagatcggcgcgccgttgcgctcaccgacgcgttcgagccggcccttggcgccttcgagatgttcgaggcacgcaaacacgtttgcggcatcgctgccggtgccgatcgcaaggccggccgagaccagcgcgttctcgatctggaattcgccgaccagcggcagccggacggcaaagcgcttgccgcgatgctcgagcgtgagctcttgcgagaaaccttcgaccacggcctcggtgagacggatgccctcgcctgccgcatcgccgttgcggcccaccgccatcacgcgcaggccgcgcgccttcgccgcctcgatcgcttcggtcgagcaatcatgatcggccgaaatcaccgcggcgccacccggcggcaccaactcgcggaacaagcggagtttggccgcgagataatgcgcaacggtcggatggtaatccatgtggtcgcgcgagaggttggtgaaaccgccggcggagacgcggacgccgtcgaggcggtactggtcgagcccgtgcgacgacgcctcgaaggcgagatgcgtgacgccctcgcgcgcgatctcatcgatctgccggtgcagcccgatcggatcgggcgtcgtcagcgagccgtagacggtgcgtttggacgagacgaggccgatggtgccgatgctggcggaggcatgccccagccgctcccagatctgacgtgtgaacgctgcgaccgaggtcttgccgctggttccggtcaccgcggcaatcgtggcgggctgcgccgggaagaaccttgccgcagccagcgccagcgcgcggcgcggattggccgccgcgatgaacggcaccttcgtcgccgcaggcgcatgatcgccaacgattgcgatcgcgccagcggcaattgcggcgtcgatgaagcgcgcgccgtcggtcttgctgcccgcaagcgcgaaaaacagatcacccggcttgaccacgcggctgtcgagcgcaagcccgcccacctcgagccccgcaacagcgggctcgatggcggcatcatggccaagaacatcctggcctaagaggtcgcgcagcttcatggtcttccagtcgacatgcccctgccggaaggccgattcccgaggaattccgactcagcaggggcgatggccatcccggttgattactgggttgtcctggatgctgcaagaataaggcgttcggccggaggcagctcaaaccgcggctcgatgcccagaagcggcgcgatccgctcgatcacctttccgccggtcggcaccgcgttccagcccgaggtgatgaaaccatgcgtttcgggcagcgcctgcggctcgtccagcatgatcaggacgtgatatttaggatcgtcgcagggcaggacggcgggaaaggaattgagcacgcgcttcttggcatagcgcccgttcacgaccttctccgacgtgccggtcttgccgccaacgtaataacctttgacatctgcctttctcgcagagccgacttcggcattgagcctcatcagaaaccgcatcttgtcgctggtgtccggcttgatcacgcgcttggccatcgccatggcttcggcttcgctgcgcttcaagaatgtcggcggaatcaaatagccgccgttcaccagcgcgttgatgcccatcacggcctgcagcggtgccaccgagagcccctggccgaacgcggcggtgacggtgttcagctcgctccagcgtcgcggcagcagcggcgccgcgctctcgggcaattcggtacgcagccgcgtcgtctggcccatcttggcgaggaacgccttgtgcgcctcgacgccctggttgagcgcgatgcgcgccgcgccgatattggacgagtaggtgaacacttccttggtgttgatgaagcgcccgagcggatgactgtcgtgaatcgtgaacttgccgtagtgcaggttcccgcgcgcatcccacatcgagttcagattgatcttcccggaatcgaggcccatcgccagcgtgaacgccttgaaggtggagcccatctcgtacacgccggtggtcaggcggttgatgcgatccgggtcgtgcgcttccttcggattgttgggatcgaaatccggcagggacaccatcgccacgatttctcccgtcttgacgttggagacgaggccggaagcggccttggcgtggaacttgtccttggccttgagcagttcgtcgcgcagcgcgtgctcgacgcgcaaatcgaccgaaagctcgatcggcttctgcaggcggtcggtggcaaagccggcgcggtggagatcggccaatccctggttgtcgagccacttctccaggccggcaatgccctggttgtcgatattcacgagaccgatgaggtgggcgacctcgttgccggtcggatagacgcgcttgttctcacgcaggaagccgatgcctggaatgccgagcttgtggacggcctgctgctgcgccggcgtcacctcgcgcttcagccagacgaagcccttgcgcgtcttcaggcgctcgcgcacctcggcctcgtcgaggtcgggaatggtcgcggtcaggagctcgatcgcctcatccttgtcgatgatgcgacgcggctcgccgaagaggctcgccgccttgacgtccgtcgccagaatggcaccgttgcggtcgacgatgtcgggccgagcggtcgcaaccacctcctgcgccgcggcgcggcgcgccccgtgggcgtcggcgccgatcgcgaacatcacgagccggcctccgatcaaggcgtagatcgaggcgaaggcgaccatcgcaagtcccacgcgcgcgcgcgccttggcggtgcgatcgacattgcgcccgtacagcacgctgcggatcagccgctgccgccagggttcattcgacttctcggtcgatcttgcaggcgttgcagggctcattgcctgtcctcgggttgaggcacggagccggtcaccgtgtcagggtcgctagcggcttcgatggcgttgagcatggccccgatcggatcgggctcgcccggcctgaacatccgtagcgggcgctccggcagattcttcagcgagtcgtattgcgtgccattgaccggcttgaggtgcagatgccggtcggacaggccctgcaggcgatgcggggcatcgagcttggcccactcggcccgcagtgccgcgatcgcgtcgcgctcctcgcggatctccgcacgcagacgcagtaccttttcggtgcgcgcggtggagtccatcttgatccggtagacatgggccgccgcgaagatcagcgcgccgatgacgaggaggtggatgatgcgcatgcgctagccgcccctcatcacgtccgagagtttcggccaggacgatgccccgtcggtcgcgtgcgccggcgccgaagtgcgctcggcggcgcgcagctttgcggagcgtgcgcgcggattttgcgccacctcgtcctcgccggcgacgaccggccgccgcgtcagcagctggaagctcggcgcgatctgggcaacttccggcagatgccgcgaaccgccgcccgtcttggaacgctcgccgaggaaattcttgacgatgcggtcttccagcgaatggaacgagacgacgacgaggcgaccaccgggcttgaggacgcgctcggccgcggcgagcgccgtctggagttcctcgagctcctcgttgacgaagatgcgcagtgcctggaacgtccgcgtcgccgggtgaatgtccccgggcttcgaccgcacgaccctgccgacgagatcagcaagcgcgcgcgtggtcgtgaacggggtctcctgacggtccgcgacgatggcgcgggcgatgcggcgcgaatgccgctcctcgccgaagagatagatgatgtcggcaagatcgctttcggaggcgcgcgcgacgacgtccgccgcagtcggccctgtctgccccatccgcatgtcgagcggaccgtcgagacggaacgagaagccgcggccggcctggtcgagctgcatcgaggacacgccgacatccatcacgacaccgtcgatggtctcgaagccgagcgaagcgcagacgtcggcaaggtgggagaaacggtcctcgaccagcgtcagccttccggcggaactcttgaccagctcggcaccaccggcaatcgcggtgcggtcgcgatcgatggcgatgagtcgggttcccggcacgtccagaatcgcacggctatagccgccggcaccaaaagtggcgtcgacgtagacgccgccctcgcgcggggcgagatacgcgacggcctcacggccaagaacgggaacatgaggagtcgagctcatgcgcgtgacctgaggatcgccaagcctgacacccaagcgagatcggcgtggaacaagcccataacgcctcgaatgattgcgcgtcgcggcggttccacgacaaaccccttgtccagcatggttaccgagcccgatcgtcccgggccgcaaacccagtgttcccagcagaatttgtcgggcagccatgggatttcgagccaaatacgctttggccgcctccggacgcgggtcggctcttcatccctcagtaacggtccttagcgttaagaaagcgttgctcgactcgtcacaagtggaaaggtgaagaaagggtgatgcttcatccacacacatcgccaaaatgaatccgttaaccgcgccgcgcgattgcgcgcgatggacggtaaaggaatagtaaagagaagcgcttgcccgctctccatccacttgagctgtttatgccgtccggttcgtccacgccgtctggatctgattcgaagcgtccccgcgttctcccggttcccaagaccgtggcgaacgtgcggacgttcgaacccgactcctcgatcgtctcggacatcattccgtcgcccaattacggcgagcgcaacaagggacggcagcccgatatgatcgtgctgcattacaccggcatgcccgatgtcgaaggcgcgctggcgcggctgtgcacggcgggcactgaagtgtcggcgcattacgtcgtgctggaggacggccgtatcgtgcaatgcgtacccgaggccaagcgcgcctggcacgcaggcgtctcctcctgggccggcgaggacgacatcaactcgtgctcgatcggcgtcgagatcatcaatcgcggacatgattggggctatccggagtttccgctgcgccagatcgcggccgtgatcgcgctgtgccgcggcatcatgctccgccgcaaggtgccggcccaccgggtgctcggccattccgacgtcgcgcccgcccgcaagaaggaccccggcgaaaagtttccgtggcattcgctggccaattccggcgtcggccactgggtcacgccagcgccgatcgtccggggcgaaactctgatgctcggcaccatcagcgacgccgtgctgagcctgcagcaggcgctggccagatatggctatggcgtgccgctgaacggcaaatacgacgccgcgacgatggaagtcgtcaccgcctttcagcgccatttccgtccggcgcggctcgatggcgtcgcggatcattcaacgctgtcgacgttgcaggccctgctggcaagtctgccgcaagacgcgacaagtgtcgcgtcgaagtgacgggatcgccgaacgctgcatcatgacgggagctcttgcgacggctgggcgcgtcgcgatctcgacttgacgagactgtcacgaagccccatgcgtattccgtcagtcggccggacggccgctccggcaagtgccgaaaggccgccggggaggaaagtccgggctcccttgacatgcggtgccggataacgtccggcgggggtgaccccagggaaagtgccacagagaacgaaccgcttcctcctccgaggaagtaagggtgaaaaggtgcggtaagagcgcaccgcggttccggcaacggggccggcatggcaaaccccaccgggagcaaaaccgaatagggacggcatagcgggctgttcgcgcaagcgataacgccgcggggcgatgtcaggcccgccgtccgggtaggttgctcgaggccatgtgcaaacacggtcccagaggaatggccgtcacgtatcgttcgcgcaagcgggcggtgccctacagaacccggcttacaggccggctgatgttctaaggcgttttcgagcgacgtggacttccggttcgcgtgaggaaaacgcgtcttgctgacgaagcagcgaggggttcggtgccaaccgcatcggacccctcaccattttcaccgagcgcgcaaaataccagtgtcgtgcgcaccacgagccccggaatgacggccgctggctaagcgacgatcttctccaataccgccatcagcgcctgcggcgcggtaacattcggcgcatggctggcgtcgagctcgaaatagcgccagccgtgctcgttcttcgtccgcctcgcaaactgtccgaacacgtcgcccggcggaatgcgcgtgcaatagatgtagctgcgcggcatcgccggctcgccgtgttcgagccgcaagcgcgcctcgaagcacttgatcggcatcgggacacggcgcgcgttgagccagtcgagatcggcttgcggtgtgtcccgaggcggcgggttcggcgcaatgcgatagccgtcgccgtctgcaaccgccttgcgcatcggctcgcgcccgctttcgttgagatcgaacagcgactggccgtcgcgcggcacgaaggcgtcgagatagatcagctgagtcacgcgctcgcgcatgcgatcagcgacgccggtcgcgaccatgccgccatagctgtggccaagcagaacgatgtcgctcaaatcctcgaaggcgatgacgttgaggatgtcctggatgtgcgtatccaggtctatcgcgggacttgcgagatgggcgcgctcgccgagcccggtgtaggtcggcgccaccaggcggtgcccggcttgtgccaccagcggatgcatcttcttccaggcccatccgccggaccacgcgccatgacagagcaggaaggtcttcgcgcgtgcggccatcggcgtttccatcgttcttggttgtgcgatggagtgtagcggccgggcgcacgccgctcaggccgcgcgcgtatccgctttgaccagcaccggtgcaagctcgccgccctcgcgccgcagcttgcccgcctcgaaaccgtgcattccgagctgccattgcaacccgacgatggcgcccttggtcggctgcagaagtgcgagcgaggcgatcagcgtcaccgggagccacaccgcgagctggagccattccggcggcgcgtaggcggtctcgaccgcgaggatccccggcaccacgagatggccgaccacgaccatcacgagataggccggaaagtcgtctgcgcgctggtgaaacagctcctcgccgcaatgatcgcaggcgtgagccactttcaggaagcggccgaacatgtgcccctccccgcaattgggacatttgccgctgaatccgcgccacatcgcctttgccagggagactgtcgccatgaccacacctcttccttttcgatgatccatacaataatgtcttgtatccatacattcaaaggatatgggcctgatttgcatgggctggatccctacaatctccgaactctcgggtccgcgctaccagcgcatcgtcgaggccatggaggccgacatcgctgccggccggctggtacggggccagcagctcccgacgcagcgcgcgctcgcaaaagcactcggcatcgacctcaccacggtgacgcgcgcctacaccgaggcgcggcgccgcggcatcatggaagcccgtgtcggccagggctcgttcgtttcggagaccagcgcgcgccgctcggtcgacctgccgcatccggtctcgatcgacctctcgatgaacgtaccgccgcatccgctcgaggcgcagctcgacgagcgcatcaccgcgggcatggaagccatccgcgcacaatcgggcctgaccgcctatctcaattatcaaccgcccggcggcagcctccatgaacgcgaggtcgcggcgcgctggctgcgcacccgcgttccgcacgcgcaggccgacaggctcgtgatctttcccggcgcacagacgatcctcttcagcctgctcgcccagctcgcgcggcccggcgaaaccgtactgaccgaagccctgacctttcccggcgtcaaggcggccgccgcgcggctcggcatcaagctggtcggcgtcgccatggatgaagccggcatccttcccgacgcgctggccaaggcgtgccgcacgcaccggccgaaggccgtctatctgattccgacgctgcacaatccaaccaccgcaacgctttccgacgaacgccgtggtgccattgcaaggatcgttcgcgacaccggtacgatcctgatcgaggacgacgcctacggcctgctcgaccgctcggcctcgccgatcgcaagcctcattccggagcggacataccttgcgaccacactatcaaaatgcatcgcgcccgcgctgcgcgttgcctaccttctgacgcccgacagcggcgcgcagcgggacatgcgcatgtccttgcaggcgaccgtgcagatgcctgcgccgctgatggtggcgctggtgacgcattggatcgaaagcgggattgccgatcgcatcatcagcgccattcgcagcgaggcgatcggccgtcagcagctcgcgcaacgcacgctgaagggttttcaattgctggccaagcctgccgcacatcatctgtggctgcggctgcccgagggccggctggacatcgcggcagatctcctgcgaaacggtcttgccgtcgtcgcaggcgatgccttcaccgtcgacggggcaccgccgcatgcggcacgtgtctcgctgggcgcggcacggaacagatcggaattgacggaggcgctgcgcatcctgatcggcgcgctgcagaagccggccgacacgaggcagatcgtctagatcatcgacgatgacggcggtggccggagcgcacctccggtgtcatcgatgacggatgggcctgcgatgcatacgcatcggcaggcatcccccgctggccaagagccgcacgcgccgccggcgtgagctggccgccattcaggacatcgcggtcaggatgagcggcctgataggccgcaggctcggaaaactgagccagggccaaggtcggcgccaacgccaccgcgagcagcgcggctgcagcggcaatcctggtaagggtcatcgccgttctccatatcgcctacaggactggccgatccggacgaatgatcgcatcgggtggtccgaggattgaagtacggccgtcatgtaggcgcgtctttcgcgaatgcccgaaccccgcagatcacgcttgcgtgcagcatggattgacctgcaaggcagcaggcatgttatgcgagcgctggcgatcaccactcgggatcgtcccttgcgacaaggctaatctgttggaaacgctcacctacatcctgctgctgttcggcgctctcgccggcggcttcgtgtcgggacttgccgggttcggcaccgcgctgatggcgctcggcatctggctctacgtcctgccgccctcgctggcggtaccgctggtgctgatctgctcggtgattgcgcagacctcgacgctgccctcgatgtggaagagcttcgatctctcgctggtctggccgttcctgatcgggggcctgatcggcgtaccgctgggcaccatgatggtcgcctcggccgatccgaaagtgttcaagctcagcgtcggtgtgctgctcctgctgttttcgagcgcgctgtacctcaacaagcggccgctcgccttcaagttcggcggccggatcgcggatggtgcgatcggctttgccggcggcatcctgggcggactcgccggcctgtcggggccgttgccgatcctgtgggccaacatccgcggctggaacaagcacgaacgacgcggcatcttccagctcttcaatttcacggtgctcgccaccgcgctggtgctgcagacggcatcgggcctggtcgaactgaaagtggtctggctcgccctggtcgcctttccgggcaccctgatcggcacatggaccggcgcgcgcgtctatcacgccctgagcgacaagcacttcggcgacgtcgtgcttggcctgttgttcctctcggggctcggtctcgtctggaacagcctgggcacgcagtaaagcgcgatgacatgaggatcgtcatcgcgctttctcattcccacctccggcagcggcgcgtcggaagattcgccccgccgccggggcctcattccgctgccgcgatccgtccgagctccaccacctggcgctcgaacaggccgcgatagatgccgcccggcctggctgcgagcatcgcatgcgtgccttgctcgacgatctcgccgcggtcgaacaccaggatgcgatcgagactcttcacggtcgacaggcgatgggcgatcacgatcgaggtgcggccgttcatcagccgctccatcgcctcctggatcagcgcctccgattccgaatccaggcttgaagtcgcctcgtccaggataagcaccggcgcatccgcaaggaaggcgcgcgccagcgcgacacgctgacgttcgccgcccgacagcttcacgccgcgctcgccgaccagcgtgccatagcccttcggcaggcgcaggatgaagtcgtgcgcgttggctagccgcgccgcctgctcgatcgcctcgaggctggcgccgggccggccataggcgatgttctcggcgagcgaacgatggaacaggatcggctcctgctgcacgatcgcgatctggctgcgcagcgactgctgcgtggccagcgcgatgtcctgcccgtcgatcagcacgcggccgccggtgacgtcgtagagccgctgcaccagcttgacgaaagtggtcttgccggagccggagcggccgacgagcccgacccgctcgccggcgcggatcgtcaacgacagcccgtcatagagcggcgcgcgatggccgccatagtggaacgtgacgtcgtcgaacgcgatctcgccgccttcgatcgagatcggccgcgcgtcgggcgcatcggcaattccgatcggctcgtcatggatcgccaccagctcgtccatgtcgttgaccgagcgctggaggttgttgatgtgcatgccgacgtcgcgcaagtacgcgtggatgacgtagtagctcgtcagcacataggtgacgtcgccgggcgaggcgtgacccgacatccacagcagcaccgacccgccgatcacggacgcgcgcaggcacagcagcagggacagctgcgccatcgccgtgtaattgtagcgataccaggtccgccgcacgcgcacgcgccagcggttgatgacgcgggcgagccgcgtgtcctcgcgcagctccgcgccgaaggacttcaccacggcattgcaggtcagcgcatccgcaagcgtaccacccaccttggtgtcccaggcattggagacgcgtgcggccggcgcaatgtagcgggtcgagaacaccacagtgatcgcgacgtagacgatcgccccgaccgcgatcacgacgccgagcgaggtccagtgcatgccgaccaggatcatcgagccgaccagcaccagcagcgagggcgccagcgccatcagaatggtgtcgttgagcaggtcgagcgcccacatgccgcgggtgattttgcgcacggtggatccggcgaaggagttggcgtgccagtcggtcgagaagcgctgcacgcgcgtgaacgcgtcctgcgcaacatcggacatgatcttcagcgtgaacggcacgatggcttgaagaccgacgagccgcagcaccatcgaggccgcgcccaacgccacgatggcgccgaacgcgaccagcgcggcgtgccgcgcatcggggtcggacgggcctcgcgtcagcgcatccaccagatgcccggagaataccggcatgaacaggtcggcaatggtcgcacccaacaggccgccggccaccacgaggccgcgcccgggctgcttcagccagtgccggaatacgaagggcagcaccacgcgaatggcggcaggcttttttgacagagcggtcatgacatcatccggccgcgcgcgcgggccggctccatcgatggacgcagaccggccgcgagggcccggacggcgtcactcaaaactgactttgacttggggagcggagcgatcgggacgcctggtctgaacctcggcccaatcgaagctggcggaagaggcctctagcaggccgcgtacattccgagccgagcgatcatcgagcgcgggcgtacgatctgcgaatgcgacgaaatcatgcaaatccctcccggtccgaatgaatgaggtgcgctttatagatgtgccgttttcgattggcaacggggctcgcgcgagatcacgcacgagtgttgcagatgggtacgcaggccttcgccacgctcaagctcggatcgcgcccctaatgcgcgtcgccgccggcgccgaacggcgaagccggtctgtccagcagcgcgaccagcaggctgaggccgagatagaacaccgccaggatgaggaacgcgtcgccgaagctcatcaccacggcctggcgatgcacgatctggctgagctgcttcatcgccatcagcgcggaatcgccgagcccctggaacttctgcatgaacatggtcagggtttcggtcgcggtggcattgccccaggtcacgcgctcctggaggcgcgcgatgtgcaggtcggtacgatcattgagcacggtgttgatgacggcgaggccgaccgcgccgccaagattgcgcatcaggttgaacaggccgctcgcgttcttcactttctcgggcggcagcgtgccgagcgcgacgttgttggtcggcaccatcgcgaacatcatgccgatgccgcgcaggatctgaggcaccagcagctcgtagaagtcgtaatcccgggtcatccacgtcatctggtaggagccgatcgcgaacacgatgaggccgaaggcgatcatgtagcgcatgtcgaccttcgccatgaggcggccgaccagcggtgcgaccaggaacatggtgatgccggagacgaacatggtctcgccgatcatcagcgcgctgtagccccgcacctcggcgagatagcgcggatagatgtaggtcaggccgtagaggccgatgccgatgcagaattgcagcgtgcatccgacggcgaaattgcgatcggagaaggtgcgcagattgacgatcggctcggccgccgtgaacacgcgccagaagaaggcgaccgcggagagcccgcagatccaggcgcagatcgcgaccgaggtatcctgcatccattcatattgcggtccttcctccagcacatattccagcgtgccgaggaagccggccatgaacaacagcccccaccagtcgaagcggtcgagcagttcgaaatgcggctcgtcgaaatcgaccagagccagcacgccgatggtgatgccgataccgggcacgacattgatgaagaacagccagttccacgacatcaggtcggtgatgtagccgccgaccgtcgggccgatggtcggggccagcgtcgcgaccagtccgatgatgggcccgacgatgtggaacttggtgcgcgggaacacggtgtaggccgaggcgaatacggtcgggatcatgccggcgccgagaaagccctggagcgcgcgccagaggatcatctcctcgatcgtcgtggcgaggccgcagagcaggcttgcggcggtgaagccggccgccgagatcgcgaacagcagtcgtgtgccgaaggcccgcgacaggaaacccgagagcgggatcgcgatcacctcggcgatcagataggcggtctgaacccaggagacctcgctggagctcgccgacaatccggcctgaatctcgctgagggaggccgacacgatctggatgtccaggatcgacatgaacatcccgaacaccatgatgatgaacgcgaacagccgcttcggcgcgatgcggtccgaggcgggatgcgctatcacggcagatgaagcggtggcggcgtcggccatcgtccgatctcgcaggctcgggtcggctactgcggatgaaccgtgggatcgtcgagatcgacctcactgtcggcgtcggcggcgcccttgttggtgtcgacgatcgcatacaccgacatgccggcgcggagcaggttctgcttcgccaccgatttcggcacacggatgcggaccggcacgcgctgcactatcttggtgaagttgccggtggcgttatcgggcggcagcagcgtgaacaccgagcccgcgcccgcggcgatgctgtcgacgacgccggagaacttgcgcatgccgtaggcatcgaccttgatcgtcaccggttgaccgggccggatgcgcttgagctgcgtctccttgaagttggcgtcgatgtaaacgtcgtcgagcggcacgatgttgccgaggcgctggccgaccgcgacgaaatcgcccgtgttgacgaggcgattggagaacgtgccgttgaccggcgcgcgcaccgcggtgaagccgaggtcgcgctcggccttggcgagcgtggtcttgagctcggcgagctgagcctgggcttcggcctgctgcgccttggcgacatcgacattgctgacggcgacgtcgtaggcagcctgcgcggccttgacagcggcggcgccctgatcgcgtccggcttccgagctctcgaaggtggcgcgcgaggcgaagcccttgctgctcagcgcttgctggcgctcgtagtcgaggtcggcgcgcttgaggcctgcctgcgccgagacgagctgggccttcgcctgcgcaacctggctgtcgagcgcggcgacctggcggccgatgcgatcgatggtggcttgctgagtggcgatcttgctcgcggcggcttcgaccgcgatcttgtagtcgccgtcgtcgatgcggaagacgatgtcgccggcgcggaccgacgtgttgtcgccggggaggatcgaggcaatgtggccggaaacgcgcgcgccaagcatggtgttgttggcgcggacataggcatcgtcggtggagatatagaaacgtccgaccagcgtgtaatagccggcatagcccgcaacagcgagcgcaaggaggaggccgacgcccatcaggacgaatttgcgcttgccggatctcggagcgccggcggcgggcgcatctggcgcggatgcagccggcttgtcggtcacgggcttttccggcgtctccggaggcggccgtctcgcgtcctcggcgacatgagtgcgcaactgctcggcagggggtgcggatgcctccgacgcgacatcaccgctcgactgctcctccgccacttcctggcgaaggacgcgcgccgtctggtctctcgatacggccataacggcctcccccaaaatatacgcaaccgaggtcgaccgtgcttgcggccggttcctcgctcattccaaatatcattgaccgaacggttcggtcaatatacatatcaaactcggactggaccctagtgggtcgacctttcgttggcgcttcacagttcaacatcccggccagaaatcttccgagaccctaaaccaatggttgtagccagcgacgaacatctgcacgtcgtccaagatgaggacaattccaagcgccgccagatcctggacggtgcccgcaaggtgttcatggacctgggtttcgacggcgccagcatgggcgagatcgcccgtgccgcgcaggtctccaagggcacgctttacgtctacttcgccgacaaatccgcgctgttcgaagccatcctcgaacaggaggcactccggcacggccaggtcgtgttcaatttcgatcctgcgcgagatgccgagacgacgctgaaggagttcggcctcgcctaccttcagctggtctgccggcccggcggcggatcggcgatccgcaccgtgatggcgatcgccgagcgcatgcccgatgtcggccgccgctattatgcgcgcgtgctggacaagtccatcaaccgcctctccggttatctcaaggcccgcgtcgccgccggcgagcttgagatcggcgaatgcgatctcgccgcctcgcagttcatggagctgtccaaggcttcgctcttcctgcccttcgtgttccaggccgcacccgcgccgtcggaacagcgcatgaccgaggtggtcgagagcgcgacgcggatgttcctggccgcataccgggccagatagcaccgacgagccacgcgttgcacgggccggccgcgcgacactatattgcggtcatgtctcgtgatcttcgcccgccggtcgatatcctccactacgagatcgtccaggaacaggcctccgcgcttggacggatgggccgcacactcgaacaggcgctgacgcgtttgcgtgagttcgacgccgtgcacgcagccaccgagttgccgccctcaatgcaatcggccaggcgcaagctggtggtggaagctggccaggccctgtggatgttcgtggtgcaacgcgaggcgtccggcctgcgcgacagccgccatatcatgcgcacctacaacgtcccaagcgaagtgcagcggtgcatggggctggcgcccacgccatcgaagccggcctcgacgtgacgccggctgcggccctcagtcggtgatctgcttcctcaacgccgcgagatcgttgaccaccatcttggtcggaccggtcgagatgatgccgtcgtcctgcagacggttgagaatcaggctgatcgactgccgcgttgccccgatcatgcgcgcgagattggcctgcgtgatgcggccgagcgaaatggggccactctcgtcctgcgcggcattctcgcacatcttcaccagcaggagcaccagtcgttccgcggctttctgccccgccagcgtctgggccagcatggaataggtctcgcccttgaagccgagacactcgatcaacgccacggcgaacgatggcgactgcgcgatcagccgacggatcgcatcctggtcgagatgcaacgcttcgacccggccgagcgcgcgcgccgaccagctatggcggtgatcgccaaggatgtagggtgcgcccacgaaatcgccggcctcccaggtcgacagcatcaattcgcggccctgcgtcccggaatgggtgctttcgacgatgccgctcaggatgatgtggatgccgctcgcgggctccccctctcgcagcaggtattggcggttccggtagctggccaacctgccggtccgcatcaccagatccagatcgggcttatccagcgtattcagcacatatcgtccggtcccggcccttcgctgttcggcacacggctcacctggatcggccacctcatgggcatgactgcgccccacgctcggtctcccttcgagtgacggctcgaaggctaggaggtctccggtcggattgcaacgcggcgcaaatgctcaagcctgggctgccgctcccatgaacgcgcaggcgaggtcggtgagcagacgctccctccccgccggcgccagaaacgtcacgccgtagggcacgccggccccggtcaccgcgtgcgggaccgcgactgccgcgagcccgagcggattggcgtagttggtgtagtagccattgttgaagttggccgtcagcggatcacgcgcgacatcatcgatgctgagcacggttccgaccgttggcacgatcagcgcatcgtggtcttgccagaagtccctcaacgcgtgttggacctccttgaccttgtagagagcgcggtaggcatcggctgcggacaacgtccggctgccgaggacgagatcgcgcacgatcttgacgcccacaccgggatttgcgtcgaggaacgcgccgaccgagacatcccgctcggccaggaacggcccgaagaacatcagatcgttgatcgaggtgaacggcgagaaatcaaccggtgcggccggcatgtcgatctgccgcaaccggcgaagtccatcgccgaacagactttcggtctcgggattgccaaagaatctgagctgatcgaggcgcggcatcgcgatgcgaaaccgccgcgcgggcggccgctgctccgcccagcctggaaagtcgagcggcgagaagcagtcgtcggcatcgcgccgcgccagaacgcgatagatctcgtagccgtcgcgcggctcgcgcgtgtaaagcgagatcgtgtcgaagcttcggcaagcatagaccatcccgcgctggctgaaggctccgggcgccggcttgaagcccgtaacgccgcaataagacgccggcaccctgcccgatccgccggtgtcggtgccgaaggcaaaggacgatgtgccggttgcgaccgacaccgcggcccccgagctggagccgcccggaatgtaatccggattatgcgggttgcgggcgataccgtagggcgagcgcacgccgacgaggccggtcgcgaactggtccatgttggtctttccgacatagatcgccccggcggcaatcgcgtcagcgacgacaggactcgtatccttcgcgaggtaggcaaactccggacacgccgaagtcgtctgctcgcctgcgacatcgatgcagtccttcaccgagaagatgagtccgtagagaggcagcctgtcgatctcgtcgatacgcgcatcgagcgcgcgcgccgcggtcatgacattgtcgggatgggcggtcgatatccataccccgctctgatcggcgccgctcaggcgcgacagcacatgcgccgcgacatcggaaggcttgagcgcgccgcttcgataggcggcgcggagtgagcctggcgagacatccatgtcagcggccgatcaccttctcgagataggccggctggatgaaggcctcgaagccggcgcgcggcaacagcttgggcaggcgctcctgcttgaccaggaaatccgcggtcgcgaccagggtatcgacgaactcgcctttcttcgcggatgtaccgagatactgctccgtaagctgcttgtcgcagggcaccattccggtgcccttcatcatgcgggttgcgtcctcgagcggcagcgagagctcctccgcaatgatctcggccgttttctccggattcttcagccagaaatcgatgccatcgcattcagccttgacgaacttctcgacgtaggacggatacttctccgcgaacgcgttcatgacgaccccgatgtcccaggtcgggtagccgcgcctcgccatgtcgcccgaggtgacgaggatcttgccgccgttcttcacggccttgtccaggttcggctcccagaaccatgcggcgtcgatgtcgccgcgaagccaggcggcggcaatgtcggacggggcaaggtcgatgatcttcatcgaggcagggtcgacgccttcgttcttcagcgcctggagcagcaggtaatgtgtggtcgaaccgaagggggcagccacggtcttgcccttcaggtccttgagcgaagtgatgttcttgtctgcgcgaaccaccatcgactcgacatagtcgagcatgttgatcaccaggatgcccttgatcgggagcccgcgggtcgcgccgatagcggtcggcggattgccgagaccaccgaagtcgacgtcgttgcccgcgattgcgcgcagcatgtcgccgccgccgccgaccttgacgtatttgatgtcgacgccgggcatctccttggcgagcaggccgagatgcttggtgacaagctgcgcattcaccaaattcaggtagccgaccgtcaccttgggcggcttgtcctcggcgcgagccgtggcggtgaaaggcaacgtagcaagtgcaagcgcggcaacaagtctcttcatgtcgatctctcctagatcatcaggttcgggcccacggcatcagtaatttggcgatcgcgcgcatcatcaggtcgagcacgacaccggtcaggccaagcacgatcaggcccatgatcacgacgtcggacagcaggaattttgcggcatcccagatcatccagccgataccggccgaggccgcgacgatctcggcggcgacgaggacggtgtaggtgaagccgagtgagatgcgcatgccggccaggatcagtggccccgctgccggtagatagacgtggaagagcagatggcggcgtgtggcgccgagcgattgcgcggcacgcacgtagaccggatcgacgctggtgacggcctggatcgtcgagatcacgatgcccggcaaacctgcaaggaacagcagcgacagcttggagctttcgccgatgccgagccacatcacaaggagcgtgtagagccctagtggcggcaacgggcgatagaactcgatcaacggattgagcaacccacgtgcattcctcgagacccccatgagaacgccgagcggaatgccgaccagacaggccaatgcgaaggccacgaggatgcgatagaggctggcgccgagatgctggagcagcgtggtcccctgatagcccttcgtcatggtcttgacgaacgcggcccataccgcctgcggcttcggcaggaatagctcgttggcccagcggatctctgtgacgatgatccatgtggtcagcaacacggcgacggtgagcgtcgagagcagcaccgaccgcgagacgttcggcatcctcaggctgcctcgccgcgtgcgatcggccgagatcggcatggccatgggagctgcctcgacgctcatgcgcgcactcccaggatctgcatgatggtcagcgcgtagattcgggtcgccatcaccgacttggtaaccgagatgttctcgttgtcgacggcccaaccatcctcgccgggaccaaaggtcaccgcgttgatcccggcttcgcggaagcggatggtgtcgttgaaggcgttcttgcgattgacaccgggctcacgccccatcaggcgccggtagaccgcgcgaagagagcggcaaggctcctcttcgacgggcaccggttcggtcgcgttgacgaacagcgagccgggcacttggcggacctcgacctcgacgtcgttgacaccagcaaacgtctgttgccccaggcgctcgatgtcggaaatgacgctgccgagggtcatgcccggcacaatgccgaccaccgcgagcgtgatcgtgcaggcatcgggggagaattgcatctctccgggaagaccaccacggatgcgcaccacggagcaacatggcggcgtgtgccccatgaacttgctcggcacatgcgtgaaggccatctccttcagcctcggcagcagcttccccgcttccatgatggcgttgacgctgatgtcgggccgccagatatgcgacttgatccctcggaccgtcacctcgaccaggcaatggccggagttggccaccgagaggttcatgccccagtccttgccgacatcaccccaagccgtcggctctgcggtgatctcgtagtcggcggtgaggccgaccttctccagcatataaatcgagccctcggtgccgttgcgttcctcgtcgacggtgtagcagcacatcagcgtgccatcgaacttcacgccttcttcgatcagggcctgcaccgcgagcagtgatgccgcaagattgccgcgggtatcggaggtgccgcgcgcatagagtcggtcgccatgccgcgtcgccttgaacggatcgaaatccgtcatgtgccatttctccggctcgacgacgggataagtatcgagatgatcgttcaagatcagcgagggcgcgccctcccgccccttcagcacgccgagcacgttcggccggtgcggctgcgcgctgtgcttggtgacgaccatgccgagggcttcgagcttgcccgcaaccagcattgagatcgcctcttcctcggcgggcggcagatcgggatcgagcggatttcccgagcgcggctgcccggtgcggatcaactccgatgcgagttcgagccagcgctcctccgtgatgcgcgacagcacacgctgctcgagatcggagtaaggcggtgtgacaggcatctgcatgacgggttccgttggctcacggcgccggccgcgccgcttcgttgcagcaccctcattgcagcgaatgtgccaaccgtcagaaaccccattcgggcaacgaatagcggtttcaattcaatgccttggatgaaaattgcgactgtgcaaatttttgcgcggcagccgcgctttgccaaagacacagcgccggctgagcagaccagccgcatccgggcggttggtctccgctgacgccgcgcgtcgcctattcgtcgatgtagtcgtcgtcttcgcgcttgcgcgcggtgctcttacgcgcacccagcgagccagtgactgacggttcgcgcgcattggcataagggctgcgcgattgcgcccgcgcggcgacctgttcgccggagacggcggcgggctggcagatcaggcgacggctggggcggcgcatcagatcgacgtggatatgatcgtagtggaagacgttggaacccggcgcgagcacggtggtgaaatgcgcgcaggcgcctgcctgcacgtcgcgcaagaagccctgctcttccggcacgccgcgccagccgtccttcacggtcacgcggcgtccgtcggcgagcacgaaggccgagatgtcgagcgcattgccgaaggcgtgctcggagatgtgggcgcgcgagttgccgttcatgccgcggcaggaataggccgagatctgcttgatctcggcgacgcgcacgccgaaccagcgcatggccgagggctgcacggtgtcggcgagccagcggtcgagctcggacacgatcggacaggccagcgtcgccgtcggcttgatcgccacgggaccaacggcggtgacgggattgccctgcgccggaccaagacgcggcagcggctgctgcgcgggggcctgcgaataaggcgccggccgcgccggatagctcggcgcattcatgtagcgcgaggcacccgcggcatcgatgccctcgggcggcagatcgatctcgtcttcctgcggcgccacgccgggcgcgttcagcgagatcggtccggtcgagccgccgtagccggagggctggcgcacctcgctgtcgggatagttcgggcgcggcggataggaggaggctggatagttctggctctgcggatagttcgatcgcggctgcgccacgggccagcgcggctggctgccgatgttccccggcggacgcagttgctcgtcggcgaagccgtaggtgccggaggtttctccgatggctgcgaccttgagtggaaattcggcgccgcactggccggggccggagatcggctcgatgcggacgatgtccgcactctccttgaccgcccccgatttcaggcatgcggcctccgcctcggcccgccatggttcacgttcggcctgaaagaaaccgcgtccgcaacccgctagcgaaacaaggacgatggagccgacgagatacaaacgaactccgcgcgtcatgcacgcacgttcggtgaatttacttaaagactcttcaacgtgttgatttcaccttccttaaccatggcgcccacgtggcccggcacgctgcgccccccttgagcgacagcaaggctgacttttccgttgagagactctctgttaaccatgacggccgcggcaaagcgcgcgaccagcgggagcgacctcatgacgttcaccggcagactgagcgttatcaccgcctacttcgccatagccttcgtcggcgccatcgtgctcgggatgatctagaaggcagccgtcgaccatgcaggcagcttgcttgccctcccccggacggtgacaagaacgcttgtcatcacgaccgtgcactccattgccgcgacgtcgtgatcatttgctcgcgcggcgcatcgacgcgcgtccagtcgttgccggagcaccagaagcggccgagcgcgcaggcttcgacgtggagcttgcccgagcccttcagcgtcatcgtcgcacgataggtgttgccgctggcccggctgtagatgctgccggtccagacgtcgtgcttcttcggcttcatgttgacgagcacgctctcgcccctgcgcaaggaatccgtcagggcgtagccgcacagtgcaggcccacagcgctcgatgcggaccgtcccattggcacccgcgctctcccactcgccaagcggcgtgtaagcccggtcttcaatcggcggtgcaaccgttgcggtgtgcatgatctcggagtttggagcggtgaccggcggctcgctgcgctccagttcaatccgcggcgggttggagctcagcgcctccgatcttggcgtcgtctccagttttggcgtctccaatcttgaagccgccgacggcacaacggactgcgacgccgtcgcggcaagggcgggaggcgccggcggcgatggcacgacctcgcttgcttgtggcggtccgaccggcaccgtcggacaagcaggctgcggcgcttggacgaccggcgcgggcgcctgcggcaaggcccgtgctgggccggcatcttcggtcggccgcaagctgcgattcgacactgtgacacaggacgcggaccggcaatggcgcggcgcctcgacatggaatcggtggccgccaatcgagaaggtgtaggagccggcctcggctgcgggcgcgaccgccaacagcgcgatcgatgtgccaagcgaaatcgcaagccgctgcatcggcgtctccctcaatgccgcgaccactttgcgcagagcaagtgcggctgaatgtgcgccacctcacccaggcggcatgcggccgttgtgatgcccatcacagaacgcccggtcaccccggcgtagggtcaaaccacgcttcattcaccagcgacatcaatccatgtcgggaccacgcattcgggaggttgtcatgaacaggcttaccatcgctgccgccgccctcttcctcgcctcgactgctgccgcgcatgcgggcaattcgatctcgttccagatcgaggggcagcgcatccgcatcgagacgccgcgcaattgcgcctcgctcgattgcgtgactatcgtggcgccgggcctttcggacaagccgatcaagctgaacaacatcaacctcaagggcctcggcggctccaaggacgatgacgtcgacaccacgcccgcgccggcgcccaccacggcgcagcccgccccggctccggtgcagcagcagccggtgcagtcgaccgcgcccgccgcaccggccgtaaccacgcccgctgccccggccggagccgtcgccgccgctcccccagccgccgtcgtcaacacgcagcctgcgcccgttgctgcgcctgcccccgtcgccgcgcccgctcccgtggccgcggctcccgctccggccccggtggccgccgcgcccgtggcagcagcgaactccccggtcggcctgtgggcgaccgaagagaacaagggcaacgtccgcgtcgaacagtgcggccccaatctctgcggttacgccgagaagaccaatgagcgcatcctgatcaacatgaggcctgcgggctcgaagtggagcggccgcattcgcgatcccaattccggccgcaactacgactcgacgatctcgatgaagggcccgaacgcgatgcgcgtgcagggctgcgccttcggcggcatgttctgcggcggccagacctggaagcgcgtgagctgacgcgcggagcgcgtcgagccgggcgacacaatggttcgctcacgcctcgccgcgcaaccacgccttcaccttttgaagcagaccgtgtcgtagctgatcgaccgacgcgacttcagccggcgtcagcgtctgcaaggccgtaccaatgtcgtcggccgcttgcgccgcgtcggggagcggcgatgccagccccgccgccgcgagcgcgatcgggccaacctggtagaggaacgcgcgttcgtattcccgcgacagccgcgcgatcgcatcgtccaatcccagccagtcgaccgccttgatgtcgttcatcagcttgcggaccggcccatcgccagcctccatccgccagaaatgcacgaccttggagcgcccgccggattgataggcgagcgtgcccagaaattcgtgcacggcaacgtcgtggcccgtttcctccagcacctcgcggtgcgcggcttccttcggcgtctcgccgtcgtcgagcttgcccttgggcaggacccattcgttgcgcttgcgctggcgcacgatcgcgatcagcggctgagggccccgccgcaacacaataccgcccgccgccatgaccggcgcccgtgccatcgctcatatccagtatggtcgtccccgcggnnnnnnnnnnggattgaaggctactttcttctgagcagcgcctggcctgcgcggatgcgcgttccttctgcgatcccgtcgcagaaggcgaaatcgccgggcgccaggatgatgatggtcgagccgtgctcgaaccagccgagctcctcgcctttggtcacgttcacgtcgcagggaaaattgaccgggccgcgcgtctgcgcgttcaggaccacgtcaagaaaatgcaggcggatgctcgcgaccaggatcgccgcgaccggcaccagcgtcacggcttcgccggtcgacagacgcgtgcggatcaccgcgcgctcgttcttgcagaacagccgctcgacgcgcttgagcgcgatcggattgacgttccagacgtcgccatgaatcagcgtgacgcgttcgatgtgcgcgtcatagggcgcatggaaacgatgatacatgctggaggtcagccgcagcgtgacgaacgagccgttgcgatgctggtcgaccagagcggaatcgccgagcagatccagcagcgaatacggcgcgcccttgacctggaacagctcggcatccgcgatcctcccgtgagcgccgacgatgccgtccgaggggctggcaacaacggcaggatccggatcgaacgggcgcaggcccggcttgagctcccgggtgaagcagtcgtgcagactcctgaaatgcgtcttgcgcgcctccgacagatcgaggtcggagaacagcttccacagcgcgatcgagaaatccctcaccaggggattctcgatcttggagaaccagcccatgaagcgggtcagggccgcgcgcgggatgcggttggtcaacaggaagttgaggtcttcctgctgggtgaaagaggcgatgagggctttgactgtcatgaatctgtcagctcacagggttagcgcttgttgtcatggaaacgacactcccgattctctcgatgtccgtggccgccgcagcgtccgctgccgccgtcctcccgaagctcaaggcgcgggtcgaattgtcccgcgccaagcaccgctcgcttgccggccattccaagatgtcgcgccgggtggcgcggctgcttccattctacgaattcgcggatgccgactatttctcctgcgacggcgcgccggcgaacatcgccgcgcagcgcaaggacggcttcttccgtctcgccgccctctacgccgagcgctacccgaagggtcgcgcgatgacgagggacgccgcggaaaaaatctccgatctgaacttcaccgagagctaccgcgtgccgttccagttctcgcgcctcgtccgcgagcatctgggcacctcgaccttcgtggaatcgtcgagcggcgtcaccgtcaccgatgtcgacggcaacagcttctacgacctcaccggctcctacggcgtcaacatcttcggaaacgacttctacaaggagtgcatcgagggtgccgagaagcgcgcgcacgcgctcggtcccgtgctcggcccctaccaccccgtcatcctcgacaacgtgtcccggctctgccggatctcgggcctcgacgaagtctcgttccacatgtccggcaccgaggccgtgatgcaggcggtacggctcgcgcgctaccacaccagacggacgcatctggtacgcttcgccggcgcctatcacggctggtggggcgacgtgcagcccggcgtcggaaatccgattcccgcacacgagacctacaccctcgccgagatgtcggagaagacgctgcacgtcctgcgcacacgcaaggatatcgcctgcgtgctggtcaatccgctgcaggggctgcatccgaacgccaacgcacccggcgattcctcgctggtcgattcctcccgcggcggccacttcgatcgtgccgcctacaccgagtggctcaagaagctgcgcgaggtctgcaccgaacgcggcatcgtgctgatcttcgacgaggtcttcgtcggcttccgcctcgccgccggcggcgcccaggactatttcggcgtgcgcgccgacatcgtgacctacggcaagagccttgccggcggcctgccggtcggcgtggtctgcggcaagcgcgagctgatgcgccgcttccgcgacgatcggcccgccgatatctgcttcgcccgcggcaccttcaactcgcacccctatgtcatgacggcgatggacgagttcctgagccgtctcgccagcccgaacttccgcgccgtctacgaccggcttgacgaaacctggaacggccgagtccagaagctgaaccggatgatggagagcgccggcctgccggtgcgcttcgccaacctctcgtcgatctggacggtgaagtacaccacgccgtcccgctacaactggatgctgcagtactatctgcgcgccgagggcctggcgctgagctgggtcggcaccggacggctgatcttcagcctcaactacaccgacgcggacttcaacgaggtggccgaacggttcgtgcgcgccgccgagaagatgaaggccgacggcttctggtggcacgacggtgtgctcaccaacaagaacatcaagcggcagattctgaaagagatgctggccaaacgcttcgggcgctgaggccaattgctccaggggcatcatggccgggcttgccccggccatccgcgcgtctccgcgcgctagctccaagacgtggatgcccgggacgagcccgggcatgacgtaaccatgagacatcgaattgcttggtgaggccggcgcgctcaggcgtgctgctcttcgagcaccggctcgccggcgaggcccagcgtgtgctcggggttgaggtgcagtccggggtccatcagctcgccccgcaacagcgcgagcggggccttgtgatagagcatcaggtcgtggaacgggtcggtcaggatcttggtcatccagacgagaccggtctcgacgtcgcgaatgaagaacaggtgcaccgtgcggaacaacaggccgccgccgccgaccaccagccagatcttggccacctggcgcatgaagtcggtcgcactcgcccacggggtgaacaggccgaacagcgtcggatcaaccaccagcaccaggggcgagagcgcccagatcgccatcagcaccaccttgcgctgcaagttgtagccgaccttgatctcttccttgtactcgtgtgtcgcctggttgacgtggtcgtaggtgtgcggctcgaagaagaagtgaccggcctggcgtgaggtcatcgagaccagccagccgaccagcgccgacaccacgggatcgatgaacagccagacataggcgaagagaaagctcaaggcgctgatgaagtgcaggctctgattgatgcggctgtggtgatagtagcgatggtcgtcccagcgctggattcgcagctgctcgagataattcttgatcatgctctcccccaaaatgctttcgggtccggaattacagggattcgatgtaggccgtgtgacatcatcatcttgtcatgtgacgatgcgcagcggcgcggtgacgcacgcgacgcgtaagctcacgccgccttggcgacgtctatcttgcggaagcgcaccagcgagaaatgaccgagcggcggaatcaggcggcgctcggcgagctcgatgcccttcgcaccggcgagccatttggcatagcgcgaccaggcgaattcggcggtgcggaagccgagcggacgcaccaccggctgcagcttctgctcgatgaagcggcgcatgccggtgtccgcgctgacgcgggtgaggatgatcagctcgccgccggggcgcagaacgcgggcgaattcgtccagcgccttctccgggttcggcacggcggtgacgacatattgcgccatcacgacgtcgaaggaattgtccgggaattcgagcttctcggcgtccatcaccgcgagaccctcgacgttcttcagcttctgctccttcacgcggcggcgcgccttgtccagcatcgcttccgaaatgtcggtgccgaagatgcgcaggttctgcgcgtagagcggcagcgagatgccggtaccgacgccgacctcgagcacgcggccgccgatcttgttggtggccgcgattgccgcctgccggcccttggcgaacacgccgccgaacacgagatcatagacgggcgcccagcggtcgtaggcctgctcgaccgtgccgcgggtgaggtcgagctgctgcgtgccgtcaaggttcatgatcttagccatcgatgggttctcgctgtggttcaaatggacgatcaaccgcgcaccggccgcctcgccatgcggggcgaggcgcgcaaggcgcggctgggctgaagtgaggtgagattgccgacgaactggcgcgcgctgttctcccacgagcgctccagcgcgaaattgcggcaggtctcgcgggacatggtgagcgcgcgcaggcacgcggcgcgcagatcatggtcgatcgccccgatcggatgatcggcgatgacgtccttcggacctgtgaccggaaacgccgcaaccggcgtgccgcaggccagcgcctccagctgcacaacgccgaacgtgtcggtcaggctggggaacacgaacacgtcggccgcggcgagatgggcggtgagatccgctcctttcttctcgccgaggaagacggcatcagggtgcttcttttccagcgcagctttctgcgggccatcgccgacgaccaccttggtgccgggcaggtcaagcgataggaacgcttccagattcttctccaccgccacgcgccccatcgtcatgaagatcggacgcggaaggtcgagctgagccggagcgtcgggatgaaacagctcggtgtcgacgccgcgcgtccagaagccgagccgcttgaagccgcgctcggacagctcctgccgcagcgaaggcgtcgccaccatcgtcatggcggcggcgtcgtggaagtgacgcagcacggcatagccgaccgcggccgggatgccggtccgcaccgcgacgtattccggaaagcgcgtcgtataagaggtggtgaaggcgagccggttgcgccggcaataggcccgcgccgcccagccgatcgggccctcggtcgcgatgtgcagcgcgtccggcgcggccttctcgatccgccgcgcgatctcctttccgcccggcagcgcgaagcgcaggccgggataggtcggcagcggccaggacggaaagccgtccggggtgaggaagtcgatctcgacgtcgaggcccttggccgcattcgccagcgaggtcagcgtccgcaccacgccgttgacctgcggatgccaggcgtcggtcgcgattaatacccgcatcggaaaatcccgagagtttgatgattctcaggcatcgaccatcaacgaaggatatttcacgcgtgtgacgtcatcgaaatgtcggcgggctgttttgttcgttaacgggccgtcaaggccacgaaactgtcatgaaacaatccttgcggccacgaaaccaatttcggttttccgcgcaaatgtcccgaaacgcttttccgttagtgatttaggcaacggagcaccgaaacggtgccgcggtgagcaacgacaccgggcaaacaggggcgatcaaatgttcaatctggacaccttcaagacctattcgcgcgccgtcgcgctcggtgcagccacgatctccgcaatcgcgttcgcaggcgcggccaacgccgcgccaatgcaaatcttcccgttcttccagccgctgccgcagctggccgcgccgcagccgttcgaaccctatcagcctaaccaggcaacgccttaccaggccgcgccgtccgaggatcaggacgcagtcgaactgccggcccgtttccgccgccagaccgttgcctacgcaacgcgcgaagcgccgggcaccatcatcatcgatacgcccaacacctatctctattatgtgctcggcaacgggcaggcgctgcgctacggcattggcgtcgggcgcgaaggcttcacctggtccggcatccagtcggtcagccgcaaggccgaatggccggcctggaccccgccgccggaaatgattgctcgccagccgtatctgccgcgtcacatggcaggcggccccggcaatccgctcggcgcacgcgccatgtatctcggcggcaccatctaccgtatccacggcacgaacgcccccgagaccatcggcaagcgtgtctcctccggctgcatccgcatgaccaacgaagacgtcaccgacctctattcccgcgtcaacgtcggcaccaaggtgatcgtgcttccgatgacggagcgccgcgcagacctcggcaccgcaacgcggtaaagcgacaggacatcgtgacgcaaacggccccggaacccgccggggccgtattagtttgccctcggcattcccgacgcgcgcttgctgcggcgcaggtccccgatggaggcgcaaatgcaatcatgcctgcaatcctcgccgaacccgtggctgcacgtcctcgtcggtgctggagccctgatgctgctgctgtccgcgccgtcctcgctcgcgcagcaatccgccaatgaagacgcaggcaagcaggccttcaacaattcctgccgcacctgccattccataagggagggcgacaatcgcctcggtcccaatctcaacaagatcgtcggacgcaaggccggctcgctgccggactacaattactcctcgtccatgaaagaagccggcttcgtctgggaccaggacaggctcacccgcttcatggtcaagccggacgaggtcgtgtccggccacaagatgcagccctatggcggtatctcggccgatgaggcggcgaaggtggtggcgtatttgcaggaggcgggctcgcaataatagcccgcccgacgtcggcgattcggaagtcgctgcgcatccttcgaaatgcccgcctttggcgggcccccaggatgagggctgagcaagtggccgccagtccttccacgatgctcgcgccaaggcacggccaacagttagcctcatcctgaggagaccgccaagcggttgtctcgaaacgacgaggcgttcacgacggccgaagcctccgctccgcaatcagcttcagccacgcccctgaatgaaacgcgctcatcaagagatacatcggcaccatcccgccgagcacggagccctgcccggcgcacagcatgtccgccgctccgtcgccaagcacagccgtcgacgcggccatgatcgcgaaggtcggggtggccgccagcccgagccacctggcgaggtggcgcgcggcccgcatgccgtcgtggccggtgccggcggccgcgctgaccgaaccggtcatttcctttcccccgcggcctcctcgcgaaaggccttctcgccggcgtccgagatctccacccatctcttgtcgggcgccgcgcccttcgtgtagctgtcgtgccagttccaccatttataggtcggcgtctgcggatagcccttcggcgaatcctcccacacctcctggcggccgagcggcgtgatgtcgagatagttccatgtgccgcccatctgctcgtcgccccggctcttgacgaaataggtgcggaagatgcgcgtcccgtcacggtagaacacgttggtgccgtgccattcgccgacgccgaaatcggcatcgaaattgtcggtgatggtgacccacggcatggtccagcccatccgctgcttcagcctggtgatctcggcctgcggcgcgcgcgaggcgaacaccagcgtggtgtcgcgggcgttcagatgcgcgacatgcgcgacctgatccgccaccatggagcagccgcggcaggcatgatcgggccagccgaacacaccgggctcgaagaaggcgcggtagacgatcagctgccgccgccgctggaacaggtcgagcagactgagcttgccgccgggcccctcgaacgcataggttttgtccactgccatccacggcatgcgccggcgctcggccgccagggcatcgcgggcacgagtatgcgccttttccttcacgagcagcttcagacgagccgcctcccagtcctgcggcgacaccacaggcggggtctgcatggcggtccctccgttggtccctgcgttttcaactgatgtcatgatcactctccaaatctcttgcctcggccatcgttgcacaccccgccgtgccggaagcggaacctgccgccccttctcggccgtctgcgatttctggcaccggacagctgcgtggtgggagtaacaagtgtggcgggattgacatggagtcgctgatcaccgccgcggcgcgcgcgctggaggccggcgatccgctcggcgcgctcaaccgcgttgcattgcgcaacgatgcgccgtcgcttgcgctgcgcggcatcgcgatggcgcaactcggcgatctcgccagggccaaggcgctgctgcgaagcgcagcgcgcgccttcggtccgcgcgaggcggtcgcgcgcgcaagatgcgtcgtggccgaagccgagatcgcgctggtctcgcgcgatctgagctggcccgtgacggccctccgggcagcacgcgcgacgctcgaaatgcatggcgatctcgccaatgccgcccatgcgggtcacgtcgaagcgcgccgcttgcttctggtcgggcgccttgatgaggccgagcgcacgctggccgaaatccgacccacgccgctcccgccggcatcacaagtcacccgcgagcttgtggtcgcaggcattgcaatcaggcgcctcaggacgaaggaagcacgcacggcactcagccgcgcagctcacgcagcacggatggcgagaatcccggcgctcgcggccgaggtcgatggcgcgaagctcatcctcgatgcgcccgcagcgcgcctgatctgtcgcggcagcgaacatacgctgttgctcggcgaggtcgaacgactgacgacctcggccgcgctcctcgtggacacctttcatcacgtcgtgcgcaggcaaggcgtcgtcgtgtcgctcggaacgcgcccggtgctgttcgcgctcgctcgtctgctggcgcaggcatggcccgcggatgtctcgcgcgagatgctgatatcgggcgcttttcgagccaggcacgccgacgagtcgcaccgcgcgcgattgcgcgtcgaaatcggacggcttcgcaccaagctcaaacctctggccgacatcagcgcgaccagggagggcttcgtgcttgcgccgcggaagacgcgcgacgtcctcgtgttggcgcggcccgtcgaggagaagcacgccgccgttcttgccttccttgccgatggcgaaccatggtcgagctcggcgctcgcgcttgcgctcgggatcagtccgcgcaccgtgcagcgcgccctcgaggagctggcgcgatccggcaaggtgcagtcattcggacacggccgggcgcgccgctggatgacgccgcccgttccaggtttcccgacaggcttgttactccccggaccgtttctgaaaacgtaggatgagatcaggtcacatccaacagggatcgcgcacatgaaacgttcagccgccgagatcatcacggagtatgggccttttccaggcgtcgagaccgtgcatggcgtcacctatgacggcaggcatgtctggttcgcatccggcgacaagttgaacgcggtcgatccggccgacggcagcatcgcgcggtccatcgacgtcgccgcgcatgcgggaacggcgttcgacggccggcacctgttccagatcgccgaggatcgcatccagaaaatcgatgcagcctcaggcagggtgctcggtaccatcccggcgcccggcggcggcggcgattccggtcttgcctgggccgagggctcgctctgggtcggacaatatcgcgagcgcaagatccatcaggtcgatcccgaaactggagaggtcctccgcaccatcgagagcaagcgcttcgtgaccggcgtgacctgggtcgacggcgagctctggcatggcacctgggagaacgagcagagcgacttgcggcgcatcgaccccgaaaccggcaaggtgatggagcagctagatctgcccgccggaacggtcgtgtcggggctcgagtctgatggcggcgatcgcttcttctgcggcggcggcgatcgcggcaacgtgagagccatccgccgtccgaagcgcagctagctaccagtggcggcctgaacacgtatcgaggggcgcgttcgcagccgttaacctgtccgccccaattctaccccaccggtgcgctctagcgccctcctcgcctgccctgtagaatccccgatggggcggcttgggggattgatgcgaccgacattgaatctgaagactatcctggtcggcgtcgctgtgctcgcggcgtcgttcttcatcagcctgaaggcaatggatttgctgtcgccgcgggcgacgaattcggcacccccggtcgcgcaactgccgccgcttccgcccgcctcgaagagctccatcgtgatcgcgccggtggccatcgcgctgtctgcgatccgcgagcaggccgagaaggccgcgccgcgcaattttgccggcaaggccgacaacccgatctcgcagatcctggagaacgccgatatcggctggtccgccgtgcgcgggccaatggcgaccagcggcgacaaggacgtgctgacgatctcgacgccgctcaccggcaggctgaacgtcacgggctcgctatcgtcgaaagccaccggcgcactcggcgacgcgctcggcagcgtgcttggcggtgacgcagcaaaacggatcggcgcggtcaacatcaagaacctgaacgccaacgccgagatcaagggcaacgtggtcgtcacctcgcgtcccaagctcgcggccgcctggcatctggagcccaatctcggcgcccaggtcaatctcggcgacaccaacctcaacgtcgccggcgccagggtcaacgtgccggcgcaggtgaagccgctgatcgacaagaccgtcggcgagcagatcaacgcggtctccgagcgcatccgcaacgatccctcgctgcgcgacaatgcaagggcacaatgggtcaaggcgtgccgctcgattccgctgcaaggctcgggctcgtcagccgcactgccgccgctctggctcgagatgaagccggtccgcgccatcgcagcgcagccgcgcgtcgacgcgcaggccgtgacgctgctgctcggcctcgaagccgagacacgcgtgacctcgacaccgaccaaacccgactgccccttccccgacaagatctcgatcgtgccgccgaccggcacgggcgtgaacatcggcgtgccgatcgacgtgcccttcaccgagatcaacaagctgatcgcagcccagatggtgggccggacctatcccgaggacggctccggcccggtcgacgtcaccgtcaggagcgccaacgtgacaccctcgggtgaccggctgctgatctcgcttttggtgcaagcgaaggagaagaagagctggctcggcctgggcgccgaggcgacggtgcacatctggggccggcccgtgctcgaccaggcgcggcaaacgctgcgcctgacggacatcgagctcgcggtggaatccgaggcggcgttcggtctgctcggcgccgccgcgcgcgcggtggtgccgcagatgcagcaggcgctgctgcagagagcaacgctcgatctgaagccgatcgccgccaatgcgcgcgagaagatcgccgccgtgatcgcggactatcagaagatcgaggatggccttagggtcgaggccaagatcgacagcctgactctcgccgacatcgccttcgattcgaagacgcttcgcgtggtcgcggaagccggcggcacgctgaacgttttcgtgacgaagctgtcggggatgtaggccaccagatggcgctccacaaagaagcgataacgcgcccggtgaaaaccgggcgcgcttcgttggagcgtcggagctacattattccgagaacttgaactccggcatgttcttcagctcgtccttgctcgcattgaacacggcgtggtccggataccatttcgacgtggacgacgtcgtcgcggtcgccgcgggcctgtcggtgccggtcgcagcgccggtcgtagtaccggcggtcccggcgggcttggtgcccatgttcgccgtggtcgaggcaacgggctcgttgacgaacttcagcttctcatagggcacggccacgagatgctcgcccaggccgaggaagccgccgacgccgatcaccgcgatcttgatgtcaccgttcttgtccatcaagagatcattgatcgtgccaatgttctcgttggcctcgttgtagaccttcaggccgtccatcttggacgtgcgccactggccggacgccgtggtcgacgccgtcgtggatgtggaggtcgtcggggccgtggccgaaggcgcagccttgtcgccggtggcggtcggcgattgcgcaaacgcgacggtggtgagcagtgcagtaccggcgaggccggcaacgatcgacttcatcatgttgtcctctccttcacagaaaactcgtgcggagaaaacagctctgatctcgcccggttccgtgcgcgccacaatttcgtcgcgcgatgcgagcaggcgaggcttgttcctgcgtcactcaggaacattctgcgatgcacggttcccgccgacgatcatacgtcctgggcgacgcatgaccgcggcgaggaccgcgccgacctcgcttggctcgggtcagctcgtgaagtcgatcagcagcgcggagaaattcgagctgctcgatgaattgccgttggcgccgtaggacgatgccgacgattgcgactgttgcagcgcctgcaggaactgctggaggatctcggccgtggtctgctcggtcgagctgctgctcgtcgaatccgtcgtcgccgaatccgaagagctgtcgtccggcggcggtccgggcggcgggccacctgcgccaccgggtccacccgcgctggcgggaccgctcgcgaaggcggattgaaacacgcttttcagctcctccgcctgatcggaggtcagcgtcccgttcgacacttcgttcgagatgagatcgtcgatcttcgactgcatcgcctccttcgacggacgcgtaccgctcgactggccgctcgatcggctctgctgcagcgccgtgtcgatatccgtcagggccgtcgagagcgcggactggtccgtcgacgagatcgtgccggcggagacttgcgattgcagttcctgctgaagccgctggagcggcgattgatagctgccggcggaagccgccgagatcgaggtcatgatggctccgtggatcttgcggggtttcgttgcttgacgactccacgctatggttagcggccttaacgagatcttgccgctccacaccacctcgattgccgcccgttgcggacaggcggacagaaacaatctgaaacaaaaatcttcgccatttggcccgaattttggacaaacagaacgcatggccatttccaatcccaacatcctggtcgtcgaggacgaccgcgaaacgcggacgctgatcgcgaagtacctgcgcaacaacgcgtgcaacgtcaccgccgtgagcgacggccgcgagatgtcccgcgccatgaccgatcaccgcgtcgacctcatcattctcgatgtcatgctgcccggcgaggacggcctcagcctttgccgcaaggtccgcgccgaatcgcagacgccgatcatcatgctgaccgcacgcggcgaggacgtcgatcgcatcgtcggcctcgagatgggcgcggacgactatctgccgaagccgttcaacccgcgcgagctgctcgcccgcatcaacgcggtgctgcgccgccaggctgccgcgcaggcggcgagcgcgatcgagggcgcctcgacgctcgccttcgacggctggcgcatcgatcttcgcctgcgcgagttgcgcaatccggaaggcgcacgcgtggcggtgaccagcgccgagttcgatctcctgcgcaccttttgcgaacggccgggccgcgtgctgtcgcgcgacagcctgctcgacctcacgcagggccgcaacaccggcgcgttcgagcgctccatcgacgtgctggtcagccgcatccgccgcaagatcgagccgaacccggccgatcccaccatgatcaagacggtgcgctcaggcggctatctgttcacgccgaggactgaagcggtcacggtttccctgagcagctgagcggggatgccgacgatgaagccgttcggattcttccacctcaaggggatcggcgggcagatcgccgcactggtgctggcctcgaccgtcgcgctccatctcgtcgtcacgaccgctttcctgatcaaccggtcggaccgccacgacgcgccgccggacggggcgcatcaactcgccgatgcagcgctgctgctcggcgcggccgagcccggcgagcggccgcgcctgcttgcggatctggcgcgcgcctttccgaggctcggcatcgagatgctggcacccggcaccgcgaccgtcgagaccagcgacagtccgcacctgcacgggatgcgccgccatctcggcccgggcttcaaggcaatgcagcttgccccgaacgggactccggagcgcgtgggcgtcgaactgcccgacggcaccatgatcgtagctcgtgtcgatggcggcccccggccgtggttctggggggcgccctggctgatggcgctgatgaccgccttcatctgcgtcaccgtgctcggcctttgggcggcgcgcgcgctgactaggccgctgtcctcctttgccgaggccgccgagaatttcagtctcgacggcaccgccgagccgctgcccgagcgcggccccgaggagatccgctcggtggcgcgcgcgctcaaccgcatgcacgagcgcattgcgcggctgatgtcggatcgcacgcggatgctggccgcgatcagccacgatctgcgcacgccgatcacgcggctgcgcctgcgcgccgagttcatcgaggacgagggcaaccgcaagcgcatgctggtcgatctcgatcagatgcgcgcgatgctggaatcggtgctgtcgctgctgcgaaacgaccgcaagatcgaggccgtgacgctggtcgacatcgccagcacgctgcagctcatcgccgaccagttcggcgacatgggccacgtggtgcgttacgaaggcccggcgtcggcgaccgccgccgcgcggcccgacgacctgcatcgcggcatcaccaatctcgtcgagaacgcggcgcgcttcggcgccgaggtgacgatccggctcgccgtctcggacacggcgctcgtcgtcgacgtcgaggacgacggccccggcatttcggatgcgcgcaagcaggagatgctggagccgttcgtgcgcggcgacgacgcgcgcaccatggacgattccaccggcttcgggctcggcctctcgatcgcgcgcgcgatcgcactcgcccatggcggcgagctgtcgctgcatgaccgcaagccgcacgggctcatcgtgcggatgcaattgccgcgatcgcaggcgacccggctggcggcttgatgtcaggccgccagcggcggatgctcggcggcaacctccccgaagatcgccaccgcctcgaaacgataattgcaggcgtggcaggtccagaggtaggagacgcgcccctcgcccggctcgatccaatcgggtgcggggatcggcgtgccgcattgggcgcagggattgtgtctggggatgacggcggcgtgtgcagtgacgagaccggcttttgtcatggcacctctcccgatttgcagcgcttgcatactcgctttcacacgccggcgcgaatagacaggcgtgctgccgcgagcgcgggttccatcccgatcacgctacgccagctttgggtcgtaacggcggcacggcaccgcaaaaacgccatcggcggcgtttggtcacatcatcgccgcgttctggtcgcttaaccgcagcgggcgcaggctgctcaaggaataactgatgaaaattttacgcgttgtcgcgctgctcgcggccggattgacgttgccgcaggccgccttcgccggcgaagccgaatatgccgagatggtcgcagcccatgcccgcgccaatggcgtgccggaagcgctggtgcaccgcgtgatcatgcgcgagagccgctaccagccccacctcgtcggccgtggcggcaccatcgggctgatgcagatcaagctcgcgaccgcccgcggcgtcggctacaccggcgatgccgccggcctgcgcgatcccaacaccaacctcacctatgcggtgaagtacctcgccggcgcctatcgcgccgccaatggcgaccacgcccgagccgtgcgttatttcgcgggcggctattactacgctgcaaagcgccagcgtcagcagtccgtgcagctcgccggcatgggcgaaggcaattttggccagccctggctcgagccgaacggcaatccgcagccgatgttcggcacggcgccgcctcgcaagctggctcagcgcgtccgcaacgcgcgggcgcaggttccgcactaaccaccgtcattccggggcgatgcgaagcatcgannnnnnnnnncggtgcgcaattgcgcacccgagaatctcgagactccgggcccggtcctgcggtccgccccggaatgactcgtccgcggcaacacgcgttgacaccgcccgccactggcatacattagacccgttccgaggggtgctccgaggaggagctgagataccgctaaatgggcaatccgccaacaccggctgcccaagaccgcggtgaccctttgaacctgatccgggtcatgccggcgaagggacagggatgttgcagaccaccaagcgaccggattccccggtatccatcatcggcgcaggcattgcaggcgcatggcaggcgctgctgttcgcgcaggccggccacgccgtcaccttgcacgagcgcggcgacgaggcgatgacggaggccaccagccattgggccggcggcatgctggcgccctattgcgaggccgaggtcgcagaacccatcatcagccgcctgggcttgcgctcgctcgatctatggcggcgcgagctgcccgacacgcccttcaacggctcgctcgtcgtcgctcatccgcgcgagcgcaacgacttcgagcgcttcgcgcgcatgaccgaggaccaccgccggctcgatgccgcgggcctcgccgagctcgagccctcgctggagggccgcttccgcgacgcgctgttcttcccggccgagggccatgtcgagccgcgccgcgtgctgccgaagctgcacgcgcgcatccgcgccgccggcggcaccatcaggttctgcagcgacgtcaccgcaagcgatctcgccaactcggatcccgagggcatcgtgatcgactgccgcggcctcggtgcccgcgacgagcacagcgagcttcgcggcgtcaagggcgagatgatcctgatcgagaccgacgaggtgcagctagcgcgcccggtgcggctgatccatccgcgctggccgctctacgtgatcccgcgcgaggccggccggttcatgctgggcgcgacctcgatcgaggccgaggacaccggcgtcagcgtgcgctcggcgctggagctcctgggcgcggcctacaccgtgcatccggccttcggcgaggcccgcatcgtcgaattcggctcgggcctgcgccccgcttatcccgacaatttgccgcgcatcggcatccgcggcggcaggatcagcgtcaacgggctctaccgccacggcttcctgatcgcgcccgcgctcgccgagctgaccctcgcctatgtcgagcgcggccagatcgacaacgaggtgatgcgatgcgcgtgatcgtcaacggcgagcagcgcgaggtgaacgcggccagcgtcgacgcgctgctcaccgagctcgactacgagggcacccatttcgccatcgcgctgaactacgacgtcgtgccgaaaagccgctgggccgaaacgcggctgaaggccggcgacgagatcgagatcatcacgccgcggcagggagggtgagcgggatggcgcactctcttcgcggcgacggctctttttggcccgtcattccggggcacgcgaagcgtgaacccggaatctcgcgccacaacttcgagattccggatcggcccgcgtaccgcggcccgtccggaatgacggggacttcaacatggtgaccttctacggcaagaccttcgcctcgcgcctcctgatcggcagcgcgctctatccctcgcccgcgatcatgcaggacgcgatccgcgcgtccggcgccaacatcgtcacggtgtcgctgcggcgcgaatccgccggcggcaagaccggcgacgccttctggaagctgatccgcgagctcgacgtgtcagtgctgccgaacaccgccggctgccgcaccgtgcgcgaggcggtgaccacggcaaagctcgcgcgcgaattgttcggcacggcctggatcaagctggaggtcatcgccgacaacgacacgctgcagcccgacgtcgtcggcctggtcgaggccgcgaccatcctgaccaaggacggcttcgaggtgttcccctattgcaccgaggatctctcggtcgcgaaccgcctggtcgatgccggctgcagggtggtgatgccatgggccgcgccgatcggcagcgccaagggcatcaccaaccgcgatgccttgaggctgctgcgcgagcggctgcccgacatcacgctggtggtcgacgccggtctcggcgcgccctcccacgccgcgcaggcgctggagctcggctacgatgccgtgctgctcaacaccgcgatcgccaaggccgccgatcccgtcgcgatggcgaccgccttccgcctcggctgcgaggccgggcgcaccgcctacgaggccgggctgatgaacgcccgcgacttcgcctctccttccacccctgtcgttgggaccccgttctggcatgccgtatcctgatcgcttctatcccgtcgtcgacagcctccaatgggtcgaacgcctgaccaggctcggcgtcggcaccatccagctgcgcgcgaaggagctgaacgacgccgccgctctgcagatcgtcaccgacgcgctggcgatcaccaagggcacggagacgaagctcgtcgtcaacgactattggcgcgcggcgatcgtcgccggcgcgcaatatctgcatctcggccaggaggacctcgccgaggccgacctcgcggcgatccgcgaagccggcctcaagctcggcatctccacccatgacgacgccgagctcgccaccgcgctcgaagccaagcccgactacgtcgcgctgggcccgatcttcttcaccacgctcaaatcgatgcgcttcgagccgcagggcattcccaaaatcacggaatggaagaagcgcatcggcgatatcccgctggtcgccatcggcggcatcaagttcgagcacgccgcggagatctttgccgcgggcgcggattcgatcgccgtcgtctcggacgtcatccagaaccccgatccggatgcccgcgtgcggcagtggctcggcgtgaccaaggagacggcatgaccgaaactctctccgctcgtcattgcgagcgaagcgaagcaatccaggctcctccgcggagacagtctggattgcttcgtcgcaccagcgcaaaattgctacgcaattttgtcgcggcctcctcgcaatgacggagcgagaattcaacgccgtcgctccaacgcacgcacaccagaattaacccggaggattccccatgaacatccgctccaaccctgacaagaccgtgccggccgtcaccaccggtcccctgccctcctcccgaaaaatcttcgccacgccggacgccgcgccggacctgcgcgtgccgctgcgggagatcatcctgtccgaaggcgcgggcgaaccaaacctgccggtctacgacacctccggtccctacaccgacccgagcgtgacaatcgacgtcaacgccggcctgccgcgcaatcgcaaggcctgggtgctggagcgcggcggcgtcgaggaatatgagggccgccagatcaagccggaggacaatggcagcgtctccacggacaacgccgcgcgtgccttctcggcctatcacaagccgctgcgcggcctcgacggccacaagatcacccagctcgaattcgcccgcgccggcatcatcaccaaggagatgatctacgtcgccgagcgcgagaacctcggtcgcaagaagcagctcgaacgtgcggaggctgcgcttgccgacggcgagagcttcggcgcctcggtgcccgccttcctcaccccggagttcgtgcgctcggagatcgcgcgcggccgcgccatcatcccctgcaacatcaaccacagcgaactcgagccgatgatcatcggccgcaacttcctgaccaagatcaacgccaatatcggcaactctgcggtgacctcgtcggtcgaggaggaggtcgagaagatggtgtgggcgatccgctggggcgccgacaccgtgatggacctctcgacgggccgcaacatccacaccacgcgtgaatggatcctgcgcaactcgccggtgccgatcggcacggtgccgatctaccaggcgctggagaagtgcaacggcgatccggtcaagctgacctgggagctctacaaggacaccttgatcgagcagtgcgagcagggcgtcgactatttcaccatccatgccggcgtgcgcctgcaatacatccacctcaccgccagccgcgtcaccggcatcgtctcccgcggcggctcgatcatggcgaagtggtgcttggcgcatcacaaggagagtttcctttacacccacttcgacgagatctgcgacctcatgcgcaagtatgacgtctcgttctcgctcggcgacggcctgcgcccgggctcgatcgccgacgccaacgaccgcgcgcagtttgccgagctggagacgctcggcgaactgaccaagatcgcgtgggacaagggctgccaggtcatgatcgaaggccccggccacgtgccgatgcacaagatcaagatcaacatggacaagcagctcaaggaatgcggcgaggcgccgttctacacgcttgggccgctgaccaccgacattgcgccgggctacgaccacatcacctcaggcatcggcgccgccatgatcggctggttcggctgcgccatgctctgctacgtcacgccgaaggagcatctcggcctgcccgaccgcaacgacgtcaagaccggcgtcatcacctacaagatcgccgcccacgccgccgacctcgccaagggccaccccgccgcgcaactgcgcgacgacgccctctcccgcgcgcggttcgaattccgctggaccgaccagttcaacctcggcctcgaccccgagaccgccaagaacttccacgacgagaccctgccgaaggaagcccacaaggtcgcgcatttctgctcgatgtgcggcccgaaattctgctcgatgaagatcacgcaggacgtgcgggactacgcggcgacgctgaacgatccgaacagcgtggggatgtcgatgagcggcacggccgaggacggcatggccaggatgagcgccaagttcaaggagatgggcagcagcgtttatctggatgcggagaaggtgaaggagagtaaccgggtgttgtgagggactgactgcccttagcgattgggtgaacattggcgaagtacaaaagactaaaagaaatcggaaaaggctcctttggcgtcgtcgatttagtcgaggactccaaaggtcatcggtgggcgatgaagaccttcacaccgcccacattgcccggggtgaccgccgaggaattgagagctcgatttgagcgggaagttcgctaccagcttcaaatcgaccatccaaatgttgtgaacatccacgatttcgatctggatgcaaatccgccgtggttcgttatggagcttgcgagctgcagtctagcagatgagctgaaagcggatcgcacgctgggcggcgaccccagaaaaccattgtttgatattcttgcggggctagaagccattcacgaaaaagggtacaagcatcgtgacctcaagccagcgaatgtcttgaaatttaactcttcgaagaaagatagtcgctacgcgatctcggattttggcttgatgtcccctgaggccggcctgacttcaacgttgacggcgagcaacatgggcggcgggacaccactgtatcgagcgccagaatgcgcacttaatttcaagcgcgccacgattcaatccgacatttactctgtgggcgcgatcttacatgacatcttcggcggtggcgtaaatcggcttccgcacgtggaactaaatgtttctggtagcctgtcacccatcgttcaacgatgcacaaagcagaacgttcgacgacgatacccgaatgtcgccaagcttcgagaggacctttacgaatccctgagcaaggagaaaatatcctttacctccaaagaagaagaggaggttgtcaatctacttcactcgaaagaggaacttacgcccgacgaatgggatcgcgtctttcaacagatcgatgataacgacgaaaagggcaacacaaaccatgcactatttcgctcgctcagcatttctcagctcgagaagctcgcgcaggatgcgccggatctcttcgcctcactcggtaaagactatgcaaaatacgcaaccagcggcggatttgattttgactattgcgatgtaatcgccaatcgggcggaggtcttttatagggagggcgaattcgatctaaaggcgaacattgctcttgcccttctggacttgggcattagccacaatcgatggtttgttgaaagaaccttcgtccgaatggtgggaacgggcatatccgacgatctggcaaagcgaatcgcaactgagatcgacgttcaaggaatagattttagcaacgagatggatcgactcgaacggtcaataggagctcaaagaggaaatcttcatccaattcttcgcgagaaatctgaagcggcagacacatgacgataaatagctactgcttctccgtcgtcggcaagaaaattgaaaatgaagacgctatgctgtctcggggtgcgcaggacggaacctggttggccgcaatcgccgatggaatggggggacaagctggaggtcgagtcgcatcaacaatagccgttgaggccgtggatcgggccgtagataagataccccgaccgtccataagtgagatttttgcagaagccaaacatcaactccagcgccgctctgaggagcgcccagaactatcgcgcatgggcacaacactgacgttagtagtaatcgaaggaacacacgctagtgtgggtcatgtaggggacacgcgaatctatcaccttcgaaacgaaggcatcgtcgcgaggaccgtagatcaaactgaagttcaggaactaatcgctcgtggcgtactctcgaaggcaagcgctcgccgctactctagacgaaatgttctcctatcggtcttgtcccctgcaagtgagtttcagttatttcaaaccgactttgaactacaagagggtgaccggctcgttttatgcaccgacggcatatcgtccaaaatctttgccaaagagcttcgtgacttatcactcgaatgcaaa

SEQ ID NO: 274 - DNA, 55383 bp, Bradyrhizobium colbertium
  misc_feature (1009)..(1018): n is a, c, g, or t
  misc_feature (12404)..(12413): n is a, c, g, or t
  misc_feature (51906)..(51915): n is a, c, g, or t
ggtcgtcctcgacgtcgatcgcgtcctcgatctcgaaaccaaagtgcagatggccgcgtgaactcacaccggaaatattagagtcggagaacaagaatgaagacttgtttggttgttgacgattccagcatcgtccgaaaggttgcccgccggatcgtcgaagcgctgggttttcaggtgatcgaagcggaagacggcgtcgaggcgctggtccactgcaagaaggcgatgccggaagccatcctgctcgactggaacatgcccgtgatggacggcttccagttcctcagcacgttgcgccgcatgcccgggggcgaagaacccatggtcgtgttctgcaccaccgagaccggcatcgaccacatcacgaaggcgatgggcggcggtgccaacgagtacatcatgaagccgttcgacaaggacatcgtgatggcgaaattccaggaagtcgggctgatcccgctgggcgaagagacggcggcctgaaacgcgctcgacaactgcaagaggtcttccgtgaatccgaccgagtatgagtatctgcgcaagttcttgaaggacaattccggtctcgacctttccgcggacaagcaatatctgatcgaaagccgcctgctgccgctcgcccgcaaggccggactctccagcatcggcgaactggtgcagaagctgcaaggcggctccggcgcgatggtcaccagcgtggtcgaggcgatgaccaccaacgagaccttcttctttcgcgacaaggtcccgttcgatcatttccgtgaccacatcatgccggaaatcatcaaggcgcgtgcgagcaagcgcagcgtgcgcatctggtgcgcagccggctcgaccgggcaggagccttactcgctggcaatgtgcctgaaggacatgagctcggccctcaccggctggcgcatcgaaatcatcgcgaccgacctctcgcaggaagtgctggagaaggccaaggccggcgtctacagccagttcgaggtgcagcgcggcctgccgnnnnnnnnnnatgctggtcaaatatttcaagcagaccggcgagacctggcaggtcaatccggaattgcgagcgatgatccagcatcggcagctcaacctgctgcacgatttttcgcagctcggcaccttcgacgtcatcttctgccgcaacgtgctgatctatttcgaccaggagaccaaggtcaacatcttcaaccggctggcgcgccaggtcgagcccgacggctttctggtgctgggcgccgccgaaaccgtggtcggcctgaccgatgtgttcaggccgattccggagcggcgcggcctctacaagccgaacgacctgcgtgcggcgtcggccaagccggctctcgccggtgcgccgccgcgcatggcggcgatggcgggacgataggcatggccgaggatggcaagggcgcggagcgcgtcacgttcagccgcggctatgatgtctgcatcatggccatcgacggcacctggcggcgggattgcaagctcaacgcgatctccgacaccgacgccatcctcacggtcgaggggtcgatccagggtctgaacctgaaagagttcttcctgctgttgtcgtcaacgggtctggcgtaccggcgctgcgaactggtccgcgtcaatggtgccgagatggacatccagttcctgcgcggcaagaacaggaagaagcgcggtgcagccggcggtcacgacgccgcggcgtgatctggccgccctgtcgccggtccttgggcgttgcttcacatctgctgaatacatccgagtcaattgaccgcaacagctttacgtcgcctaagcgcgagctgtgtatccattgctggtctcaatctcaggaatacggcatgcccagaagctctctttcccccatctcgtcaaacctgcccgacgccgccgagcggagagcgcttcagctcctggtggtcgacgacgatgccacgcaacgccacctgatcacggtcgccgccaggcaggccggccacgaagtcaccgtggcgccgtccgtggcggatgcgatcgagaagctccgcgcggcccgcttcgattgcgtgacgctcgatctcgtgttggaggatggcgacggcatcgacgtgctgcgcgagatggcgagcgcgaaattcgcgggttccgtgatcgtcatcagcggcatggacggcaagcgccgcagtggcgcccgcagctttgcccgttcggtggggatcgagctccagagcctgccgaagccgctggatcttgcggctctgcgcatctgcctcgccaatctcggcaaagccgcgatgggactgccggcgattcacacttggggtggtgttgccaccgatgccatcgtggaacggcaccgcgcctaggcgcggtgctgacgtgcgaccgggcgtgggccgcagtgctgctcgcaacggccgggctgccgaattccgataatcattgcacgagcgagaccgacggcagcccgccaagcgtcgagagcggcgttggctgtggcatcacgacgcgtgacgtcgtggaacaagacgacgactgcggaaccttctttatcgctgccgtgttctctgggctgcggcgatccggcgcatgctggtctcgatccgtgcgatcagcaagggaaggtgcgccgcaattacctcgcggctctcgatgtctacgacaagaagcgacgtgtaggccaaattggcatggattttctccgtccgctgcgattaggcgccatgccgctacttgtgcgttaagtccatgtcccgtacaaatgcgggtgggccgaatccgcgccaagcgccatgatgattggtgcggacgcgagtccctcatgccaactggatgtggcacatggccgaacaaagctctcctggtgaaatcttcgtggtcgacgacgaccctgccgttcgcgacaccttgtcgatggtgttgaaggcggcgggctatgaggtgatttgctttgcggacggtgcggcgctgctctctgttgcgcggagccgaacaccagctgcgatcctgctcgatgtgcacattcccgggaagtccggtctcgacattctgaaggaacttcacggcgaggattatccggcgccgatcttcatgatctccgggcagggcgacattgcgatggcagtgggcgcgatcaagagcggcgcgctcgacttcatcgagaagccgttccgcggcagcgagatcgtcgcccggctcgatgaggcgatcggtgcctatgcccgcaggcaggcggagaacgcatcaccgaagttcggctcgctgcatttccccggacgcgagccgttgacgcgcagagagcgcgaagtgctcgagcagttcgcctcgggtgcgtccaacaaggaagccggccgcacgctcggcatcagcccgcgcacgatcgaggaccaccgcgccaacattatgaagaagctcggcgcgcgcaacgccgccgacctgatccgcatcgtgatgaccgcggcgcaacgcgcgtcgtaaggccgattggccatcctctctcgtgccccggacgcagcgcatcgtgcaatgatgcgccgctgagccggggccgatctctccaagtccgccctgagagtctctgggttccggctctgcgtcgcagcgctcatggcgctgcgccttgtccgggacacgagaggtccgctacgattgcagcgccttgcggatgatccgcgccagatccgacttgcgatagggcttggccagcaagagaacgcccgtatccagccggccgtgatggatgatcgcgttctcggtatagcccgacgtataaaccaccttgagatcggggcgtgtcttcatcacctcgtcggcgagctgccgcccgttcatcttgccgggcatgatgacgtcggtgaacagaaggtcgaagggctttccggctgcgacgatcgcgagcgcctcggcggcgtttgcggcctgcaaggtgacgtaacccagcgagtgcagttgcgccagcacgtaatcccgcaccagctggtcgtcctcgaccacgaggatcgtttcgtgcccaccctcgatcgttgccggcgccacgccttcgcccgcagcggtcggcgttttgccgggcggcagatacatcttgatcgtggtgccgtggccttcctcgctgtagatcttgatgtgacctgcggactgtttgatgaagccgtagaccatcgaaagtccgaggccggtgcccttgcccggtcccttcgaggtgaagaacgggtcgaacaccctggtcaacatgttcgcagggattccggttccggtgtcgctcacggcgatcagcacgtaatgccccggcggcatatcgttcgcgctggcatagacctcgtcgaggtaggcaacgcccgtctccaggatgagcttgccgccgcccggcatggcgtcgcgggcattcagcgcgaggttgaggatcgcggtggtgagctggttgggatcgacgatggcaacgcaattctcgtcctcgaacaccgattcgatctggacctgctcgccaagcgtcggccgcaagagtttcgcggtgtcgacgatgagcgaattgatgtcgatctcgcgcggctggagcggctgcttgcgtgcgaaggcgagcaggtgctgggtcagatcggcgccgcgcgcggcggcctcgtcgatcatcttcgtgatggctgcgagctgcggctccttctcgacggcctccgccagaatttcgatggttcccgtgatgacggtgagaatgttgttgaagtcgtgcgccacgccgccggtcagctgaccgatggcctccattttctcgacatggcggatgcgctcctcggcggcgatcttgtcggtgagatctcggtagaagacgttgaacagcaggccctcgcggcgcttcagggcagtaacgctgagttcggccttgaattccttgccgtcccggcggcggcacatgagctcgtggcgacggttcagcgtcccgccgtccgcgttctcaaggaagcgcttcagtcccgacctgaccctctcgcgttcgctctcggcgacgatgagatcaatcgtgcgcttgccgagcacctcgtcgcggtgccagccgaacagctgctcggcccgcgagttccagttcaggatgctgctggtttcgtcggtctggacgaaggcgtcgagcgaggtctcgacgatgttgcgggcaagccgctcgctctcgcggagagattcctgcgcgagccgcgcttcggtcatgtcgcgtccgacaaagaagaagcgatgcgccggctcggaccagctgccgagccatgacagccagacctcatgtccgttcttgtggaaacagcgggtgtccgcgagcttcggacgctcgccgcgccggagggcgcgcatctcatcgcgcgacgtctccagatgatcgggatgaatgaaatcggcgccgctgcggcccgtcatctcctcgggccggtagcccagaatggcctcgctgctcgggctgatctgcgcgatgtggccccgcgcatccatgatcatgatcaggtcctgcgacgtctcgaagatctgccgccgctcctcgagctggtgctgcagcgcccgctcggcgcgccgcgcctcggtcaggctgcgcgcgctgccggaggcgccgatgatctcgcccgacggtcctttgatcggcgacaggccaagcgagatctcgaccggcgttccgtccttgcgcaggcgcaccgtctcgaaccgttcgatcggctcgccccgcgcgattcgccgcaagtaatccttgccctgctcgcggcggtcgggcggaacgatgatcgacgtcggcttcccgatcgcctcctccgccgtatagccataaagacgctcggcggctggattccagccggtgatgacggcctctaacgtctgcatcacgatcgcgtcgtcggacgactccaccgcggcgctgaacaagctctcgcgcgccgcgtgatggctccgcgccgcctcggtgcggcgatgctcttcgatctcgcgttcgagagcggctgctttcgcgcgcgtctcttcgaccatttgggcaaaagcccgcgccagcacgccggtctcgccgccggcatcgacgggaatgtccgccgggcgcccgctgccgatggcttgtaccgcggcggtcaggcgcccgatcgggcgcgtcagcgaccgggccagcagcacggcgagtgccgccgccgcgagcacggccagtacgccgacgagcaaggaggttctttggatggccgcgggcacgaggccgaacacaggcgccggaatcgtctcgatgattgcgacccattccttgcccgcgagcagtgccggggcgatcgccgcgccgctcggccggcccgattcatcggtcaggagccgcgtcgacacgtccagcgttccggccaacgcggcgaaataggggaagtccttgcgccagtcagtgggacggtcatgcgaggcgccgagttcgcgcgtgcgatcgggatggaggagatagccgccgcgcgagttcacgacgtaaatctctcctcccgagcgcacggtcgagcggacatggtcgagtgccgggcgcatgtcgatattggccacgatgatgccgaacggcctgtcgtcgtcggtgaacagcggcatcgcgacgcgcagagttggaacgtgaggagtcgtcgttcctcccctgcgggtcgcgagatcgactgacgacacataaatctcgccgggcctgagccgtatcgtttcctggaagtaggctcggtcgcccttgcgctccagttcgtcgtccggggcgatccgggccgcgccattcggtccggagcgatcgacacggaccagctcgcgctggccgttatcgataccgatgatccgaaattgcccatagatgggcttggcctcgatctcggccacgagccgtgtcgcgatacgctcgcgccaggtttgctccgagacgccgtctgaagggtcgattcctccagcggcgtgagcgcggatgaggcccttgatggccgccgcggcgcgatagccgatcagatcgccgcgcactccgtcggcataggattgaagattgctcgcgagcaggcgtgcctgggcttcgacccgctccaggactcgcggaatgaccgcctgtgtcgtgttgcgatagcccagccatccaacggccgccacggtgatcgccaccagcaggatcatcgcgacggccagccgcgttgccagcgtggttgcgagcctcatggggacattcgcagcaattgccgtcccgccgcgccatgtctggcctggagcagagggagcgttcttgtcatcggcagccggtgcggacatgggcgtcctccggctcttccgcctccaggcagccatcgatcgcggcaagaggctcgcctgcgaccgtcaggtgatggcctgcccgttccagccgccgccggatggtgatctctacggccggatcgtcatccacgatcaggatgttggccacgtccaaatgtcctcctggtcaggcggaagtccccggaccaaaatcaaagccatcaaatatgaaattgatgcgcggattctgctctgcccgcaagcacttcggagcctctccggcccgaggcgtggatttattgcgctgcacggaccggtacgcaggcctgagtgcatagctgaagtccgcctccggcccgtccggcgtcttgccggggatggacagcgtgtgagaagagcaaggcgaattcttcggacggacaaggaacagcatgaccggcaagaaaaagacgcccgaccagctccgcagcgcgcgctggttcgcgcccgatgacctgcgctcgttcggccaccgctcccgcgccatgcagatgggctacgcccccgaggagtggaaggatcggccgatcatcgcgatcctcaacacatggtaggacgctcagccctgccacatgcatttcaagtcgcgcgtcgatgacgtcaagcgcggcatcctgatggcaggcggcctgccgctggaactgccggcgctgtcgctgtcggaatcgctgctcaagcccaccacgatgctctaccgcaatctgctggcgatggatgccgaggaactcttgcgcggccatcccgtcgacggcgtcgtgctgatgggcggttgcgataagaccacgccggcgctgctgctcggcgcgacctcgatgaacatccctgcgatctatctgccggcaggtccgatgctgcgcggcaactggaagggcaagacgctcggctccggctcggacggctggaaatactgggacgagcgccgcgccgggaagatctcggacaaggactggctcgatatcgaggccggcatcgcgcgcagctacggcacctgcatgacgatgggcacggcctcgaccatgaccgcgatcgccgaggcgatcggcatgaccttgccgggcgcctcctcgattcccgctgcggacgccaaccatatccgcatggccagcgaatgcggccgccgcatcgtcgagatggtctgggaggatctgacgccgaagacgatccagacccgcaaagcgttcgagaacgccatcgcggtcgcgatggcgatgggttgctcgaccaacgcgatcatccatctgatcgcgcaggcccgccgtgccggccaggatattgggctggacgacttcgagatcgccagccgcaaggtgcccgtgatcgccaatgtccggccgagcggcgacacgtatttgatggaggacttcttctatgccggcggcctgccggcgctgatgaaccagatcaagccacacctgcatctcgactgcatcaccgtcaccggcaggactattggcgagaacatcgagggggccgaagtccacaatgccgacgtgatccgcgggatcgacaatcccatctacaaggaaggcgcgctcgcggtgctgaagggcaatctcgcgcccgacggctgcgtcatcaagccctctgcctgcgcaccgcgcttcctcaagcacacgggacctgcgctggtgttcgacgactatccatcgatgaagaaggcggtcgacgatcccgatctcgacgtcaccgaggatcacatcctcatcctgcgcaatgccgggccgcagggcggtcctggcatgccggaatggggcatgctgccgatcccgaccaagctggtgaagcagggcgtccgcgacatggtgcggatctccgatgcgcgcatgagcggcaccagctacggcgcgtgcatcctgcatgtttccccggagtcctatatcggcggcccgctggcgctggtgcagaacggcgacttcatcacgctcgacgtcgccgcccgcaccatcaacctcgatgtatcggaggacgaactcgccaagcgccgcgccgcctggaagcagcccgagcgccgcttcgagcgcggctatggctggatgttcaccaggcacatcaagcaggccaatgacggctgcgacttcgactttctcgagacggatttcggcgcgccgatcggcgagccgtcgatctactaggttctgtcgttccggagcgcgacgcgaatccggaacctcgagattccggtttcgatgctgacgcatcgccccggaacgacgaccagagagagtacacccatgaccaaactatccgaagccacgcgcaacaagctgaaatccgtctccaccgccaccgtcgccaccgcgctgttcaagcgcggtctccgcatccagatgatccaggatgttcgcccattgagccccgaccagccgaccatggtcggtgaggctttcaccctgcgctacatgccggcgcgcgaggatctcaacaccatcgatgtgttcaaggaccgctcccatccgcagcgcaaggcagttgaggattgtccgccgggcgcggtgctggtgatggatagccgcaaggatgcgcgggccgcctcggcgggcgcgatcctggtcacgcgcctgatgaagcgcggcgtcgccggcgtcgtcaccgacggcggctttcgcgattctgccgagatcgccaggctcggctttcccgctttccaccatcgcccgagcgcgccgaccaacctcacgctgcaccaggcgatcgagatcaacgtgccgatcggctgcggcgacgctccggtatttcccggcgacgtcatcctcggcgatgccgacggcgtcatcgtcatccccgcacacttggccgaggagatcgccgacgaaaccttcgagatgaccgcgttcgaggatttcgtcaccgaggaagtcggcaagggccgtggcatcttcggtctctatcccgccaccgatccgaagacgctgaccgatttcgcggaatggcggaagaagaacgggaggtagtcgcctctcaccgctcgcgggaacaggtcatgccgccgccatccccaccgcccacagcgcgaacgcgtacacgatcgcgacttcgtccagccggtcgaatcgtcctgaggcgccgccgtgaccggcgcccatgttggtgcgaagcaggaccgggccgccgccggtcatggtggcgcgcaggcgcgcgatccactttgcgggctcccaataggtgacgcgcggatcggtcaagccacccatcgccaggatcgccggatattcttttgcagcaacgttgtcgtaaggcgaatacgacaaaatggtgcgaaaatccttctcgctctcgatcgggttgccccattcgggccattccggcggcgtcagcggcagcgtgtcgtcgagcatggtgttgagcacgtcgacgaacggcacttcggcgacgatgccggcgaacagctcgccggcgcggttggccacggcgcccatcagcatgcccccggccgagccgccatggccgatgatccgcttggcgctggtgtatttggcatcgatcagcgcgcgcgcgctggcggcgaaatcgtcgaacgaatttgtcttcttctcgcgcttgccgtcgagataccagccccagcccttgtccgcgccgccgcggatatgggcgatggcgtaaacgaaaccgcgatcgaccagcgacaggcgattggcattgaacgaggccggcatcgccatgccgtaggacccgtagccgtagagcagcagcggtgccgagccctcgagcgggagcccgcggcgatagaggatcgagaccggcacctcggcaccgtcatgcgatttcgccatgatgcgggtggtgacgtagtcggcggcatcgtggccggacggaatctcctggcgcttgcgcaggacgcgcgtgcgcttgaccatgtcgtagtcatagacttccgagggcgtcgtcattgacgaataggcaaagcgcaaattcgtcgtctcgaattcgtaggagcccatcgtgtccagcgaataagcggcttcttcgaacgaaatctcgtgctcctcgttcgttgcgaggtcgcggatcacgatcgccggcagcgcatgggagcgctcgagcctcacgagatggccggcatagaggtcgatgtcgatgatgtacagcccggtgcggtgcgggatcagatcgcgccagttcttgcgctcgggcgaagcgagcggcgcggtgacgatcttgaagtcgatggcgtcatccgcattggtgagaatgaagagctcgtcgccgcgatcggcgagtgaatattgcacgccctcctggcgcgccgcgaccaggcgcggcggcgcctcgggattggcgagatcgatcagccgctgttccgaggtctcgtggtcgccgcctgcgatcacgcagaagcggccgctggtgctctcatgcagatgggtgaaccagccggcatcctgctcctcatagaccagcgcgtcgtcggcctgcttggtgccgagcctgtgccgccacacctgcatcggacggtggttgtcgtccagcttcacgtagaagaagctcctgcagtccgcggtccagaccacaccgccgtcggtctcctcgacgaggtcgtcgagatccgtcccggtcgcccagtccctgacgcggatggaaaaatactcggagcccttggtgtccgcgctccaggcctgcagcttgtgatcatatgagtgccggcttccgccaaatttgaaatatttgtggcccttggcgagggcgtcgccgtcgagcacgatctggccctcgccgccgtcgcgcggcatgcggccgaacagctcgtgctgcccgccttcgcggaatctgcggaaataggcaaagggcccatcgggcgacggcacgctggaatcgtcctccttgatccgccctcgcatctcgcgcaccagcgtcttttgcaaagccgcggtatggccgagcaggctctcggtgtagacgttctcctcatccagatatttgcggatatcagggtcgagcacggcgggattgcgcagcacctcctgccaattcgcgtccttcaaccaggcatagtcgtcggtcacggcgatcccatgccgcgtgaaggaatacggccggcgcggggcgacggggggctgggaaggcgtcttggcttgtgtcactcaatcctcgttcgtgtctcgccggctcggatcgtcatgcgcgggcttgacccgcgcatnnnnnnnnnnccaacgaagattcgtgagcgatggattgccgggtcaatccggcaatgacggcgacaggagcggcagttcgcgcataatatggcgacgagagcacgaattgccagccgcgcagcgccgaaccagacgggttgttgaccggccgctcgtatgctttagggacgagattcccgccgccggtccagcctgatgctgttcaattcctatccgttcatcctgctttttctgccgatcgtgctggccggctatttctggctcggccggcgcggcaatctggcgccggtgatctggctcgcgctggcctcgctcgccttctacgccatcggcagctggcaattcctggccctgctgctgatctcgatcgccttcaactacggcgtcggccatctgctgatcgtggcgaagctcactcccgtccaacgaaaggccgcgctcattctcggtgtcgccggcgatctcctcgtgctcggcatcttcaagtatgccggctttgcggctgagaacatcaacgcgctgctcggcacgcatctagtcgtccacatcctgctaccggtcggcatttccttctataccttcacgcagattgcgttcctggtcgacgcctatcgcgggcgggtcgcagcctatgcgctgccgcattatgcgctgttcgtgacctatttcccgcatctgattgccgggccgatcctccatcacaaggacatgattccgcagttcgagcgccaggaatcgaagcatccggacgcgcacctgatcctgtgcggaatcatcatcttcgcaatcggcctgttcaagaagacttgcctcgccgatggcatccagccgctggtcgcgctcgccttcgaggcgcgctcgccgagcttcgaccaagcctggcttggcgcgctcgcctacacattccagctctatttcgacttttccggctattccgacatggcgatcggaatctcgctgatgttcggcatcttcctgccggtcaatttcaactcgccctacaaggcgaccagcatcgtcgagttctggcgccgctggcacatgacgctgtcgcagttcctgcgcgactatctctacatcccgctcggcggcaaccgccgcggccgcgtgctgcgctacgtcaatctgatgatgacgatgctgctcggcggcctctggcacggcgcggcctggacgttcgttgcgtggggcgcgctgcatggggcttatctctgcatcaaccatgccttcaacgcggtggtgccgagcattccgtcaccccttgcgaggccggctcgaatcgctggcgccgcgctcaccttcctggccgtggtcgtcgcctgggtgttcttccgggccgagagcgtcgccggggcgctacggatcctccgcgccatggtcgatccctcggaggtcgtcttcggtcgccaggagatcgcggcgctggtgctgatctccatctacgccccgctggtatggctggcgccgaacacgcaagcggtcatgggttacgatcacggcagccgcaaggtcggcgaggccttgcgggcagggcgcatgcggccgctgtttctctatggcgcctcgctggtgctcgccttcggcattctgggtatccagagccacagcgaattcatctatttccggttctgatgggcgccccattcaccaatgtgagacgtctgctcctcgcgagcatcgtttgcgtcctaggcgcggccgcgctcacctatgtcgtcgatcccctgcaattgctccgtccctcgcgcctcaccgcgttctattccgaagacactcgcgtgcagaatgccgggctgatccgcagccagtcgttcgacactgccttcatgggcacctcgctcgcgatccattttcgccagagcgagatcgaccgcgcgctcggtacccgttcgctcaagctggcgatgaccggctccaattcacgccagcagagcttcgtgctggagcaggcaatcgatcgcggcgcaaggcgcgtggtctgggagatggacgacttcatcttcgtcgatgccgccgacatcgaggcggatccttatctgtccgtcgatctttaccgcgcaacggtcacgggcatcgcgtcctatctgttcagcgcggcgatggcgaaggagtcgctgttcgcattgctgaggtcggttccgccgctgcgcgacccgctgacccgggcagcgccgtctcttcccgtcaagttcgcgctggcggacgtcgacgacatctatgcgctgccgcgggatttcgacgtcgcgcgcgactacaatgcgaagaagacgcttgccgccttcacctacatcacagatcctgcgcgcagccgcttcctcggcgaaggctacggctacgacgccatggtcggacatttcgagcgcgatgctctcggcctgatctcacgccatcccgacgtgaccttcgacgtctatttcccgccctattcgatcctgcaattcgtcgccatgcgcgacgcctcgcccgagacgctgaagatcgtcaccgatctgacggccgtcattgcgcagcgactgacgcggcttcccaatgtccgcctccatgacttccgcgcgatcagccaggtgacgcacgatctcgacaactacagcgacgtcattcaccactcgccggtagtcgatgcgaaggtgctgaagtggctgagaagcggggagtatcgggtcgacccgaaagcgccgctcaaatcgctgaatgagttgaagacccagatcgaagtatatcgcctcgagcactgatcttaccctctcccgcaaggggagaaggaagaaaggggcgcggcgtcggcagggacagcgttacgttacgccgccacttcctcacccagatacgccaccgccgcttccagcccgcccttgccgtgcgggatcttcagcgcattgagcccgatctcgatcacgccgagcgtgccgagcagcatcggcgcgttgacatggcccatatgggcgatgcggaaggcctgtcccgagagatcgccgatgccggtgccgagcacgacgccgcacttgtccttgcaatagcgctgcagcactgcggggtcatggccgttgctcatggtcacggtggtcacggtgttggagcgctcgctggcttcggcgacgttgaagccgagcacctggccttccgaccacaccgcgactgcgcggcgcgcggcttcgccgagcaggctgtgacgacggaaggcgttctccaatccttcctcgtgcaggagatcgatcgcccggcgcagcgcgaacaacagatgcaccggcgcagtgccggcatatttgcgataattctcggtaccctcgcgctcgctccagctccaatagggcgtcgccatgttggctttcttgtgcacctcgagcgcgcgcgcattggcggcgacgaagccgaggccgggcggcgtcatcaggcccttctgcgagccggacatggcgacatcaatgccccattcgtccatcttgaagggcatgcagccgagcgaagcgacggtgtcgaccatgtacagcgcgggatggccgctcgccttgatcgccttgccgattgcctcgatgtcgttctgcacgcccgaggcggtgtcgacctggaccacgacgacggccttgatggcgtgctccttgtcgcggcgcagacggtcctcgacctcgtgcggccgcaccgcgcgacgccagtcgcccttgagcacctcgacctcggcgcccatcagcgcggccgcattgccccagccgatcgcaaagcgcccgctctccagcaccagcaccttgtcgccgcgcgacagcacgttgctgagtgccgcttcccaggcgccgtgaccgttggcgatgtagatgtaggacttgcccttggtcgcaaacagtttcgagatgtcgccgagcaggctctcggtgaggtcgagcatctccttggagtagatgtcgatcgccgggcgatgcatcgcccgcagcacctcgtcgggcatcgtggtgggcccggggatggccagaaattcccggcccgcgcgaacggtcattgctgttggtccttgttgcttgaggacggactgatgggttgctgggtcatacctttacgcggcgctgaagccttggaaaagcgcgcaaaacgcgggtctgggttatcgtttggtctcgcggcagccggcggcttcggcctcctcgaccgagcagaaccagcgggtgcccttgctgaccttcatcctgatctgggtgtaccagcggctggtcggccggtgatagatgcactcgccggcgctgttcacattgcccttgatggtgcagtccggcgagggggcgaccggccccgaggccgaggcaagcagcacggcatgcgctccgtcgggcggcttggtcgcgcccagaatagtggtcttcttgtttcggacgcgccagtcccagggcgcgatgaaggcgccctgccacatcccgaccttggcctcgcgcgcggccttttcatccgcctcgtagtcgcgcgacatgcgggtataggccagcgcccagccgctgcgcaccagccatttctggatgtcctcgccgccgacctcgcagcgcgccacggtgcggccgcgccggtcgatagagcgggtgtggcagacccagttcttgccgtcggcgtgtttggcaagctcgtcgcgggccgcgacgccgcaggtccaccgctcggccttggtgttgaggcagagctggtcgattgcgggcgcgtcgatgccgccgagccgaatgcgcgtgttgccgatcacgaccgcatcgccggcacggacctttgcggtcccggcgatctcggcggcgtacgccagcgacgggagggccagcaaagacagcgcaaggaggaattttcgcaacatgccggtccgcgtgtgatgaacgtctttgctagacggcgcaattgtggtcggcttttggctcgtcggccagcttatgcctcacgattgagctttcaacttcccgtcattgtggaagggcgttctccccctccagggcagggtaacagagttcgtcacccccgcgccatcgcgcgcttcgccactgccagtcccatcagcacgaaggccgacgtcacctccgggccgccgacaagaatccgcgtcggcgtcttcatcttgttccactcgtaggcgcggaacgggccgcggcggccgccttcgccaaggctcgagatgatgacgttcaaggccggcgcgaaggcgcgcgggtctgccccgagatggccgagcgcgatcagcgccaacgcggcgtcgaacacgttcatctccgcagccatcagctcgcctttgacgtaggccagcacgcggtggcggatgaaatcgaaatcgccggctgggtcgatcgccgcttgcgccgccagcggcagcgacaggaacgcggcatagcagcggccgaaataggcgctgtagagctccggcagatagtagatgtgcgagcgcggattggcgaaggcaccgctcgccgccaggcgcttctgaaagccgatgatgcgatggacggtggcgagccgcgccggagtctccaagaccttccagcgccccaggttgcgaaagctcacctcgaggatgtcgagattgagcgtcgggtcgagatcgttgccgtaagggcgctcgccggcgaggttgtcgatccaggtcgcaaccccgccctcgtagtcgatgttgtcgttgagcggcacggtcacgcggggggcgttgacgccggcgcgcacctgatagccggcgtagaagtccaatagcggctgttcgatgatgggatcggtgcagccggcctgcgtcgctgcggagatcgagcacgccgtggtgtcgcaatccggcacgtagattccgaagccgagatcctgcttgatctgtgcgaagtagcgggagaagcgtggatgcggcgccggcgccagtgcggtgaccacgttgaagcgtgcgccacccaggccctcgacctcctcgcggctgatgttgacgcagaaatccaccatgtcggcgatggcgcgctccgctgccgtcttgtcagccggcgaggcgagtccggtttcgacatagctcagcagcgcctcgatgaagaacgcgtcgtaataggccgagcgatggcggatctgcaccggctcccacatcggctcggcaatgcctttccagggcggattgaccacggcgcgcgccggcgagcgcgcgatgaagacgcgggcgagattgaacagcagcgaggagttcttgtagccgcgggcgttcagccccgtcagtgccatgatcagctcacgcccgcggaaatcgggatcgccgatcaggttgaaggcggcataggtcggcaggaaaccgtttcggcggtgcgagccgagcagatgctgtgcgcagtcgcggatcgcgccgtcgatctgcgcgctctgcggcatgtccgcagcgaacggcgccggtggcggcatgggatggtcgagcgcgatgctgtcgacgagatcggcgatcggctggccgatcgcggcccagtcgggctcggcctcgtcgcgggcgcgggcgagcgcctcgcgcaaccgggccagcttcgtctcgtcgcgcagctcgggcaggccggcgcgacggagcaatatccgtagtgcgggattgccgagtgcagtcttgtagaattgggccagatgtggatcgccgccggccgtcacggacaataccgggtcgcagacgtcgtaaagcgaggggccgtccttccgcgccgtgagcgcccggcaggcggcgccggcaaaataatgaaagctcatgaaatacctggttgcgggggcttggccggggccggcgagcgcgcagctgtccgcacgccaccccctgcaagtctttgaaaaggctatccggattcgcaggaaatacaaacgtgaaggaggtcacggaaaatgccggcatgagggctgcatggtcggcccccggaaggctacggggaagcccagaatcgagaagtttggcggggtgaattaatcaacatattcaggatcttatctcaaatttttggcaatctattgctccaggtcctatatgcggttaagggtttgtttggtgcggcgccgcaaattgcgcgcaattcgggggcacacccccggccaatccttcaaacctaaagacgctagctcgctactcaagcagtgtgcgcgcgcttggctggtctttggcacaggaaacgaaccgagatgaatgtaaagcagctcgacctttccagacggacgatcgcggtcgccgcagccctcatcggcacggtatcgctcgcgatcggcgcccatgctgctctgaacatgcgtgcgatcgatgccgccaaggccgtcacgaccgaccagatcaccggttcgatcggtcagagcgcgcgcctcgcgctggtcatcggcaatggacattatcccgacgccagcgcgccgctgacgcagtcgatcaacgacgcccgcgcgctgtcctcgtccctgcgcaagaacggctttgacgtcgacatggtggaagacgcaaccaaggacgacatggtccgcgccgtcaaccgcctgaagtcccggatcaagcgcgacagcgtcgtcatgctgttcttcggcggctacggcgtgcaggctggtcgtgagagctacatgctgccggtcgatgccgtgatctggaaggaacgcgacgtgcgccggcatggcgtctccatcgacggcgtgctcgacatgatgaaggagcagggcgccaaggccaagctcgtcgtggtcgatgcctcccgccgtaacccttacgagcggcgcttccgctcctatagtcacggcctcgcgccgatcagcgcgtccgacaacgcgctgatcctcacctccgcgtcgcccggcaaggtcgtcgacgacggcaggggtgagcacagcgtgctggtcagcgaattcctcaacaacctcggtcagcccggcagcgccgaaagcgtcttcaacaagacgcgcctcgccatctcgcgcgccagcgaaggcgagcaggtcccgaccgtttcctcctcgttgctcgaagacgtccggttgagcgaagccggcggctagcttttctaccctcccctgcaggggaagggtcgatcatgcgcaagcgcgagcggggcggggtgatctctcctctcggggagtgcccgcacgggtgaggtgtcctgtttctccgcgactacttcgcggcttccgcactcgccatcaccgggcgcaccgggtcgccttcgcggagcagcgcgccggcgcgcgcgacgacgacatcgccttcgttgagcccgtcgcggacctcgatattgccgcccgacatcaagccgacctcgatacgcttggtctcgacgcggttgcggcggatcacctgcaccacggtcccggcggaggaatactgcacggcggtcagcggcaccgcgacgttgcagctctgcccggtcttgatcagggcgcgcccgctcccgttcaggagcagccgcttctgcgaggaaatgccgatatagaccatgccctgctggatattcggctcgacggtcgccccgatgcggcgcaccttgccgctgatgtcgccggcacctgcgatccgcacggtggcctgctgattgactgcgagcttgcgcacgtccgcggtggcgacgaggccgaccagatcatattcgctgcgcgccacgatcgtgaacagcgcctcgcccttggccgaggcgaagttgccgatctgcgcagtcgaatttgcgatcacgccggcgacgggtgcggtgacctgaagcgtgccgccttcgggcagcgcgagccgcgccagcacctgtccggcggtggtggtgtcgcccgcttccgccagcacgtccgtgaccttcaggccgggacgctcgggccgcaccgaggtttcctcgcgcgcgatgatcgtgccggtcgcctcgacgatgtcggagaagcaagattttgcgactttcaacaccgtgaccgccggccccttcggcgcatcgtcatcggcggcagccgggtaggggctgacgacgagcaggccggcgagggctgcgggacacaagttgcgaacgacggcacgggacaaatgacgcattggaaattccacgggggctatgcctccaaccgatagcagatggccgccgcgcgcactacggccgcgtcgtcccaagacgggatgccgcgccgccgcaggcgtcgcggcaagtctttgattagtcgcgggattggagaacaggttcgcgcctgttgaccttggtcgccatcgcggcccgaacgcgggtgagggcgccgcggcgctaggacatccacgattctgggggcatgttcgtccagcgtcattggcagccggtcaatcgccgatccgggatgctgccggccaacctgtcgtcctgctgcaccacgtcgaagacgtcacagggcaggtcgcggcaccgcgctgaccgtcagctgcggcgctccccgagcagcttgccggacgagcgctcgatcaaatgcagccgcgtgcaggccgggcaggacacggacacatgcgtacgatcggccggctcatcggtcagccgatgctgcacgttcaggcccgtctgggggcatttgaagacaatttgtcggtccatgcgcaagatatgacgccaaggcgggcctcgtggaattacggatgtttacgtaggtcggtggccgcggctcccccggcgggatcaagaactccgccccgttcggctcctgccggcagggtagcttcgggttggccggcgcgccgctgtggcccgcaggggatcggaagggatcttgcgatgccgatgcgaaccaacgccgcgcgaacgcattgaaccggcatgccgcgtgagaacgatctcgaaggtaagcccgacatgggtggcaagcatggcggtcaggccggccagcccaagcttccgccgcgtccgcaggagggcgagcgcgatggtgacgtcgtggcaaagcgccacaccggccaaaccgatcgcgcgccgtctccgaccagaccaaaatagcgcctcgcgcgccgccggcgtgagtatcgcgccggaacggcgggcctggcgatgccgttggcccggcgtgcagcaaaacttggaaacggaggctggctcgtgttttggatctgttggaacaccgcctggtcgttgatcatcagcggcatcatggtcgccaccatcgtcagccaccccgacgccgaattcgccgaagtgcgagcagcccgacggttgatgtgagcctcccgacctcgcgcaggccgatgccgatacacgtcagctcggcggacctggtccgctcccgaaccctcggctcgacccgccttttgtcgggagcatgatcttgcggatgactggctctcgcggcagttgctggataatgggtttgcgtatggctaagctttggtccgttcaggacacagaacgagatggatcgacgcgcatttctgtcttcgagcatttttcttgcattggcgtcgcgtaacgtcgcacgcgcagcgggcaaggttttccgtatcggctggctcacggcgcaacgagaggcgagccttgctccttttctcgaagtgtttcgcaccggtcttcgcgaactcggatatcgtgagaacgagaacctcgaggtcacctattgctatggcgacgatgatctagcccgcgttgcgccgctggcggcaagcttggttcgcaaacccgtcgacctgatggtcgtgcagggcgctgccgtcgcggtcgtgtccgaactgaagctatctacccccaccgtgtatgtcttcagcggcgaccccgtcgtcgccggcttcgccagcagccttgcgcggccgcgtgccaacatgaccggcttgacgttcatggccgccgaattgaacgccaagcgtttggaaatcttgcgagataccgttccaggcttgcaacgcgtcgccatcgtcggcaatccagaacatcccggctcgcagatcgaacgcgcttacgcggaggacacggccaagaaactccgactggcaaccgacttcttcgccaccgcaaaccaagaccagcttgccgctgcattcgcagcgatggactcgaagcccccgcaagcgatttcgctctttgcggatggttttgccatccaatatcggagccggatcatcgagcatgcgatgaaacatcgggcgcccgtcatttcggggtggcccgtattcgccaggagcggcgccctctgcacctatggacccaagctctccgactcttatctccgcctggcgtcgtatgtggatcgcgttctcagaggaacggccccctcggaattgccgatcgaacggccgacgaagttcgaaaccgtcgtcaatctcaagaccgccaagaggctcggcctgagcttgcccgactccatcatcgcctccgccgatgaagtgatcgaatgaccggcgcgggccgagcgttaagctgctaacctgtcgccggaccctggaaaattgagtgcgtcgtcgggaccgctgcttcctgctgccgctatccggcagcacgccgcgccctgaccggtttgccggaggccgggggccgggcttccgccacgtagtcgggaagttgaaacttgcgccggtaatccttcggcgacacgccggcctgctttcgaaacaggcggcggaaggaggccacgtcctcgtagccgacctcgcgacagatgtcctcgatacccgcttcggtcgtctcgagcagttgcttggcctcctcgatgcgcagcgtctgcacataggcgagcggcgaatagccggtcgctgcgcggaagcggcgatcgaatgagcgcttcggtagcccggagtgatgcgccagcgccgcaatgagatcctgccgctgatagttctgcgcgatgtaatcctggcatcgcgtgatcacgccatccccgtgatccacgttctgcaccatggaggcgaacggcaattgtccttcgcgatgccactggtagagaaacagcttcgagatacggatcgcctcttccgtgccgccgtatttcgcgacgatcagcagcgcgagatcctgccaggacgatgcgccgcccccgcagacgagattgtgtccgggcccgttctgcaccaggacgcggtccatgcggagcttgacctccgggaaatgctttcggaacaccggctcgtaaacccagtgtgtcgtcgcctcgcacccgtcgagcaggccggcttcggcgagcacgagcgatccgccgcatgaaccgtacatctgtgcgcctgcctcgtgcatcttcctgatccatgcgatgagccggcgatcaagcccggcggtgccggtctttgcagtgacgatcacattcggcacgaacacgatatcggtcgatgcgacgtgatcggcgatgtcctgcggcatgatgctgacgccggtgaccagcgtgatcgggccgggctcggcgccgaccagccgcggctcgaacaagccgtccggcgtgccgcctttgacgccgtcccatatgcgccctgcgccccacaatgtgtcgaatacgccgtagatgatcgacggatcgcattcggcaaacaccggaatactcacgcgtacacgtccacgtgacattctgcagcctctggctcgattggctcgaaactgactattctgcctctgcatccgcaagtccagacaccgtatgtcgcacctcaacggcgcacgtccgcgccttcgaaggagcaggtcatgaacttggatgagacaaagctcgagcagttgctcggactcgtggtcaacgaactcggcgcggcctccaatgcggcgctcgtcgtcctcggcgaccggctgggtctattccgcgcgctggccgaacgcccgatgacgtcaggcgagctcgccgatcggacagggacccacgagcgctacgtccgcgaatggctgtccgcacaggcggcctcgggcttcgtgagctacgatgcgacgaacgatacgttcagcatgacaccggagcagaaggcggtcttcgcggatgaaaacagtccggtcgcgatggtcggcggcttcagcctgctgccggcggtctatcacgacgagccgcgattggccgaagcgttcagaaccggcaagggcctgcgctggagcgatcactgcaattgcatgtcctgcggtgtcgatcgtttcttccggcccggctatcgcgcgcatctgatcgcagaatggctgcctgcgttgggcggcgttgtcgagaagctggagcgaggtgcgaaggtcgcggacgtcggctgcggtcacggctattcgacaaggctgatggccgaggctttcccgaactcggacttcatcggcatcgattacgatgaggcctcgatcggctgcgcaaggtccgagacgtccggcgtgcgcaatctccgctacgaggtcgccaaggcgcaggatttcgccggatcgggtttcgatctcgtgacgatgttcgacgccctgcacgacatgggcgaccccgttggcgcggcacgtcatattcgttctgcactgaaggacgacggcacgctgatgctggtggagccggcggcgggcgacagccttgccgacaatctcaatccggtcgggcgcgtctactacgcgggctccacccacatctgtctgccgacgtcgctgagccaggatgtcggtctgggactgggggcgcaggccggcgagaagcggattgcgcaggtgttgcggcagggcggcttctcgcagatcgccaaggctgccggttcgcccttcaacatgatcctggaagcgcggccatgagggccgcgctcattctccagaggcggatcagcgcgggcgcagtccggccgtacgctgcggacgcaagccgagaattgccgtgatcgacatcatcttccacctccttctcgcccgcgcctcgctggtcgccggcctgtcccgctggtcctggaggcggctggctgcgctcggccgccgcagatggcgcgaattctggaccgtcacggcgggggcgtgaccgacgccggcctgcgccgagctttgggtgccgcggggtagcaccggttcatcccggggatggcacgaatcatcacatcgaccgtcttgctgccgcagccaaatcggcgcactttgccgccgtcggctgatttgccacccaaggtccctttcagatgattaccgcatccaaggccttcattgccttttgcctgctcgcccttgtgggcactgcgctcgtcgtcggcccgaccgagctgcgccgcctgctgccgggcgggacgaagactgtcgtcgccgtcgcgccggaggcaaagatcgagcccagtgtcgaggccaagatcgagcccaagatcgagcccaagaccgaactcaaggctgaggccaaaccggagccgagaccggatcccaagccggagcttgccgccgctgcgccgcctgcaccggccgcggcgccgccgccggccgccgagccgaaggcgggcgtgctggccgagacgcagaagcaggtggccgcgctcggcgatctcgcgcctcgcaagccaccggcggctgcggatgccggcccgcgtttcgacgtcgcccgaatcgacgatcgcggcgaggcggcggtgattgccggccgcgccgcgccgggcgcaagggtcgaactgctgcgggacggcaagccgctcgatacggtggtcgcggacgcctcgggccaattcgtgatgaccccgccgcagctgcctgccgggtcgtatgagctgacgctccgggccaaggcgccggacggcacggtcacggagtccggccggaccatgccggtgaccgtcgccgaggcgccgccgccgcccgcgcggcccgcaatggtggcgaagcaggacaccaggcaagctgagaagccggacgacaagtcggatatcgtggccgcgctgccgtcggcttcaccgcgcctggcctcggtccccgacggtcaggcggcccggccgaagccgattggcgcgccgaagcccaaggtcctggcgcgggcgccggcagccacgacggttgcttcggcctcgtcggcagacgtgctcaccgccgcgtcggcggaagcgggcggcaaccgggtcattgccaagggcgacagcctgtgggcgctcagccggctcgcctacggcgatggttcccgctatgcggtgatcttcaaggccaaccgggacaagatccagaaccccaatctgatctatcccggccagaccttcgtgatgccgcctaaggcggagtgatgccgctgcggcggccggcgtgcatgggttgcgacgctttgccctgtgccgcgccggaacattcggttccctcgcgcgtcatcgtgactgcggcgcattgcgcgcttgccgcgggagagagggtcaggacgtggccagatcggcggtcaagtctgcgttcatgtccgggcgcgtggggctggcgctggccggcgccgccctggtgattgtggcagtgctgctgccaagcagagccgaggcacaattcggattgcgtggcggaccactcggcgtcgcgcgcttcgcggtcggccacatgatgggactgtcgcggctgcgccactcccgcatgggggtgcgcggcggccgccaccgctccgccgcgttgagatcgcaggatccccgcggcgccgggcgtggtcagcgatccaacccctacgtcctgcgcgcggccctcacggcgcaggccgcgctgtcgggctggcatggcgggcgccggccgcaaggctgggggcgccatcccgatggcagctacggctgggtaggaccggtattctggccattcgcgcacgatgatctcaccaacgcgatcatcctgggcgacagtaccagcctctcgctgtacggctatggcgacatctatgccgcgatcttcgcgccttatgcagcgacggagctcgccgcctacaccaagtcgcagggccggcgctcgcggagggtcccctccgcggaggccctttgcgaggccagcgatagcggcggtctgccggtcgaccgcgtcgcgagcaccgtgcaggcgaacgagttgcagcgcaccgcgctcgacgagctcgcgtccgcctggactgccgcgcgcgacaccatcagcaacgcctgcccgtcgcaggccccggcgaatgcctcggagcgtctcggcctgatgcgcgagcggatcgaggccatgattaaggcaattgacgcgatcgaagcgccgctttcgaagtttttcgatcttctcaatgacgaccagaaacgcaggctcaatgcgctcgccaacgagcgtcgcgccgcgctggccgcggttcagcgcaaggactcgcaggcggctgccgcttgtaagccggactacgatccccgctatgacgaaaaggcgcagcgccaatatgagcagctcgtgcagcagcaatggcccgccgccgacatcgcctccacgcttcagctcgacgaggtcgcccgcgcccgatttgaggtgctgcaggataccacgctgcgcaccatgcagaagctcagcgcctgcccgacggaagccgccgcgaccccgcaagcacgcctcgccgccgtcaaggcgcgactgcagacgatgctgcaagaggtcggcggcgtcagcgatgcgctcgacgatttccaggcggatctgagcgacgagcagaaggccgggttcgaggcgatcggaccgaagcggggagcgtgagactcgcgccgaaacgcctctggcgaaagccgctagccaacctcgcgcctgaccttcgccgctgcatcgcacatcgccttcagctttccaaacgcggtcgcgcgcggcatgtatttcatgccgcaatcgggcgccgggatcaggcgctccggcgagacatatttcagaccgttgcgaatgcggtcggcgacggtatcgacgctctcgatcgcggggtccgcgagatcgagcacgccgagcatgatcttcttcgatgacaggtccttgagcacgccgaggtcgagcttcggctgggccgcctcgatcgagatctggtcggcaatggtgtcgtccagctcggcaaggaaggaatagccggcgggcttgttcgagccgggcacgacggctgcatagccaaagcagagatgcaccacggtcggcaccgtgatgccctgcagcgcgcggttgatcgccttgacggcatagcgcttggcgagctccggattgttgcgcacccagggctcgtcgagctggatcacgtcggcgccggccttctgcaggtcgagcgcctcggcattgacggcctcggcgagcgccatcgccagctcttcctcgtccttgtagaactcgttcttggcctgctggctcatggtgaaggggccgggaagcgtgatcttggcggcgcgctcggtgtttttgcgcaggaactgcatgtcatgcagctcgaccgggcccttgcgccgcacgggaccgacgacgcggggcaccggcgtctgcgtgttgccggtgcgtgccacgatcatcgcgggattgtctgcgtcgatgccgtcgagcgcggtggcgaagcgattggagtagctctcgcggcggatctcgccgtcggtcacgatgtcgatgccggcacgctccatgtcccggatcgcgacgatggtggcatcgtcctgggcttcttccagatgttccggcggcaatcgccacatgtcgtgcaggcgggtgcgcggcaccaccttcgacagcatggcgcggttcaccagccattccggctggggatagctgccgaccacggtggtcggcaggatgtgcgtcggcatgggcatgggggtctccttcttgttcttgttcagcgcgaccgttcaggccgcgcgcgttgccgcggctgaaccctcgtccttgacgggattgcgcaggataccgatgccggagatctcgacctcgacgacgtcgccgcccttcatccacagcggcggcgtacgataggcgcctacgccgccggtcgtgcctgtcacgatcacgtcgccgggcgcgagctctgtgaacgtcgagcaataggcgatcagggccggcacgtcgaagacgagatccgagatcggagccttctgcacctcgacaccgttcagccgcgtgatcagcgtctgctttgtaatatcggtcagctcctcggtcgtgaccatccaaggtccgaagccgccggtgccggcgaaattcttgcccggcgcgaattgcgaggtgtgccgctgccagtcgcggatgctgccgtcattgtagcaggcgtagccggcgacatggctgagcgcggcttcgcgcgagatgcgccgtccgcccttgccgatgatgacggccatttcaccctcatagtcgaaacgctcggactccagcggccggatcatcggctggccatgaccgacctggctgttggcgaagcgggtgaagatcatcggatgcgccggcgtcgggtgaccgctctcggcaagatgcgtggcgtagttgacgccgatgcagaagatcttgtcgggatcggggatcgtcggcagcagcgcgacgtcttcgagcgcgtagtcaggcttctcgccggcaagcttcttcaactcgtccatcgagcccttcgcaagcagcgttttcagcgtcggataggccttcaggcgcttgcccgcgtcgatgacacccttgtcggtgacgatgccatagctcggcgtgccggcgatggtgaagcttgcaactttcatcggtcaaacactctcttcgatggaggaaacatagtcgtcgatcggaagcgcgatctcgccgttgcggatgggaacgcaaggcggcggaaagtcctggcggaagcgggcgccggccgcggcggcgcgatcgagaaagcgttccagatgatccatcgcgccggtcggcaggtcgtgcagcaccatcagcgtccagggctgccggctgcactggccgagcgcgcgctcggtccagccctcggggtcgtcccagtcgcgcggaatggaattccagagcacgcagctgtgcttctcgcgggtgagataatcgaccacggacggcttgagcagccgcttgtccagattgccgccgccaccgaacggccggaaccagcgctgcggatgagcgagattgccgatcgcgtcctgcgtgcggccgatctcgttctccgcggtgtcgcgcccggattgctcgccaagcggaacgctgtgcgtaaaggtgtgattgccgatccagtgtccctcgcggtgcgcgcgctccgcaaggccgcgccgctcgccatcggcaagcttctcgccgatgacgaagaaggtggtcttgatgccgcgcccgccgaggatatcgagcacgcgcggtgtgacgtctggatccggaccgttgtcgaatgtcagggtcaagtcgtgcacgcgcgtacctcacgtcgccggctgcattgcgcccgaagcgatctcgtcattggcctgaccgccacgggtgccggtttgccagatcgccgccttgcgctcgatccatctgatgatggcgttgaagccgatcgcgaggaacagcacgagcagcacgccggcgaacacatgcgcgctgtcgaggatggtgcggtagcgcgagatcagatagccgatgccggccgaggagatcagcatttccgagacgaccacgccgacgatcaccagcgcgccgccgacacgcaggccggacagcaccgtcgggatcgccgcagggatgatgacgcggacgagccgctggctcagtgtcgcgcccatgctgcgggcggcgagcaggagctgcgggtcgatggtctggatgccggccgcggtcgcgagcatcgtcggcaggaagccgtagatcgaggcgaacgcgatcttggactccgagccgatgccgagccacacggtgaagaccggatagaggatcaccagcggcaccgcgtagaggctcgacaccatcggcatgatcaggacgcgcgggccgggaaggctgccgacgatggcgccgagcaggatgccgccgccgcaggcaaatgccatggagaccacgacctcgtagagcgtgaccgcaagcgcatggccgtattcacccgcgtcggtccacccggccatcaacgtggacgacagtgacggcaggaacaattcggcaatgagcccgctgcgcggcagcagctcccacagcgcgatcaggccgatcacgatcagatatcgcagcgtcctggcgctgatcctggcgctgatcctggcgctcatccccgcctcatgccgatttgcggatgtgccgccagatgcggtcgcgcaggctgccgaaggcatcgccgctcagcatctcgtaggtccggggccgcggcaactggacctggagatggtccacgatgcggccgggccgcgccgacatcacgatcacctcgtcggcgagatacacagcttcggtcaggctgtgcgtgacgaacacgacggtcttgccggtggcggcccagatgcgcagcagctcgtcgcccatggtcatgcgcgtctgctcgtcgagcgctgcgaacggctcgtccatcagcagcaccggcgggtcctgcaccagcccgcgcgcgatcgagacccgctgcttcatgccgcccgagagttcgtgcggatggcgcctgccgaaaccctcgagcccgaccagcttgagcgcatcctgcgccttggccctccgctcggccttgggaacgccgcgcagcgccagcggaaactcgacattgtcctccgccgtcagccagggaaacaggctggcctcctggaacaccacgccgaccctgtcggggtccggctgcgggatcggcgcgccgctgatggtgatcgtgcccgcggtctgctggcgcaggcccgccatcatcatcaaaagggtcgacttgccgcagccgctggggccgaccagcacgacgaaacggccgggcttgacctcgagcgagacgtcctccagcgcgacgacgtcctgcgatcgggtcttgaacacctggccgacattcttcacctcgatcgcgccggcgcgcgcggcgggcttgagcggggtcacgttcgccaatggctgcatcgcgtttccacccatctgacaagttcgttgaaggtcatggcgatcgcggcaaccatcacgacgccggcgaggagctgcttcatctggaagttctcgccccagattgcgatctgatggccgatcccgtcgcgggaggcgtacatctcggcgaggatcacgccggtgagattgaagatcatggagatccgcagcgcctccagcagcaccggcagcatgctcggcaggtagacgcggaacgcggtctgcatcggagtggcgccataggagcgcgccaccgtcagatgctcgaccttgacggactccaccgccgtggtggtcgacatgatcacgatgaagatcgtggagaagaagccgaagccgaccttctgggcaaagccgacgccgaacaccaggatgaacatcggcaggaagatcgatttcgggatgctgaaggcgaagaacagcaggggcttcgcaacatcggcaaagtagcggttctccgcgacgagaaagccgatcagggcgccgaccggcacggcgagagcgaacgcggtcagcacctcggtcgcggtcaccatcaggtccttctgcacggccgcgcgctgcaggagttcgccgagcgtcgcgaacgtgtcggaggccgacggcagcaggcgcggattgacgatgccggtgcgcgacagcatttcccatagcgccaggatcgcgacgatgatcgcgatccgcgccaggttgatggcgagcttgccctgcatcgcgactacttggtcgggacgggcttgaacttggtcgagatcacctccgcggccggcacgatgtccttgagcccgccgagcttggcgagatcgagcgagagctgcacggccgcgcccacattggccgcgcccatgtcgccgctggtctcgagcttcatgatggtgttgtcgtattcgagggccgcgatctccggcggcatctcgtagagctcggcgatcagcttgacggtgacgtcgcgattggcgcgcatgaatgcgaccgcgccgtagagggcgttgaccgccttctgcaccagctcaggcttggtttcggcgaacttgtcgagcacgatccagccggcggtgaggttcggcggaaccgcggtcgcgtaatcgaggatgctcttggcctcgcccgatttcgagatctggaagctcagcggcgaatagaccacggcggcgtcgacattgccggcgagcaggttcggcaccaggccaccgccgccgacgggaacgcgcgtgaagtcgatcttcttgtcctggatggtccacagcgcaagcaggtccgagcccgagccggccgcggtgatcgccaccttcttgccgttgaggtccttgacttgaagcgtcgatttggcgggcaccatcagttgccagccgaaattgcccatcgcggcgttggcgacgatgcgcgacatcacgcccttcttgcgtccggcggagaccagcgacggcgggtcgaggatgatgtcggcggcgcctgcagccatgccctcgaacgtctccgcgccgctgcgatagatcgtcagctcggccttgatgccttccttctcgaacagcttctgccgcaccgcggtctcggcgatcgtcgtcggccagtatgttttggtgggcaggccgacccgaatggtttcggcggcgttcgccgggccggcgaaaatggcggcggcgacgagcgacatgaatgcgtgacgacgattgatcttcattgtttcctcccggtctgtctttttttgtgccgaattcttggaatcgtcaggtcgtgcggctcacctccgcaatgcgcgaggcggcgagctcgacgaagtccctggtgatgccgaaatgcgtcgacagggcgcgaacggccgcatcggcgtcgcgctccaccacggctgcgacgatcgcctcgtgctcggcctcgacgtcgcgcggcttgccgccgagctcgcgacggatcgacaggcggcgatatctctcgctctgctcgtgcagcacgtcgcgaaagccgagcagccatggcgagccgcaggcgttgaccagcgcgcggtggaaaatgcggtggcggaccacccattcctcgtaatgcacggtcggatcgtcggggtagtgataggggacggccttcaggtccgcccaggtcgattgcaccgacacgagccaggcatcgtcgccccgctcgatcgagcggcgcagcgcaagcccctcgatgtcgatccgggtctgggtcacgtcggcgaggtcggcgagcgacaccgggctgacgcggaagccgcgctggtccgacgcctgcacgaggccatcggcgacgagccgcgacagcgcctcgcgcaccgccgcaaggctcaccgagaactgcttggcgaggccggcgatatggagcttctggcccggcagcagccgcgtcgctagaatatcggcgcgcagccgctcgtgcagcgccgacgtcaggctgcgcggaccatcaccgggacttcccgacatgtcgaactggagcggacccatcggggcaaatgattgcagcgctccatccgcgggtcaacaaaaatcgaaaatcgattttccgccgcgcgcaagtgagccttggcccctgccgcacgctcgccgcgaccggaacacgcttcgtcttcgcttctcgcaatgacctttgagacgcgccccgcgcccgggccacctcatccgcacgcccaatcgaacttcatctccttgaagtcgagctgcgcgttgccgccgccgaaattgtagccgccgaaatattcctcgaactcgatgtagaacgggctcatctccggcacggcctggcagggccgcatggtgccgccgagatggttgtgcgcgtgatctttggcccagtcgtgcaggcgaaaattgtcgcggcccggccggtcgccgacataataatagtagggctgatagccggtcggcggcttttcgcggacgtgcttgtcctgcggtcccttgccggcattgggatcgttcgcgcgcggcgtcagggcgatcgcgcggttctcgccgagatcggagcgcggcggagcggcgaacatcttcttcgcgtaaggcggcgctgcctcgaggtaggcgcgggccccgccgacatcgagccagcgcggccgttcagccgctgtcagcgcaagcggcgccggcggtgccgcgaacgcgccgtcatactcggcttgcgtcagcagcagcgcggcatattcgtagttgagaacgtccgccatgcgcgacaggcgcggatgcgagggccgggccatcaccgcgtcgcggatctcggggtcgtcgggcgcgccgccgtcattgtgatcgggcgcggtggcaaagaacgacaccgcgacgatgtcctcgccatgcacgcgataatcctccggcagaagcaaggtgaacccgtgcatcaggggatagccggtgacgggatcgaacggccattgctcgctgctgatacccggcggcaacccaaagacccagccatggtcccgcgcacggtccgcgggccggtccagcatctgcagatcgtaggcacgcgaaggcaaggcaaaggccacgggtcgtctcccagtcggattcagcctcgccgttgaggcgagggttggtcgcggggagcagggatgtggttcggggagaggggcggggatggtgccaatctgccggtgttttgcccgacgtgtcaaaccgcgcccgcacccgcgcggggctgccgtaagtcattgacctcaaagcccccgcctactgtgcatggggttgttttcgcactttcgcttgcggctaacctcgtcgccgcaccgccgtggcatccaccacgttctccacctcctcgcgccagctcaggatctccatcgccagcacggggtgattgaagcccttgagctggagatcgtcgagcgcgcgcgcttcgacccatggctcgaccatgccgtagacgcggcggctcaccacgatctggttgggcttggcttcgccgcagaggcgcgaggcgaggttggtgacgctgccgatcgcggcatattccaggcgctgctcgaagccgacctggccgagcgtggcatagccgagcgcgatgccgatgccgaaccccaggctatgaccgcggttgcgccagcgctcggtcagggggccgatggtgtcgcgcatctccaccgccatcttcacggcgcgcctggtgtggtcctcgaactggatcggcgcgttgaacaggatcatcacgccgtcgccggcatatttgtcgagcgtgccctcgtacttgaagatgagctggccgagcgcggcgtgatattcgcgcagcacgttcatcgcctcttccggctcggtcgcttccgtgaacgcggtgaagccgcgcagatcgcagaacaccaccgtgacctcgcggcgctggctggtgagcagcccctccgggctgtcggaggaggcgatcagctgcgccacctggggtgccaggaaacgctcgagcttgcggatgcgctcgatctcgccgagctgcgtcctgacgcgctcctccagcgacttgttccagtccttgagctgctcggtctgctcgcgcagcttgtcggcctgggcgcgcacggtcgtgtttgccgcctccagcgcgtggctcttgtggtcgacttcgctgaacagctgcgcattgcgcatcgccagcacggcctggttggcgaaggtgcgcatcaatccgatgatgctgggcgcgaacgcgccgccggcgcggcgcagcaccaccagcgagcccagcgtgccctgctggtcgatcagcggcaccacgagcacggagctgaagccggccgcgagcgcgacctcgcgcagcggctgctctgcggcatcgccgagctcggccagcgcgatcggttcgccgctgtcggcggcatcgctcaggatgttctcgccttgcgcgatggtgacatgcgcgccgtcggcggacttgtcgatgccgttggcctcgaccaggttgaagcggcgcgtctcggcgtcgaagccatagatcagcaccgcgtcggcacgggtgatctcgatcgcgcgggccgcgatggtggcaagcaccgcgttgagatcgagcgaggaggccaccgcgcggccgacctcctccagcaccttgagttcgtggatcgactgcgcgagatcacgggtgcgttcctcgaccttgctctccaggttcgagtaggtctcctggatctggtcggccatgcggttgaactgcccggcgaggtcttccagctcgtcggaggtgtgcacgtcgatgcggtggctgaaatcgccttcgccgagcttgtgtgcgccgtcgcgcagcgccgtgatcgggatgatcatgcggcgtgccagcagcgtgccggcgaggatcgcgaccatcaggcccatgccgatcaggagcgcgatgcgcaccagctggtcgcggatcggcatcagggcctgggtcgtcggctgctcgaacagcacgctccagccgagcttcggcacgatgctcgcggcgctcatcaccgcatggccgttgaagtcggtgcccgacgtgtcgggctcgtggccgggcgcgatcgcggccgcaacctgcggcagcttggagaggtccttgccgacctcgggccctttcgatgacgtcgccagcacgcggccgcgcggatcgacgacataggcaaaggccgccttgccgacctgggcgtcggacaggaagtcggagaggaagctgagatcgatctcggccacggtgaccccggcattgaagccggaatgcgccaccgagatcgacatcaatggcgtccggtcggcgaaccaggccggcgcatagctgacgccgcgggcgacggcatcggtgaagcgcacgtcgcgggagaggtcggcattgctgccggtcgtggtcgattgcctggagacgcgcagcacctcgcggccatcgccgttgagctggaacagctggttgacgaccgagacctggtgcaaaagctgggcgtagtcggcgcggcgcttctccagcgtgtcctggctcgcccgcgtcacccagctgatctggcggtcgagctcggagatcgactgctcgatccgccgcgcggcggcctgcgccttgtcctccagcccgtcggtcagctgcgtccgggtggcgcggtaggagatccaggtctccatcgccccgttgacggcgaggacgaacacgacgaggccgacgagggagacgacatacttggcgaacaggcccccgcgcagagatcgtgtcttgtcgttcgctcctgccatcccgatcctctcgcgccgccgctgacgctgcgcgctactggcccgtacgggccctttcgagccgttctaccacaatctgcgccaaagggccgtcgcgcggcccgggaccggccggcgtggttactccctgcgaaccccggtgaacaaaaggcgggtaaattgacgtagcctcatcgttgcaggaagccgcaggaaggcaatggatgaagggtcggccgcgaagtccagcgggccagtcaccgattgaagagctgccgcagcacgtcgttcattggctgactgtcctgctgcgcgagcggcgggtcctccagagcgggggccgcaggcgaggcctgcggcgccggcgtggagggcgctgccggcaggctgcggctacggccactgcccggcgcgctgccagtgctgcttcctgcgccacctgaaagcccctgctgaatcagattgccgatcgcctcccccagggggccgccgagcaggttgttctgccccggctgctgcgcctgcggattggcgctgccggccgcattgccccccggtgcggcggtgccgccgagcccaaggttactgccaaggctgcccaggatattgccgagcccggcaccatcgggcccgaacaggcccttgcccatctcgcgcagcttggcataggcggcatccggattgtcgagcatgccggccatgtctgggtagatccgcggctgcgaccagctgccctggatcatcacggggatgccgaaaccgaccggctcggaggtgcggccctggccttcggtcgtcatcacgagcttcggctcgacgcgaaagcccatcatcttggtgtcgagcgcgatggtgccggcgccggtcacgcgcacgaggggcccgatcagattgagatcggtcgtcaccgcctggcccttgtcgatgcggaacgaggccgagagctgcgacagatccgtgctctgttccgggctggggtcctggtttccttgccagcccgacagcgtgctcgtcgtcagcgaacggatcatctgcgcgacattgatgccgcggatggcaccgtcctggaaattgacgaaggccgtgccctgcatgttcgccatcagcgcgcgctggctgttgccggcgctgcgcaaggcaagcttggcctgcagcttgccatcgatgcggtcgaattcggcaaggccctggagcagcggcagtgcgcgcacgccgacgagatcggaatgcatggcaaagctcggcgcccccgtggtcgcgtccaggatcacctcgcccgagacctggccgccataggcgccgagattggcgattccggccttcagcaccccgccggcgagcttggcatcgagcgcaagcggcgcgatgcgcgcatcgccgatcacggcctcgttggcagagattctcacttgcgcatcgacatagttgagaccggagacgtcgatcggcgcattgctccagggctgccctgccgtgccttccggcgatttcgccagcggcatcgccagccgctggaaatcgaggtcgaccttgaccagcggcttgctcgcaatgtcgacggaagcccagccgttgaatacgccctcgcccagcctgccgttcacgccgttgatcatcacgacatcgccattgagccgcatctcggcatggccggtgagctgggatttcagcacgtcgggcatgtcgatcgcgaaatccacgggaaccgtcggccgctcggccgccgaggccggcatggccgccttgatgtcgaacttggtcggatgttcgccgacacgcgcggtgccggagatattgaccttgcggtcgcggtcaacgatcgcgtcggcgttgatggcgctgatgcggccatcgaccctgtcgcgcaggcgcgagaaggcgacttcgccgtcgacgatcttgatgcggtcgatggtcgcgccattggtatccagcgcgggcggcttcgaggcgccgccggcattcggcagccgctcgcgcagcagaggctggtacagcacgggatgggtgacgacgagctcgctgatctcggggcggcccgaccaaacgctggcgagcgatatgtcggcctgcacgctgtcgaccgtgaggcgcgtgatgccgctacggtccttgggactggcaagcgtgaggtcgttcagggtgacgttcagcgtcggccacaggctgatcttggtggtgccgtcgatcgacaggcgatagccggttgctctctcgacgcgcgaggcgatcgtcgaggtcaggaagcccgaggggatcccgaccaccagcaagagtgcgatcacgacgatgacggcggccaaagccgcgccggcgaatttcaatgctctcatgtcgactttccagcgacggggcgatcggcgtcgaatcccgccgacgacccgtcctttgcgcctgagtttatccccggacgggaagcggctccaagcgcgtaaaaatagtcgggggatgctgcaaagttatgtgacttatgacacactttcccggcgcggttttacgcgatcctgaagtcgatggtttcaagtgatttgccaagagaaatgaccgggaccccacaaggacattgaaatgagcaagcaggccgaatttgcggtcatcctgaagatgaacccgatgtttgccgatctcggcgcggacgagctccagcggctgtccaatctctgtcacacccagcacctcggaaacggcgaggtcctgttccagaagggcgatcccggggacgcgctgttcggcgtccgccgcggccaggtgcggatcgaaaccggcgcctccgatggcagccggctgacgctgaacttcatgggtccgggcgacctgttcggcgaggtcgcggtgctggacggccagaaccgcacggcggatgccaccgcgggcgaggccagcgaattgttcgtgctgcggcgcgaagatttcctcagctttctcgagcgcgagccgaaggtcgcgatcaagatcatcgcattgctgtgccagcgcatccgctggcagagcgagcgcatggaagagtccatgctgcagccgctgccggttcgcttggcccggcggctctgcgcgctcgcggccgatttcggctccgaggtccacatctcgcaggagcagctcggagtcttcgtcggcgccgcgcgcgagagcgtcaaccgacagcttcaggcctggcgcaaggaagccatcctcgatctccagcgcggccgcatcctcttgcggaacatgaccaagctgacggcgatcgcgcggaacgagtgaggtgctggcaagcgcaccccaatggtgccgcggcgagatttcccctcgacgagtccccggccggagaccaccatttgacggcttcgccgctagggctcggcctcccgtgcttggacatctcccagcctaacgaagacgatcttccccgaggtcagggtcatgggagtcgcttgcaggcatgccttgtgcttctgaatcgcgattattccgcagcacggtgcgcgacgttcttcggtgccggcgcagtttcgtgatgaccgtcggtctcggcatcctcgctgtgcacgatcagccgcttggagaagcgccagatcagggcgccgaaatcgtccatcaccatgaacatcgcgggcacgaacaccagcgataggatggtcgagaagatcaggccgccgataaccgcgagcgccatcggcgagcggaactcgccgccggcaccgaatgcgagcgcgctcggtatcatgccggcggccatcgcgatcgtggtcatcacgatcggacgggcgcgcttcatgccggcatcgatcatcgcctcctcgcgcggtttgccggctttgatggcttcgatcgcgaactcaaccagcatgatcgcattcttggtgacgattcccatcagcatcaggatgccgatccacacaggtgtggtgagctgtttgccggtcaggagcagggcagcgatcgcgccgccgatcgagagcggcagcgagaacaggatggtgatcggctgcaggaaggtgccgaacagcagcaccagcacggcgtaaaccatcatcaggcctgccgtgatggcggtcgcgaagccgaccgacaattcgttcaagctttcggcgtcgccggagggcgagaccttcacgcccttcggcagcgtcttcatgaccggcaggtcgtagatcttcttggtggcatcgccgagcgcggcagagccgacgaggtcggccgcgacggtggcctggcgttcacgatcgtagcggttgatgctcgtcgggccctggtcgagcttgacgtcggcaatgaccgagagcggcacgccgcccttctcgccgcgctcgccgagcggaacgcgcaactgctccagcgtcttcagattgccgcgggcggcatcctcgagctggacgcggatcggcaccaggcggtcgccgacgtcgaatttggcgagtgcgggtccgacgtcgccgatagtggcgacgcggatggtctgggacaggctttcggtcgaaacgccgagccgcgcggcgagatcggcgtgcggctggatgcgcagttcggggcgctccagcgaggtttcggagatcacattggagatggtgggaatgcgtttcatctgcgtcgcaagctcgctcgcgacgttgttgacgatgttggcatcgacgccggtcaccacgagcgagatcgcgcgcaggccgttctcgtccaggaaccagaagcggatgtcgggaacgttctccagctcctggctgatggagaattcaagctcgcgctgggtgatgtcgcggctgtccttgggcgtataattgatgatcaaagcggcgcgacggacctcctgggtgcccggcggcacgcgcccgccgtccacgaagatgctcttcacttccggccgcttgcgcaggcgcgcgacgatgtcttcggtgaccttttcggtataggcgagctgggtgccgggcggaagctcgagggcaagcagtgaacgggcgctgtcctgggccggcaggaagccttgcggcagcagcgtgatgctccagatcgaggcggcgaagaccccaaggccgatcagcaccgtgatgaaataatgcttcaccgaccaggccacgatccgatgatacgaccgcaatatggggccgggcggcggctcctcatgcgcatggtgtttgaggaaataggcggccagcacgggcgtgacgaagcgggccgcgagcagagagaagaacacctgcaccgagacggtgatgccgaactgcttgaagaactggccggcgatgcccgacatgaagctcgcgggagcgaagatcgcgatgatggtcagcgagatcgcaatgaccgcgaggccgatctcgtcggccgcctcgagcgcggcacggtagggcgacttgcccatgttcatgtgccggacgatgttctcgatctcgacgatggcatcgtcgacgagaatgcctgtcgacagcgtaatggcgagaaagctgacgaggttcagcgagaagccgagcaggtccatcgcccagaacgccgggaagatcgacagcggcagcgagatcgcggcgatgatggtcgcgcgcagatcccgcaggaacagcagcacgatgacgacggcgagtatggcgccctcgaacagggtcgagatcgccgcgtggtaattgcctttggtatactcgaccgaggtgtcgatcagcttcaggtcgacgtcgggataggcggccttcagtgcgtcgatgcgcttttgcaccgcctcggccaccttcacgtcgctggcgcccttcgaacgcttgatgccgagtgcgaccaccggctcgccgttgaagcgggcgaaggtgcggcggtcggcgatggtgtcggtgacggtgccgagatcgtcgagtcggacctcgccgccgccgaacagcgggatcatggtgccggcgaggtcgccgagcgtcttggcgcctgcgagcgtgcggatcgcctgatcgttcttgccgatctcggcgcggccgccggcaacgtcgacattggtgccgcgcaggctctggctgacattgacggcagtcagtcccatcgcctgcaagcgatcgggatccagcgagaccaggatctcgcgctccacaccgccgatgcgctcgacctgggcgacgccgcgcacgccctgcagcgcgcgcttgaccacgtcgtcgacgaaataagagagctgctccggcgtcttgccgggcgagatggcggcataggtcacgatcggcaggccgatgacgtcgacgcgctggatcagtggttcggtgacgttctgcggcaggttggagcgcacgcgcgtcaccgcgtccttgacgtcgttgagcgcgcggtcggtgttggtctcaagcgcgaactggatcgtggtgaccgagaggccgtcggtgatcgaggaggtgatgtgccgcaccccctcgacgccggagacggcgtcttcaaccgtcttggtgacctgcgattcgagctcggccggagccgcgccgaactgcgagaccgcgaccgagatcacggggatgtcggccgagggcagccgcgtcactgcaagcttggtgaaggacacccagccgagaaccagcaggatgatcgaaaagacgacagacggcagcggattgcgaatcgaccatgccgagatattcagagccatcagcgtacccgcgtgcgatcgagttcatcggcgaacatggtcttgatctggtcgccgtcatggagcgaagagccggcatcggccacgacgatttcgccgacctcgagcccttccaggatttccgtagcgctgtcggacgacagtccgacccgcaccttgcgtgtctcgacaatgttgcctttgacgacctgcaccgtgagatggtcgatcgcggtcttgggaatcgagacgccgcagctgcgcttggcgtcgatcgaggcgcgagcgaacacgccgaccttcagcgagggattgttcgcgacgctaatgcggacgcgcccgagctgggtggcgcggtcgatctcgggggcaaccagccggacccgtccgatcaagtcgggcgcgtcgtcgcggctgatgcgcacggtcgcaccggcactgagcttggacatgtgcaccgccgggacctgggcctcgagctcgatctcgttgttgacggcgatgcggaacatcggaccggcctggggagaggccggcgcgccgacgatggtgcggacctcggtgaccagccccggcgcaggcgctttcagcgagatcgggccttgcgggccggggcgctgcggctggcccgggatctgcggcggcgcggtcaggcgcgccagctcctggttgtcggcaacgacggctccctcggtgaccaggaggtcggtgaccctggagccttcctggtcggcaacgacgacggcctcgcggcgcggcacaaagaagccagttacccgcaccaggtcggagaaacaggcgttggtcgacttcgtcacgatgacgagcgcctcgcttggcgtctccttcggttccggacggtgccggcgttcgaacagataatagccgacgccgattgcgaggacgaacaccacggtccccgccggcttgagatactgagtcaaattcatcgccggatcatcctggcctggctcacggccatccgcgcgcggcccagacagagcgtttccctgaaataaagcggcgtcccgcaaggccgcgggacgcgctctggaagcgagaccttacaccacatcgcgactggtcactgcagacgaatacgtcgtgctcacttcgatgcggtggtcttgttttccatgttgacgacctgcacgcggcggttggcctccgccagcggctgggccggattcttgagcttgctcttgccatagccgacggtgacgaggtcggtcgccgagatgttgtacttttcgacgaggtagcgcttgatcgaatcggcgcgacgctccgacaggtcctggttgtaggcttcgccgccggcggcgtcggtgtggccggcgaccacgaaggtcgagcctttcaggtcggggctggtcaaggcccgcccgagcgcctgcaccgacgggagcgatttggcgctgatgttggcggagttgtagtcgaaggtgatttcgagatcgatgttcggcttgtccttggcgaccgaagcgatttcctcgcgctcggtcgacgacagcgagcgcgtcgaccggccgcgcaccgactgcagcagcttggtctccgccgcgttcggcgcggcttcggtcggcggggcgatcgagaggccgcgggtcaggggcttcttggccggcggcgcgagtgcgcggacgatctcgtcctcggtgacattcttgctgttgctctcatcgcccgcgtaggtggctgaggtcggcaacaacagcgcggccccgacggtgatgatggacaggatcgcggtaagtccttttgcagccgatttcatagccagtccctcctacgcagccagctcgcgtgcttccaaactccagcaacacgcccccgaaagaggccgttgcggcatccgcccattggtcttcccagggctgttgaaggttcgaggcttccatggcctcgactcacaaaaatatcagcgcactccgtagcttgcgaattcctgaacgatgttcgggtccatcgccttggcattggcgatatcgagcgcgccttcctgggccgagccgttgcgttgcttggcaaggccgcggccatagagcgaggacgtcaggcgcgggttgatcttcagggcggcgtcgaaatcggcgatcgcgttcttgaccgctccggacttgaggttgacgagtccccggctgtccaacgcatcgacgaagttcgggcgcaggcgcagcgcctcgttgcaatccttcagcgcgccctggaggtcgccgaccaccgtgcgggtccagcagcggttgttcagggcctcgacgtccttcgagttgatccggagggtgtcgtcgaaatccttgatggcaaggttgtaggcgcccttgctcgcatagacctggccgcgccggtacagcgcgttcacgtcgtccggattggcggcaatcttggcggtgaggcccttgatcgtgggatcgtcggccaggacggcggcgcttgggccggtctctgtgctcggcgccggaccgggatcaatcggtttcaccggtggcggcggtggcggcgggggcagggcggcctcgatctgcggcttcggtgcgggagccggcgcgggtgcaggcggtgcgggaggagccggtgccgcagcggtgtcggccggcttcggcggcggaggtggtgtcggtggagcaggtggcggattattggcgacgacggccggcgcggccggaggcgcaggtggtggcgtcgttgtgggacgcgacccggcggtcccgggcatgaaggagaagtcctcggccaatgacgaggaaatccagggcacctgctcgccgcgcgaggcgcgggtgacacccatcttggtgcggttcagcgtctcctccgccatcaggtcggggacccggatttccttcagcagctcctggacgaacaggctgcggtcgccaccgccgtccgagaccaccgaggccagtgccgccgaatacatcaccagcgtgccgttcggggcgatgacgggcgtgaggccggccgagaagctgcggaaccggcgctcgaacgggttgcgcctggaggcatcgatcagcgcgatcttgacaccggcgccgcgggtattgagctcgccgagcacggtctcgaggctgaagccatcgcggcgcacgtcggattcggtccagatctgcgcatcgaccggcagcagatagctctggcgtgccgactggataccgaaaccgctgaagaataccagcgcgacggagccgggcttgatcttgccgtagagcttgtcgaaggcgcggcgcatgccgtcgccggtcaggttctcgccgatctcgaccgaaaagccgtcacgcttgagctcatcggcgatgtcgcgcgcatcgttgatcggttccttcaacggagcatcggcatccggatatttggcattgccgatgacgagcgcaaagcgctcgccggccgcaagcgacggagccgtcggaacgagcgagatgagcagggacagaagaaaaaagaagcgaattttcataatcagcgcggtccagccaaaaaggcgccgttccagcttgcgccgcggcgaccttaacttacgctccaggcattatcaaaccggggggagggggcgtcaaccgcttggagattcgtcgttatcgcgacgattgaccgcaacataggggcgcgccggtagtggaataaacgggctgtcatgtgctcggtgcgacctggttcgatttgcatcggcagcatgttatggcagtcatggcgatgaagatgtgatcggtctcacattgcaggcctgcctctgtcgcaacctcaaatgtttgacctttgcggcggacaatggcttggtgcgctcgatcgtcccgccagatccaacccagaaaaagcaaagaccatgggaaacgcctacgaaatctacgctctgcgctatgcaacgatgtcgccgcgcactcccagcatgaacttcctcctgcccgacccgcatgacagcgccgcgcaggatctcgactatttcgtctggctgatccgcggtgggggccgcgagatcctggtcgacaccggcttcaatgccgaggaggcgagcgcgcgggcgcgcaagctgacgctcaatcctgtcgatgcgctggagcgtttcggcgtcgcggcgacatccattcgcgacgtcatcgtgacgcatctgcattacgaccacgccggcaatctcgaccgcttcccgaatgcgcgcttccatctccaggagcgcgagatggcctacgcgaccgggcgctgcatgtgcaacggcttgttgcggcatccgttctcggtcgagcatgtcacgctgatggtgcgccacgtctatggcgagcgtgtcacgttttattccggcgatggcgaggtcgctcccggcgtgaccgtgcatcgcgtcggcggccattccgacgggttgcaggtggtcaaggtcgagacagcgcgcggaccggtggtgttggcatccgatgcggctcattacttcgccaatctgcagcgcagaagcccgttcccgatcgtctataatgtcggcgacatggcgatgggctgggagacgatcgagcgcctggccggccatccggatcgcttcattcccgggcatgatccgatcgtcacggagatctatccgagcgccagcgacaaggtcgaggcctgggcgctgcacctgccgccgacccggtcgtttgcgaagtgacgcgatagcgtcactcagagggcgccgctgtcacggcgccccgaaatgacagaagtgattaatacgcctgcttggcgtccgcttccttgctggtctgaatcaggtcgaggctctgctcgatcttgccgagcagggacgagagctgcttgcgctcctgcgcggagaggcaggcgaggatctcatcttcccgccgcagcaattgggggaacagctcctcatagagcgcgcggcccttcctggtcagttgcaggcggaattcacggcggtcggcttcgttctcggcccgctcgatcaactcctgatgcaacaacgccgtcaccgcgcggctgatggtggacttgtgcgtgcgggtgcattgcgagatgaattgcgcgctgcaggcatcgttgcggaagccgagcgtcgcgatgacgcgccacgccgggatgtcgaggccatgccgttcctgatattcctccgcgagcgcggaactgacttccgccgcgagccggttgagacggaagggcacgaacttgaacaggtcgagccgcggttttgaccgcgccgacgtctcgacggcctcccgcgccttgagcgcgatgtcgctggatgtcctcgccaaggagagtgctccgaattccagttgacggccggccggctccggtccaaaatagttgcacgtgagactatctagcagatcagtcctcccctgaccagagccgaggttagtgcatggcgcaggccaaatcccagttcggctatcgacgtcatcccgatcaggatcgttcggcccaaggcccggcggcgcatccggtcgtgatcgtcggtgcgggcccggtcggcctgtcgctggcgatcgatctcgcccagcgcggccagcgcgtcgtgcttctcgacgatgccgatcgcatcggcgaaggctcgcgcgcgatctgcttctcgaaacgctcgctggaatattgggaccggctcggcgtcggcgaccgcatggtcgagaagggcgtggtgtggagcgtcggtcgcatcttccacggcgagtcgcagctctatcagttcaatttgctgccggaggatggccacaagcggccggccttcatcaatctccagcaatattacgcagaggcctatctggtcgatcgcgtcagcgatttgccagatatcgacttgcgctggcgcaacaaggtgacggcactcgaacagcgcaacgattccgctctgctgacgatcgaaacgccggagggcgcctatcgcctgaatgcgcaatatgtcatcgcttgcgacggcgcacgctcctcgttgcggcagatggtcggcgccgagttcgccggccaggtgttcgaggaccagttcctcatcgccgacgtcaagatgaccgcggaattcccgaccgagcgctggttctggttcgatccgnnnnnnnnnngccgggcgctcggcgctcttgcaccgtcagcccgacgatgtctggcgcatcgatcttcagctcaaccgctatgccgatcctgtcgtcgagaggaagccggaaaacgtgcggccgcggatcgcgcgcatgctcggccacgacaagttcgagttcgagtggatctcgctgtacaaattccaatgccggcggatggaccgcttcatccacggccgcgtgatctttgccggcgattccgcgcatcaggtctcgcccttcggcgcacgcggtgcgaactcggggctcgaagacgccgaaaacctctcctggaagctcgatcgcgtgctgcgtggcaaatcgcccgcgagcctgctggagagctaccatatcgagcgcagcatggcggccgacgagaacattcgggaatccacccgctcgaccgacttcatggcgccgaactcgcatcaggaggcgcggctgcgcaaggcggtgctgtcgcttgccaaggagaccgagttcggcaagcgcatggtcaatggcggcaggctgtcggtgccgtgcagctacgactcgccgctgtcatcgcgcgatgcggatgcctggtccggtgggccgccccccggctgctctatgctcgatgcgcccgtggccgcgcgcgagggtgaacagacttatctcaccgacgtctttcgccagggtggaacacacttcgccctgctgtcgttcggcaatggtgcgccgatcgaactccctgacggcgtcaaggacattcgcgtcggcggcgaggccgggctggccgacccggcgggtctcgccgcaaagcgctacgatgcgcagcctgcaacggcctatctgctgcgccccgacggctacgtcgcggcgcggttccgccatccgactggcgcgatgatcgcggctgcgctgtcacgcgcccagggtttgaactgaggttcttgcgcaatggctctctccaccagctcgaacttcgttcgcccggacgacgccttccgcgccatcgtcgaggcgcatcgcggtctcactgaggagcagagcgccgatttcgacgcggcgctggtgctgatcctcgccaaccatatcggcgacatcgacgtgctgcgcgaggcgatcgggcttgccaggcgccgcatgatcgacggccagcagcaacaacagcaacaacaataaccctgtgacctgaaggacgaattgatggcgaagaatttcgcatccaccggcgatctctccgagaagaagatcaccttctccgagatcggcaccgatctctatgcctttactgcggaaggcgatccaaacacggccgtcatcgtcggcgacgacggctgcctcgtattcgacgcgcaggcgacgccagcgatggccaacaaggtgatcgagcgcgtccgcgccgtcaccgacaagccgatcaaatacgtcgtgctctcgcactatcacgccgtgcgcgtgcttggtgcttccgcctacaaagcacaaggtatcgtcgcctcgcaggagacctatcgtctcattgaagagcgcggcaagcaggactgggattccgaatatggtcgcttcccgcggctgtttcaggatgcgcagagcatccccggcctgacgtggccgacgctgacgtttgaaggcgagatgacaatctacctcggcaagcgcgaagtacgcctgatgcagctaggggccggccacacctccggcgacatcgtcgcctgggtgcccgatgctgaagtcatgttctccggcgacctgatcgagtatcactcggcctgctattgcggcgatgcgcatttgcgcgaatggccgatgacgttgaacgagatccgcaacttcaatccgaaggcgatcgcgcccggccgcggcgatgcgctgaagggcgttagcacggttcgcgaggccatcgccatgacgcgcgacttcgtcacctcgctctatggcgccgccgaaatctccgtcgccaaggggcgcacgctgaaggaatcgatggcggcgacccgcgaggtgatggatcccaagttttccagcttcgccatctacgagcactgcctgccattcaacgtctcgcgcgcctacgacgaggcatcggggatcgatgatcccgtgatctggaccgacaagcgcgaccaggaaatgtgggccgccctgcaaggaggaggatagtcatgaacatcaatacctcgcctgaccagatcgtccgcagctcggcccaggtgacgccgggctacatgtccggattcggcaacagcttcgagaccgaggcgctgccgggcgcgttgcccatcgggcgcaactcgccgcagcgctgcgcctacgggctctatgccgagcagctctccggctcgcccttcaccgcgccgcgcggcagcaatgagcgttcctggctctaccgcatccgcccctcggtgaagcattccggccgcttcgagaaggccgatgccgggctgtggcgctcggcgccttgccatgaatacgacctgccgatcgcgcagctgcgctgggatccgacgccgcttccgaaggatgaagtcaccttcgttcagggcgtgcagaccatgacgaccgcgggcgacgtcaacgcccaggccggcatggccgcgcatgtctacctcatcaccaagtcgatggtggaccagcatttctacaatgccgacggcgagctgatgttcgtgcttcagcaaggcaatcttcgccttgtcaccgagttcggccgcatcgatgccgagccgggcgagatcgtggtgatcccgcgcggcgtcaagttccgcgtcgagatcccgagcgggccggcgcgcggctatctctgcgagaattatggcggcgcgttcacactgccggagcgcggaccgatcggtgccaactgcctcgccaatgcgcgcgacttcctcacgcccgtggcgcattacgaggacaaggacacgccgaccgagctcttcgtgaagtggggcggttcgctgttcaagacgcagctccctcattcgccgatcgacgtcgtcgcctggcacggcaattacgcgccgtacaaatacgatctgcgcaccttctctcccgtcggcgcgatcggcttcgaccatcccgatccctcgatcttcacggtgctgacctcgccgtcggagacggcaggcaccgcgaatatcgacttcgtgatcttccccgagcgctggatggtcgcggacaacaccttccgtccgccttggtatcacatgaacatcatgagcgagttcatgggcctgatctacggcgtctacgatgccaagccgcaaggcttcgtccccggcggcatgagcctgcacaattgcatgctgccgcacggtcccgaccgggacgccttcgagcacgccagcaacggcgaattgaagcccgtgaagctgaccggcaccatggccttcatgttcgagacccgctacccgcagcgcgtcaccgcacatgcggcgaaatcctcgacgctgcaggaggactatgatcttcccccgataaagtggacgggtt

SEQ ID NO: 275 - DNA, 2610 bp, Bradyrhizobium colbertium
actacaccgcgatggccgggctgacgctgcatccgattgtcggcgcattgccgccgggcacgccggccatatccggcgatctgctggcggtgatcgtcagtgtcgtcgcgtttctggtgtccggtgttttcatgctggcgctggttccggatcagcgcgaatccgcggcggacccggtgatcgtgcccgaggcgaacgagccggatcccattccggccccgattacggcggacagcgtgacgcctgtctctggttcggtcgcggaactcacggtcgccgatgcgcccacgcaggcgacatcggatgctcccatctacgaggccaccctgccggtggagaagtatcgcggcagccagaccatcaacaccgccgacattttctcggtccacgccaacgcacattatacttatgtgttcaacggccgggaggacatcttctgtccgctctcgatcggcgagatcatcgcgcggctgccgcccgatattttctttcgcgtccaccgcagctacatcgtcaatattcagcgcgtcgcgcgtctgaagcgcgcgggcgacaacggaattgccgatctcgattcgccggtgcgccgctcggtgccggtgagccgcagccggttgccgcaattgcgcgagcagctcaccgaatatctgcgaaccagggacaattaagacagcgttgctgacgcagttcgtgcgcagctgccgcttttggtgccgaaaaccgatctctggtgctcctgttcttgaatgtttctaaacggcttggcctcctaggcaacgcgctgatgtaaaccggaccaacagaggtctggggcgtgggtaacctggggaggtaaccgtgattcctggttcatttgactaccatcgtccgaaatccgtcgccgatgccgtcgcgcttctggtgaagctcggcgaagacgcccggcccctggccggcggccacagcctgatcccgatgatgaaaacccggctggccacgccagagcatctggtcgatttgcgcgccatcggagacctcaaggggatccgggaagagggcggcgacatcgttatcggagcgatgaccacccagcacacgctgatcggttccgatctgctggcggcgaaattgccgatcattcgcgagacgtcgctgctgatcgccgatcctcaaatccgctacatgggcaccatcggcggcaacgccgccaacggcgatccgggcaacgacatgcccgcgctgatgcagtgtctgggcgcaagctacgaactcaccggcccgaatggcgtgcgccgggttgcagcgcgtgagttttatcaggcggcgtatttcaccgcccttgagaccggcgaaatcctgaccgcgattcgcattccggtgccgccggttggacatggctatgcctacgagaaactgaaacggaaaatcggcgactatgccaccgccgcggccgcggtcgttctcaccatgagtggcggcaagtgcacctcggcttcgatcgggctgaccaacgtggccgatacgccgctgtgggctgaagaagccgccaacgcactggtcggcaccgcgctcgacaaggcggcgctcgacaaggccgtcgcgttggccgaggcgatcaccagtccggcggcggatggccgcggtcctgccgaataccgcaccaagatggctggcgtgatgctgcgccgcgccgccgagcgggcgaagtcccgcgcgaaaaactagaaattcagggagagacccaacatggcgaaagcccatatcgagctgacgatcaacgggcagccggtggaggcgctggtcgagccgcgcaccctgctgatccatttcatccgcgaacaacaaaatctcactggtgcgcacatcggctgcgacaccagccattgtggtgcttgcaccgtcgatctcgacggcatgtcggtaaaaagctgcacgacattcgccattcaggccaatggttcgtcgattacgaccgtcgagggcatggcggccgcagacggcacgctgagcgcgttgcaggaaggcttccgcatgatgcacggcctgcagtgcggttactgcacgccgggcatgatcatgcgctcgcatcgcttgctgcaggaaaatcccaatccgactgaagaggaaatccggtttggtatcgcagggaatctctgccgctgcaccggctaccagaacatcgtgaaggcaattcaatacgcggcagccaagatcaatggcgtgcctttccaggaggccgcagaatgaacgtccaggctccaatcgaactcaccagcgccgagcgcgccgaaaaactccagggcatggggtgcaagcgcaagcgcgtcgaagacatccgcttcacgcaaggcaagggcaactatgtcgacgacgtgaaactgccgggcatgctgttcggggatttcgtgcgctcgtcccacgcccatgcccgcatcaagagcatcgacacctcgaaagccaaggcgctgccgggcgtgcttgcggtcctgaccgccgccgacctcaagccgctcaatcttcactacatgccgacgctggccggcgatgtgcaagccgtgctcgccgacgagaaggtgctgttccagaatcaggaagtcgcgttcgtggtggcgaaggaccgttacatcgccg

SEQ ID NO: 276 - DNA, 1790 bp, Bradyrhizobium colbertium
gtcatgcccatgcccagaacgagccgctgatgatgttcatctgttcatccacatcgggagtatgagcaagggtaggggaggggcttgtttaagtagacattccaccgaacccgaaacaaaacccagcttcaacgttctcgcctgctgtcgcctgaagggcgcgacgattcgcatgagtcttccagtcaaccccggcccttgcgtttgagatgtggactttaagcgacgtaaaacaacccgcaaagaggttgccggaataggacacttaccgaggagtcgccagcgtgatgactgattcacaaagccatgactgcaaccgagcgaatccaacggcgaacggtatcgctgcgccgattggtctagataagtctgagcggcaggcgacggccgtgagaggcgcgtttgctgtcggcgcaatgaccactcagcatcagtttatcgctttgacgctgctcgccgaagcactttcgcatgcagtctcgcgaggccgaaaagcgcgtgcaagcggccaattgaattctccttaagggtccatcggagttgtgccgcgggagcgcttgtgcccgtgcagtcccgcgcctgagagatgtcggcgcatgattcgtcatggatatgcaacggctcctcctggcggttttcgcctcaagcgaatctccgcttctgaaacggcttccaagggggcggaaaaatgctcgtgatcacgcagcagataaaggcagcaaggtcgctgctgggatgggagcaattcgaacttgccctgcaaagccggattcgcaaaatcccggcgttcgggctgaaaacagacgttgcgtaaagcggcgagccttactcggcaatcattcacaaagcatatctgcgatgagaggctgactgaaaaagggttgagtgatttcagtggcttatgattccttcggatttgcgaagattcgagggagagcacgatggcctggactgaaatcacccggcgacaatatcgccgtgagggactgcattatgcaagcgatctgacggatgcggagtggggattgctgaagcctttgataccttccccatcccgcattgggaggccgcgtgagacggacttgcgagccgtggtgaatgcgatcctgtacatggtctcgacagggtgccaatggcgtcagttgcccaaggacttcccaccgtactcgaccgttcagggctatttctatggatggtcgcgcgagggcaggttcagctcgatcaactacacgctagtgatggcggcacgcgagcatgctggacgtgaggcgagcccgacggcgggcgtcatcgacagccaatcggtgaaaaccacggaaagcggcggcccgcgcggctacgacgccggcaaaaagatcaaggggcgcaaacgccacattgtaaccgacacgcaaggcaatctggttggtctcctcgtgcatccagccgatgtccaggaccgtgatggtggcccccgcgtactggcttcgatccgccggctctatccgtggctgcggcacgtcttcgccgatggtggttatgcggggggcaagatgcggaatgctctcgcaaagatcggaaaattgacgctcgcgatcatcaagcgatccgaccatgctgagggcttcgaggttctaccgcgcaggtgggtcgtcgagcgtacattcgcgtggcttggtcgatgccgcaggctcgccaaggattttgaggcgaccatcgcaagcgcaaccacagcctccggtgtgcagccggtcatttcagaatacgaagattctgatgagggtgccgtcgcggagttggtaggaattgag

SEQ ID NO: 277 - DNA, 15004 bp, Bradyrhizobium colbertium
caattcctaccaactccgcgacggcaccgatccggaccgtggcaacgccaaagcggccctgaacgacctgcggactttcgggattggagccgcggtaccaggctgcgaagcgggcttgttcgccctgccccgaaagcaacgaaatcgtcctaaaattggcttccgcctccggatagctgtagccttcccgagcgcgaacgtagcgcccaaggaaatatttggtgacggcctcgtcgtagcgcgccgggttcgagttaagggcggagacggtgtcgacaatgccggtcgcattgtcgacccggatgacgaacggctcgaccgttttcagcggcgctagcgctgcgaccgcacccactgaggccaccgccaaggcgcaggcgccagcggcaaccacccacgctgttcgccgcgagcgatgggccgagagtaacaggtcctgttcccatcgccgcgcattgtcgaaatagcttttcaggtcatcatgcccgaccatctcacgcctccttgccacaggcgcggtaagaggccgcaatatcggctgaatggctggacgcggcgagatgggtcgaaggtgctgacggactgccttcgcccttccggatgataggtgcggacggcgaagcttgcggttccggcgtcgccggtggtgcgccggcctcccaatcccacagcgagcgattgagcggccgccgagccaggccatcacaagagggcggcccctttgaccagttcgcgcagcccccaagctgccatgcaatgacgcaaatgatgaatagtcgacgccacatcgttctgatgcccctgttttatctgtcgcctcttctggcgaccttttttgcttaggccgccgtcgcgccgcgcgattgagcgcgccgcatgctgccgccttgacggctggctctgagtgcagcgaggccgcggccggccgaccaccgggcgccggcataggcacctccggcggcggccgtggcattggcgatcattgggctcgtgaccagtcggcttgccagagacgcccctcccccggcaagaccgcccgcgatggtcggcaattgaagtgagatgtatcctgacagacccagcactgcgctgatggcgaccgcggccaccaccatctcacccgccgtcccggcgttggccgcgaacctgtcgatgaagccgctgacagtagtcagcatcaagccgaccagagcgaccaccaggaccagcaggatcacgaagttcgcgagctgccgaagccaggcttctgtaaacgggcgggttgcctcaaataggcccagtgcgatgaagagcgggccgagcgcgatgacgacgccaagacctactttggcgtagagcaggatagcaaactgcaagaaagaaccgactgctacaaaaacgagaagaatgcccgcaatcagtgccggcgccacgtcggttattcctgcttgatcgtagatcttattagcgacgtcgatccctttggagagaagttgatcgaagggagccccggaactggtattcagcccggagcccgccagcgcattgccgatctcctttggcaaggaatcgaagaacagggtggtgacgtattgctgaaaagcgctcgaattcgttgccagcagcacgacgaccacgatccgcatcgcccgccaggcgaattccataattggttcggagatcgcgccgcgcatcacggcaaaaccatagagaacaacatagagcattacggcggtgcgaagtggtccgtcgatgtaggtggcgaggttcgagaccgaggtcgacacgaatgccgtgatcggttgctcaaactccttcaggaaactgtcgaagacgtttacagccatcgtggcggtccttacttcagggcgtccttcatctctttgacgaaggccttcttgcgggcttcattggcgttgatgcagtcgggagtgttcctgcgctcgcccggattatcgcggcacgccttgagagctatcgcaagctcatcccgatgatccaagaaccagccgacagtttttgcttcttgacctttgttgacgtcgttgcagcccgcaagggtcgcggcgacggtgaggagaacaatggcaaggctcgtcttcattgcagggccgccctcatttcatcgaccagttgtcgccgtctctcccgctctcgttgagcatccatgtccatgcgggcctgttggatcatcgccagaccctgcattcggagcacgtcgttctgcagcagcgcctgttcggcctgcagccgcgcggataaatcgaggatctccttggcgtcgctcgccgagctgatgcgagccctgagttcctcaagcgcatcgatgcgctgcgaggccgtgtcgtacaccgcctggcccatggagtgcttcgcgcccgcctgccgggcgatccggtcgagctcgctttggtagtacgagtttccgctgttgccggcatacgcgcggttctgcgaaagatagtggtcgatggcgtcggcaaaatttccgccgccctgccccgtgacgagccgttcgatgtccgagaactgctggggcagaaccttccgaaactgtggtgtgttcaagagcgcgccgatgtcgttggcgttggttcgcttgttgaagctgtcataaagctgcttggcttggctcaattgatcctgtgcgaccttgagctgtgatgtcagggtatcgacctgctttttcagctccgtcagttgctcaaactgccgggcatagacgcttgggtcgaacacgatctccgccccggccggtgaggccgtcagcagggtgacaacggacaggcaggcgagagccgtcggcctacgttggaccatcattgcgttttccttcgctcaccgtgaaataccggcagccatcgcgcggggtcgtcgccgacctgcttgcgaatgcgatcaagcagctcgaccgtttcggtacgccccgacaagacggcaagcgcgtcgtcgaagccgccgaggtcgagttccgccaccactgagttgtgcccctgtttgaccagaaagcgccggctttcgggtgcgagctcctccttgatcaggcggaattccgtgtcggtcagatggaagccgtcgacatagtccgcgcgtgttccccgcgcattcggcaggaagatctgggtcgggcattgttcgacaatggtatgcgcgatcggcgaggcgagcgcgtcgcgtggcgactgcgtgccgaacaccatgacgccgttctgcttgcggatggttttcagcttgttgttggcgagatcacgaaatgcctcgtctccaagggccttccagaactcgtcgatgtcgatgatcaggcgccggccgtcgatcagccgctccacgcgatggaacagatacatcatcagcggcgtgcgcaccgtgggatgatccaggagatcggtcatgtcgaaaccaatgaaccgggcgtcgaggccgatggcgtcgtgatcgccatcgagcacccagccgaagggagcgccgcggcaccatcgctcgagccgcgcaccaatgccctcgcggtcctgctgtccgagaaaagcccgcagtgtcccgaacgatcgctccgactggcgcaattgaccgagcgcgcgcagtccggaatcgatcctttcctcctcgatcaccgtcagcgggcgatcgtccggggtgacgagttttcggatcagttcgcccaggaaggaaagattcgctggcgtcagctccagcgccttgagtggcgcgcaaccggtcggggtaccattgtggagtgtcagataggtgccaccggcggcgcgcacgaaaatctcggcgccacggtccttgtcgaagaaaacgtaggacgcacctaaccgctccgcctgagacagcagaaaattctgcacgacggttttgccggatcctgagggaccgcagatgaaggtgttgccgaggtcgccgtaatgaaaggagaagtaaaagggtgagccggatgcggtcttgagcatcgctaccgccggtccccaatggttccccgctggctgcccggtcggataggtgtggaacggcgagaacgccgcgaaattccgcgagttgatcgcgccagtgcgtgcccggtatttgaataggccaggaagctgcgcccaataggcggcttcaagtccaagatcttctcgtgcgatcacagcacccgcatcggccagtgcgcgacgtgccacgctcatatgatcctgcagctgcaacggcgtatctgcgtagaccaagagcgagaggtgatggtctccaagcacgaaccggttggattcgagatcgtcgagcgcgtcagagagctcgtcgatctgtgaggcggccggatcctgggccgagaccagctggttctgcttgcgcgtcagcaccgtcttggcgtccgccttcgccaaaaacgcgaatgattgcgtgacgatgagctcaaacggcgccgacagcagcgcgttcaataggccgggccgggtggatgccggatactccttgaggccgaacatgccagcgaatcgcgatccaccggccccgcggatctcgagggcttcgcggccgaagatgacgcgattcgaatagagcgcaggaccgatcggcccttgcggcaatggcatcgacatccattccccggaggcgagcgcgtggagcagctccatcggttctgagaaggtgatgccgtcgcgctcaaacaagccgaccgcgcgggctccgtaacgatcgagtgccgcaacgatatctcgcgtagcatcgtcaagccgcttcagggccgcgctgtcgacctcggcggagttccctacgcttcggccaacccgccgaaagaacgcggccgccgtatccgtcgccgtgcggccggggtgacaaaccagggtcagatacagatcgttgcgaaatagcgcttccttgcaaagtcgttggcgatattgtgcgtcaagtgccgtcgcaaaggtcgaccggaaggcgccgtcgggatagaccgatgtccggcggcgcaccaggtggctccagagggcgagttgcggatctgcaacgttgcgcagggtcagattcagcttagcatgcagatcgttcagatccgacgtctcggcagtctcgaacgaggtgccgtcaatccggatcacagtcagcagggctcgggttgtaagaccgatcgctgtgtcggtgacatgccggccgaacggcaggtagacgttgggctcgatctcccgggttttaagcgccctattgcgcataaccgacgtcccttgttcgatatcgccgaacgagcttgagtggcgtgcaggacgagccgccccagaaggcggcgttgcgcgcgcgcccacgggtttcgatccaggcgattagaatccggaacatgttagggtcgtgtcggcagatgatgcgacagagaccatggatcggaatcgcaacgaagccgtagacgatgctcccggccactaggaagaggatgcaggagaacatcacgttgagagccatggcctccatcgtgacgccggcaaccatggcgggacgcgtacaggcgaggaacaaggtgtcctccgtgagacgcgcggcctcgaccatcaatgacccccagtcaaggtcgagaccacctcggaggcgccgaacgtgatggcgacgcccagcacgacataggcggccttgcgcagatcgagatagccgaacatccaggcgataccgacgatgatgaccgccagcgtcgccagcagccgagcgacgttgccggtcagcatgttgacgatgttctgcagcacgccttcgatgttcgcggtctgcgccagcgccggctcaaccaacgcgatgctgagaacggcccccatgcaaagcagggcagcggagtgtttaagaggagaagtcatggcagcgctccgattggcaatgcagccggccccggtccggaccgcctgtggtgttgagaggaaaagacggcgttctcatcgttcgtaaacaaaggctgacgtgcctagtccggagcgatagacgtcccaacgtgggcgctcgctggtagaggctgcgggtcgattgattgtcgtatcgccggtggggcgatcaccatcggcagatggcatcggttgggtgcgaggctcgggcgcttggctgggagccttggccgagaaacttgcgacaacgtgcgctatcgcctcgtcgcggtttgcgctttttatgcccgccgcttgcagtcgcgcgtcgaacaatctgccaaggccagcaatgtgctggcacgcatcgaaggtcgtggtagccgtcagcccggccttctttgtttcctcagcatcaagttgagcgagcccggttcggacctgctggccggcggcgatggcctcggtcgcgagctggatggcttcgtcacgatcggtggcttgaatcggaattggtttgcgcccttcgctcgtgatgagcagcggctcgaacgagctcgcctgccgcacgatggccgtcagcggccggaccattgccgtcggggcgcattgttcgaccagagccgcgaatgctgctggatccatggcgagagcctttttgtcaggagctgaggacgttcgatgttaggccgcgatcgccaagcttgatggcgcgtcaattgcgtgccctgagatctgcccggccgctcggatcgcgtcgagagccttatcggtgacgggcagcaatccagcgacggctttggtcggcccgatttgacgaggcgtgccgaggcgatcgagatgccatccggcccggcgcaggatgcgttccatgcgcagatcagtgacggttgcgatggcctgaaggtcgcgttgctgcccccattcgatcatggctgcaaacagcaggaacgtcgctttgcgcagaccattctctgctgttgccgcaacagtctttgtgtcaacgcaaaagcgcgagctctcccaaaccgtcgtcgccttcggcgccgggttgccatccagcaacaccgggaacgtatcggcgagcatgttgcgcccagtggtcggcagcaggcgaacacaacccacgacctcggtccgctcgagtgccagcagatatgtcggcttgaaggtgtcgtactgatcgatctccagtccgttggaaacagagacgtcccagtcgagccgatccttgaacacgcgccctcgcaggcgatgcattcccagcgttagttcggagtcgtgcaggagtgccggacggctacgcacaatgaccttcattcttaacctcaaacttacgaatcacagcttcgagatcaagaaagcagccacggtcacggcgttgcgctgtcagttctgacagggggtgtttggaatcgttcttgccgcaaagctgccgcaacgtcgcaatacacgcctgcacgtgaaacgcgaatcgtcagattgttcgcgttgtgggaactaagaagcgactgaagtggcgcaatgaaagatgtcaaaagagcatgcgatgaatttgtcgattgtctgcacgctgcccatacggaagatgattttcggcgtgtcgcggaacgagctgcgcatgccctgggattccggtggttcgcttattttggtcagcgcgccaatggccccaatctgatctcttcctatccgaagagctggaccagccactattttcgggaagggtatcacaacatcgaccccgttcttcaggaaccgcgaaacacgagccgggtgttcctgtgggatggacgtgaagcgcgaagtgcaaaatcagcgaaagagcgccgtctgtttgacgatgcgctcagcttcaagatcaggactggcctgacggttcgcattccctcgagtcagaaccagttcgcggcgtttacgctggcggttgacgagcgcagcctgggactcgatcgtttcatcgagagctcgcaggacatgttggaaaggctgggtctcacctaccatgcgcatgtgagcgcctccagagttgaacgcacgtccccaaacgggaagcaggtaagccccttgactcagcgcgagcggcagtgcctcgccttgatctcagatggcaagacgatgcaggacatcgcggatcttcttggtgtttcttcacgcggcgtaaagttccatctggacaacgcaaggggaaatcttgctgcatcaacccttccccacgctgtggcgctcgcgtttcggcagggattgctcccgtaatgcgcaaaatagctgtcccgcttgtaagaagttccaagatcgacggttcaatcaggatggtaggttgggtggttgcattcaaggcgcgggattctttggaacataaccacggcgtcttttgcggaccagccaagcctcgagcgcttcgacggcctggaccttcccggcaaaaagatccatccgccggcggccgcgtttgccgagacgcccccattcgcgcaccaacgccgtatcaccgaacagagtcggttcgatcgtgaggacatagaatctggccatattgcgggccggatcgcaccgttggagcacgaggtatggcaccgtgagttcggacatgcgcaagaatcgcaactgtcgaaaccgccgtccaattaagttatcgaatcgatcaggcctatcgattcagaattttaataccggtgatgaaaggcatggagggtgcgcaacgaccggtctcggataatatatcggctgttgtgcgcctctgactgcgaagaaagcgggcgtcgccctgcgggccgggctggaggctgcgctgaagccccgcgagcgggtcttcccccttacgggctgccatccctgacgcgaacgggcgagcggcccaaccaacaaactctgccccgatctggaaggggcgaatcgattggttttacccctattggcggtacacttcctcgctggggggcgattcgttacctatcccctgcatgatcccttgttcgtcgtaggtcctgcatttcaacatcgggtggatgggggaccaacatggcagaagccgctttcaaactgacgccgtcagaggctcctccgtaccgccagccgccgcacaatatcgaagccgagcaagcgctgctcggtgctatgctgatcaacaacgacgcctttcatcgtgttgcggatttcctgaaggcgaatcatttctttgagccgctgcacgggagcatctttgaggtgatcagcgagctgatccgctcgaacaaggtggccaatccgatcacgctgaagaccttctttcccgccactcttgatgtggctggaatatcgatggcgcagtatctcgcgcgcttggccgcggaggcgacgacgatcatcaatgcggtcgattacggccggacggtctacgatctagccgtgcgacgtgagttgatcaggatcgccgaggacatgctcaatggcgcatttgaagcacccatcgattgcgctccagcagatcagattcagcatgccgagcagctactatacgaaatcgccgaaacggggcgctatggcggaggcttcgagacgttcgagaccgcactcgacagcgccattgatcgggccgtgcaagcgtaccagtccgatggcaggctttctggcctcgcaaccggcctcaaggacctcgatgcaaaaatgggaggccttcagccaacggacctcatcatcattgctggtaggcccggcatgggaaagacgtctctagccaccaatatagctttcaatgttgccagcgcctacgatgcggcacagcaagtcggtgtctcgactaaacccgcggctggtggcgtcgttgctttcttttctctggagatgtcgtcggagcaactcgccactcgcgtaatctcggagcagacggagatcccgtcctccaatatcaggcgtggcgacatcgacgaggcagctttcggtaagctgctcgattgccgtcaaaggatgcggcgtctgccgctcctcatcgatcaaactggcgccgtctccatcgctcaactcgcggcccgcgcgcgccgtttgaaacgacaacgaggactgcacctcattattgtcctatatccagctcatgcagggcaagtcaccgcgtgcggcgcagaaccgcgtgcaggagatcactgagattacgaccggcctaaaagcgctcgccaaaggacttaatgtgccagtcattgcgctatcccagctttcacgcttggtcgagaaccgcgatgaaaaacgcccgcaactctcagatctccgcgagtctggctcgattgaacaagagtttcgtgaagaatattatctcaaaaacaaggagccgaagcccggcaccgacgagtacctcgcttgggaaacagaaatgagcgatgcgcgcggcaaagcagagatcatcatagctaagcagcggcatggtcccaccgggaccgtggctatgacctttcaaggtgagttcacccgcttcttcgatcttgccgaacacaatcgcttgccacgccgatcagactaagtcttgccgatactggctcttcattcacgctctgcccggtgcagcgatccggtagggcaaaccaaacgagcgctattctcgccgcgctaactccgaacccacgcctgtcaagctgacccacgctcgttcgtaggcatcgaacgcgcctcgctgcttcaacaacaaggatcacacttgttctcgcgtcgcgatctggtcggcaagggcccgcggatgaaagatgtgcagtgcggcacacgatgctttcggagaaggaccagccccgctctcgaatgggctttccttggttctggtgcggccttccacgatcaacccgcaaggggttcgctacgcaagcgtgcgacctcttcggcttcgcctacgaggtgaccgcgaccgcccccgaacacgtcggcgcctgtcgagcggggatggtccccgccgcaagacgggagcctttcgatgtcgcacaatctcgccctcgctcagaaccacgccttcgatctggcccgcacgctgatggtgccggtcatccttttccaggctgagaacgaattcggtgtgatggtctccagcgaatacgagggcgaccaggacgccatcgtccatgattatgatccatgggagattatggacagctaaggctgtcgcccgagacaaatccttgatgtgccgagcctatcgttcggcgcatcttcgattgaactgcacataatccgagggcctgctcaaactcccaacgacggagatcgagcatgcccatatcccgacgccttctcaggaccgaagatccggacaatgttctctggcccatcatgggcctttatacggattacctcgctcgcggccgctacggagctaagcgtcgccgtcgatataccgcctgtgctcttcatttcggcgactggttgcacagtgaagacgctggaccaagcaacatcgacgaggctcggatcggccgtttcctcaccggccacctggcgatctgctcatgcgagcccccggtcccgcgtggcctcatcctcaacagggcggcgattaacaatttgctgcgcgttctgcgcatgcattgcattgtcgcgtctccagcacccaacgccatcgaggtggagctcgcccagttcgacgctaaaatgaacgagatctggggactgacgcagggcacgcgcgatcaccgccgccgcatcattcgacgcctgctccgggagcagtttagcacacaaccgatcgatctgagcgtcatcacgcccaatgccgttcgcgccttcgtccttggcgacgccggctggagcaccagcacgatccgtgtcatgggtggggcagtccgctgctatctccgttatcgcgcactgctcggcgacgacgttgctcatctcctcaaagcggtgccgcgcccggcattctggcgggatgccgagctcccggaggccctgtcggccgccgatgtcgagcagctgttctcggcgtttgaccggccttgtccgtcgcgccggcgaggctacgccatcgtgcgctgcctggccgatctcggcttgcgttcgagcgaggtcatccgactaacccttgatgacattgactgggaggaaggcatcgtaagggtgcctgccggcaaggcccggcggtccgacgtactcccgctctcgctcgcgaccggcgaagcgattgtcgattatgtcctccacgagcggccggcaaccgcccaacgagaagtgttcgtccgccacgtcgcgccgctcggcgagcccgttggtagacgtgtcgtgcagaagacgcttcacgccgactatgcccggctgggctgggaccggagccgcgttcacatcctccgtcacacgctcgcaagccggctggtcaacagcggcgtgccaatgaagcagatcgctgacgttctacgtcaccgaagcatcgtcacctccgcgggctatgcgcgggttgacatcacgcggctgtcggccgtcgcgctgccctggcctggagcggccgcatgagcacccccgtcacaatgctcgcgcgcgccaaggcctacctcgccgagcgccgccgcctcggattcgtgctggatcggtcgggcaatctcacgctcgccttcgcccgcttcgccgacgcaagcggccaccaaggtccgctcacgtccgccctcgtgctgcgctgggcgaaggaggaggcgatgcatgccgatcccttcacctgggcgcagcggctcaacgtactccggccatttgcgcgtcatctggctggtgccgagtcaggaaccaccttccccgaaggctcacccttcgggcgctcgaagcgccgcctagcgccacacatcttcacaccggacgaggtgaacgcgatcatcggagccgcgcgtgctcttccgccagtgttcggtgccggcccggcgacgttcccgacgctccttggtctgcttgcggcggcgggtctgcgcatttcggaggcgctgtgtctccgctgcggagagctcgacgaggctgcaacgcagatcacggtgaagcaatccaaattcgggaggacacgcatggttccgttgcacccgaccgcgtcagcagctttgcgagattacctgcgcacccgagcgaggctcggcgcgaccgaccattctgcgccgttttttctcgacgagcgcagcggtgaagctctgggctacggggccgtgcgccgcgcgtggctccggctgacggcagacctcggcatcgtgccgcgcggcggccatcggttcatccgtatccacgatctgcggcacaccttcatttgccggcggctgatgctctggcaggccgaaggcgctgacattgacaacacaatgctggcgctctcgacctacgtcggccacgtcaatctcggcgacacctattggtacttgcaggctgtgcccgagctcatggcgctggccggcgatcgcttcgaggcgcttgtaccgcagtgcggggaggcgggtcgtgactgacatgatcccctcgttcccgatgctcctccagcgcttcttcgtcgatcatctgcgccaacagcgtgcagtcagtcccagcacggtcgcggcctaccgcgacacgttcaaagctgctgctcgcgttcgcggagaaggcgataagcaaagcgccgaccgacctcgccctcgccgacctgaacgcgacgctgatcctcgccttcctcgatcacctcgagcgcgagcggaagaacagcgtacggagccgtaacgcgcgcctgtcggcgatccgcacgttcttgaagtatgccgcccacgaagatctgaccgtgcttgcggtcattgagcgcagccttgccgtcccgcagaagcgtcacgacaagcctgtactcggtttcctgtcccgcgctgaaatggacgcgatcatcgcggcgccggactgcgcaacatgggctgggcggcgcgatcaggccctgtttacgttcctttacaacaccggagccaggatctccgaggcgatcaacctccgggctggcgacgtggtgctggatgtctcgccagtcgctcatctccacggcaaggggagaaagcgacggagcgtcccactctggaaggcgacggccgctacactccggcagtggcgtcgccatctgcaagacgccggcccacaggggtatctgttcccaagcaaagcaggcggccggctatcgcggtccagggcggctcagcgactcgcactggcagtcgcgcaggcagcgcgccagatcccgcccctggctgaacgggcaatctcgccacacacgatccgccatacgacagcgatgcacctgctacagtcgggcgtggagatcaccgtcatcgcgctgtggctcggacacgaggatccgagcacgacgcacatctacttggaggcagatctcgccatgaagaggccgctttgagtcggctccagccgatcacggctgcaccggcacgatatcaaccaccggaccaacttatggctttcctccaatcgctgtgattatgcgcagtccggcttcgagccggactgcgctatcccaggcattctcagtcggagctgtccataatctcccatggatcataatcatggttatgctcacatccgcataaccatgaatacgacccctggtgcccggctcattgagccgggtgaccggctgccgctggcgccatgccggctgcaagggaagcttcgccgcgcccagctatctgacaaattcgacagcttgtccgcgcgcccttgcgcccggcaggcttcgcggccggtcggggatgtgccgcaaggctaggaacaggtgagaccaacagaaggagggaccggacgtcgcctgcgcgacgccggtgcagacaatggacaagagagaaattgaagagctgcgagaaaaggttggctgcgcggcccttttggagaaagacggctggaaggtcgacgtcaaggaaagcacgcggcgcgcgatcaagtatcgccgcgacagcaacatcatcatcgtcatccaccagggccgcggctggttcgatcccttgtcgccggcaaaaggggacgtattttcgcttgccgaacacctcggcgccgacggtttcgtcgaggcatgtgaccgtgttgcggatgtggttggcttcgttccaagcgcaccagcatggcagcacccggaaaggcccaaggcccttgcgtccattatagagcggtggggacatcgcttcaggccgcgccccggttcgccagcctggcgctatctcaccggcgagcgcggactgccagcagacatcgtgatcttcccccgataaagtggacgggtt

SEQ ID NO: 278 - DNA, 46107 bp, Bradyrhizobium colbertium
agcggttctccctgagcaccccgagcccaccatggatctggatggcccggtcgatcaccctgcaggcggccagcggcgcaaagcacttgaccatggccgcctccttgcgcgcatccatgccgcgatcgagcatccaggctgtcttgtagaccatcaggcgcgactgctcgagatccatctcggattcggcgagcatccattgaatggcctgccgctcggcaagcggcttgccgaaggtctcgcgctcgcgcgcccgtttcgccgcctcgccctgcgcccagcgagccgtaccggtcagtcgcgcgccgatcaccgtgcggttgcgattgagctggtccatcatgtagcggaatcccatgccttcctgaccgagcatgttcctcgccggcaccacgcaatccttgtactggtagtcgcagcttctccccagatacgtgcctggcgccatggtctcgtattcacgcagcacggagacgccggggttgggatagtcgacgaggaagaggctgatcccctcgtaccccttcccggggtcggttaccgcgtagcacaggagatatttcggcgtgatgcccggatggttcggcggcggcgcccaacgcttgatgccgttgatgacatagctgtcgcctacgcgaacggccgtcgtctggataccggccgcgtccgaacctgctcccggctccgagatgttgatgtgatagaacttgtcttccttgaggatcgggtagaggtaggcctctcgctgccattcaggggcgacgtacagtgcgggatgtggatcgaggaatcccgaccaggtcgcaagcaggccgtgcatgacgggcgatctgacgatttcctcataaaccaggcacttcgcgatggtcccgagcccttggccgccggcctccttcgggactgcgatgcccctgaacccgtactcgcgaaacttgcgcaccacgtccatgaagatgtcgtggggaacggcgtagtcgtccgttccccatcgatcctccagtggccggcacacctcgtccacgaacgcggcggcacgcgccttgatatcttgctgctccctagaaagttcaaaatccactgcgatctccaacctttgctcagtgaagcgagcctaagacccctgtctcgcggccgttatggcgccgtaggccaatctggttggccgattggatcatcgggccggctgcccgtccggcggcgtcggatgccggcgtcggctaccaaggaggacttgcagggatgcagtccgcgggtaaaccggttgaatcaattccggttcggccgacgatctggagaggttcgcgcagcggacccgatcccgaagagcgctcacgggcggtgttctctcgccgccgtccggcactggctgaatatcccgatgttctcgcgcgagccggtcaggccaggtacaatgcgcatagccgcgttccagggagaccctttcaggatccccggcgtatcgcgctccggatcgacggcgacataatgcggcggcagccgcgacgctagcggtccgagccgaccgtcgggagaccgaacctgattgcagccatccgagccattcgaaggtggtaaagcgcgcccaaagcgccgacgcgcgtcgctataaccacagttcccctacttggaccaccggcgcaaagaaatcggcggcctgcaatgatcgtcgaccacggtcgcttctgacccgtccgattccatacacccaagtcccagagcggaagtagcggtctcgaagcctgagcagactcgtcattcagtcacctgagcctgatgtcgagccagcccagatcgtttacctcgatttgatcgccctcgccgatgacgactgtcgtcgtttccgcttccacaattgctggaccttcgatcctgttccccggacgaagctgatcggcggcgaaaacatcaacttctcgccattggccgaagaacgcctttcgacgttctcttggtttgcaaggcgcttcggtctcctgcccacgcgcgacttgtccgacgctcgggacagcgcctagggcagaaacccgcgcattgacgaacaccacttcctgatccggggacgagtaggtgtatagctcttcgtggcgacgatggaactgatcctctatccgatcgacgatgtcgtccgacgcccaatcaagattgtttagcgggacatcaatctggaagatctgctcgccgtaccgcatctcggcggaacgttcgattgccacatcgccgccaaaccacgacttcaggcgacccgtcgcctctctttccaggttggcgaagatggccctgacctcctgggccgtaatccgttggccggcgctgtaatgcgtatggctcacctcgtaccgcagatcgctggtcaacatgccccaggcggacaggactgacgccgccgtcggcacgataatgcgcttgatttcaagttcccgcgcaacttcggccgcgtgcaggccggcagcgccaccaaagctaagcagcgcgaagcgtcgcgggtcgacaccgcgacgcagggtcatcagacggataccgtccgccatgcgcagattgaccattcgatagattccagccgctgcatcgtcccgcgacagctccagcgctttcgcaatacgatccactgccgcttctgcggctgcacgatcgagcggccgctttccgcccatgaacgcagacgcgtccagatatccgagaatgacattggcatcggtaaccgtcggttcaacaccaccgttgccgtagcaagccggccctggcaccgacccagcgctctctggcccgacgcggagcgtaccacccgcatctagagtagcaatcgaccctccaccggcggcgatgctcgcgatatcgagactccttagcgcgatacgttgaccggcgagccctccctcagcggacagcgacgcgcgaccatcagtaatcagcgagatgtccgtgctggttcctcccatgtcgaaagggacaaggttgggaattccgagctgttccgcacagcgccgggatcccgagataccacccgcggggccggaaagtacggtgcctgcagcgagccgcgcggcttcctcaagcggggccatcccgccatgcgaaaggataacaaaaaggctgctggtcaggcccgcgtccctcagccgggcttccagattggtcagatagcgccgcaccagcggagcaacgtaagcgttcacgatcgttgttgaagcgcgttcatactccttgatctgcggcaacacatcgctcgaccgagagacgttgagctctggaagctcgcgtttcagtcgttcgacggtcgcaatctcgtgcgctggattgcggtaggcgtgcaggaagcacacggccacggagcttgctccggcggcgcggatcgccgagatcgccttaccgagggagtcttgatcgagtggaatcagcacctcgccgttcggcctgacgcgctcacgtacaccgaagcgtagttggcgcggaaccaggggggccggaggtgggatgcggaggttgtagcgatcttccttcagaccctcgcgcatttcgatgacgtctcgatggccttccgtcgtgagtagcgcgacctttgcccccttccgctcgagcaatgcgttcgtcgccactgttgtcccgtgcaccaggcggtccgtcctggcgagcatctccgctcgtggcatcttcagccggcttgcgagttcctcaagtccattcatgacgcctacagactggtccgccggcgttgtcggcgattttgcgaacacggtgttgccgtcgcgatcgaccgcgacgaggtcagtgtacgttccgccaacatcgattccgatggtaaacatcttcaggctatccattaaatcgtcgtgagctttgtcgtcaggccctgcatcaagtcgccttcgcgcgcttcagcagaccgttgaccaggggggccccatcctccgccgcctgaggagcgcacctcgaagcagtcgccgggaaggacttcgatgccgacctccttcgtgcgcagcacccgcggcgcgcggccctgcgacacgagagtgtactgatggggaaggccatcactgccgccgagcatcccgcatgcgccatgcttcgtgccctcgcctgcggtgttcgctcgcgcaggcttcgccgtttccacgacgagatccaacgacacgcccaggccgccgcgaaacttgccgtctccgccggagtccggacgaaattcgtgatgccggaaatagagcggaaagcgggcttcatcgacctcgatgctgccgaatttgatacccccgaccgtatgccattcaccaatcgatgaccaaccatcgcccgccgacgacgcccctcctccgggcctggcctggaacaaatgccagataaaattgcgccctgtccgcggattctcaccctggatggcgatgcggaatctgcggctccacccggccatcgcacgatccggacacgactgggaaagtgccttgacgatagcctccacaatttcattcgaaggatggctggtgcacatcgtgaccggccggccgggatctgcccatacgatcgtgccctgtttggcaacgaccttcagcggccgaagtgcgccggcgttcttgggaatatccgcatcgatgagataggcaaaagccatgacgaccgcagcctgcatattggcgtgcgacgaattgacaaagctcgtcgactgagggtccgactccgaaagatcaatctcgatgtcagatcccttcttggtcaccttcgcggcgattctgatatcgcttcgaccatgaccatcatcgtcgagatacgcttctccatagaacgtaccgtcctgccatgtcgctaggactgcccgcgtctgttgttcggcagcatcgagaattgcttcgacggcggcctcgacgacctgtccaccaaactcgtcgagcagccgcctgacacggcgttcgccgaggtgcgccgcaccaatcatcgcagcaagatcaccgcggaaatctcgagaattccgcacgttgagtgccagcatgtcgagcaggtcgtcacgaagtctgcccgcttcataaagccggatcggcggtacccgcaatccttcctgccaaatgtcggtcgcgcccggattgtagccgccgtgggtcgccccgccgatatcgctctggtgtgcacgcacgatggtccagtacagcctccgttccccatcgaagattggcacgaacgcggtcagatcgggcaagtgactgccaccatggtagggatcgttgagcagcagaacgtcgcctggcttgatgtccttgaagcgctcctcgatcgcaagcgtcgcccaggacagcgcgccgacatgaaccggaatatggtccgcctgcgcaatcaaacgcccattcacgtcgcagatccccagcgagaagtcacggctggagttcaggatctgcgagtaagatgtacgcagcatcgcttcgcccatttcgttcacgatcgaacttagacgatgctggacaacggagcgggtgatggggtcgatctttgaggtcatcgcaagcctgctggtagaaattaaaatctcaatccgatgtcaagcgggcgccagtcggaacagttcgcgctacagggagcttgatcagccgaacgcggcgacctcctccaaggactccgcggccgccttcacaatcgtatcgacgtcagcatcggtcatcggcaacgacagcgccatcaggccatagctcgcgacgaaaatcccgcgattgagcaacccggcggtgaaaacggcctggcgcttcgcttccacctcgctcgagtaagccgaacgataatcccggacgttgcggtcggtgaaatgaaccttgaggagcgagcccaatccgactgcggtcccggcaacgccagtcttgcggaaggccgcattgatgccgtcgcgtaccgcagtgccgatccgatcgaggcgtgaataggctgctgcatcgagcaacatcatggcggcaagaccggcgcgcatggtgacgggattggccgagaaggtgccgccgtgcgggagcgccggtttgccggaagatggatcgaacaccgccatgaacgtcttgccgccggcgaccgcgccgaccgggaagccgccaccgatgatcttgccgagcgtcgtcaggtccggatcgatgccccagagcccttgtgcgccctcatagccgagacggaatgtgatgacttcgtcgaagacaagcagcgcgccgacttcccgcgtgacctgacggagcgcttccacgtaggctcgatccgccggaaccagacccgcccggttcggcataggatcaacgagtacacaagcgagttcgggaccatgctcgcggatcaggctcacggccgcttcgacgtcgttgaacggaatggtcacgacgtccgcgagcacgttgtcgggcgtgcctttggcataggctaccgataccggggcgttgcctccccaagccgcgggtgtcgggtcgaggctgacttcagcgtagtcataggagccgtgataagcaccctcgcacttcgcgatcttcgggcgacccgtgtaggcgcgggccgcttttagcgccatcattaccgcctcggtgcccgaattgcagaagcggacatgatctacggatggaagccttgctgccagcaactccgcgagttcgacttcggactccgtcggcatgccgaaggcggagcccagagcgagttgcttggtcgccgcctcgatcaatgcgggatgagcgtggccatggatgagagacgtgaagttgttgatgcagtcgatatactcattgccatcgacgtcccggacacggcagccggcgcccgaagctgcgtagatcgggaacggcttcatatagacggtggttcgcgtattgccacccggcaggctcttgagcgctcgttgatagagatctcgcgattgagaatgattggcgggatacatcttgcctccttgatcctgggttcagcgccccagataagcttcgcgaacgcgcgcattgtgcttgagttcgtctgccggtccttccagcacaatgcgccctgtctccagcacataggcacgatcggcgaccgagagcgcgagtaccgtattttgctccactaccagaatggtcagaccggtctcgccaatgcacctgacctgttcgtaaacctcttcggcaagccgcggcgccaagccgagcgatggctcgtcgagcaacagcaacttggggcgggccatcagagcacgtccgatcgccagcatctgctgctctccgcccgacaatgaccatcccagttgtcgtcggcgctccttaaggcgcggaaacaatccaaagacgcgatcgagatcggccgcaatcgactgcctccaacggcgccagctgacggtcgcaagggtcaggttctcctcgaccgacaatccaggaaatatccttcggccttcgggcgcctgcgcaatgccagcggaaacgcgtgcgtcggtgggccatccggcgatcgagcgtctctcgaatcttatgtctcccgacgaaactcggttgaggccggagatcgcatggagcaaggtcgtcttgccggcgccattggcaccgataagcgcgaccgtttcgccagcttcgacctggagggtcactccctgcagcgccacgatatcgccatgcgcgaccacgagatcgttacacgacagcatgagcatatccttcgcccagataagcagacagcacggccggatctgcttgtatctccgctggagttccctcggcgatcttgcaaccaaaattgagaacgaagatgcgctcggcgagccgcatgaccatccccatattgtgttcgatcagcaccacggcgagtccgtgcatcgcccgcaactccgccaggcgatcgattagttgatcgacctcgcctgaattgaggccggccgccggttcgtccagcaggaggacgtgcggccggcacgccaacgcacgtgagagctccaccattcggcgccgaccgtacgagagcgacataatggcttcgtgcgccacgtctgccaatcccatttgctcgatgatctccatcgagaagtcgcgcaggtcagactcgcttaggcggccgcgtatcgccgcacccgtcatcacgttttctagcacgctaaggcgtgcgaatacccgtccgtgctggaacgtacggccgaggccggcacgaatacgcttgttggtggccatccgcgtgatcgcctgcccggcgagaagcacctgcccttcatctggcatcgccaggccagtcagaacgttcaacagggtggactttccagcgccgttaggcccgatgacagcgacgaactgcccgtttttgacggtcagatccacgtccgctaacgcagcgagacctccatagcgcttgtgaatgcctcgtgcttccaaggcgttcatgacgtcgcctccggagcgcgagcagatgcgagaagcggagttttagctgaccgacggctcaagcgttggccgaggccaacgagacccgtgggcagaaacaccagaatcccaagcaccagcaggccgaagaagaagaggtaggcggtaccgagaaagcgcaaccattccggcagaaacgtcagcagcaccgctccgaggacagcaccgacgattgtgccttcgccgccgacgatcaacatggcgaggtatgtgatcgagtgcgcataggtgaaatcctccggcgcaacgaagcgcatgtgcagggcaaacaggcacccggcaacggcagcgcagatggcggaaagcacgaacgcttcaatcttgatccgcgtcgtatcgattccggtcatctcggacgcgatctcatcatcgcgcacagctatcatttcgcggcccaggcgggacttgtgcaatgcggccgcggcggcggcgatcagcgccagaaccataagcgcaagccacaggaactggtgctccccggagaagctgaacgagccaagcgccaatcccgggatccgcgcgatcccgttggtcccccctgtcatcgcaatccaattggacgttacgatatagaacgacacgttgaggccgagcgtcgccagtgccaggtagtgcccgcgcaggcgaagcaatgggtacccgatcaggccggcagaaatggctgtcgccgcaatcgctactggcgcagcgagccacggtgaccatccgcaagtggtcgtcaggatggccaagccatagccgcccatgccaacaaaagccgcatggccaagcgagatcaaaccggcatagccaaacgcaaagttgagcccaatcaccgcgaccgcggagatcagcgagagattcaacaagcgaagatgatattccggcaggaccataccggagatcccgccgagcacaatgatcgccgtcgcgatctgcaggggaatgcgcatcgccatcctctcagcctcgatcctgaattttctcgccgaacacgccttgcggacgcacaagcagaaaggcgatcattatgccgaaggagatcagatccttgtacgcagacgagacatacgatgcgccgaggacctcactcaagccgacgaaaaggccgcccacgatcgctcccggcaggctcccaaaaccaccgatgatggtcgcggcgaaggccttcaatgcgatcggatcccccatgttgacgtccgcgaaccacatcgggccgagcatcaatcccgcgacgcccgcgagtaccgcggcgaggatccatgagaacgccagcaggcggttgactttaagacccatcaatctggcagcctgtacatcctgcgctacggctcgcatgcccacgccaaccgaagtacgattgaaaagaagccatagcccggccaccatcaccgcggtcaccgcgaccaccgccagggcatgcagggaaatgatcgcacccccaagcgaaaccgcgctgtcctcgacgggagatggcagccggaatggccatgatccaaaggatagcaaggcggcgttctgcatcgtgatgctgacggcaacggtcccgatgatgatggtcactatcgaaccgcgccgcagaggcagataaaccgagacaaagaacagggccccgaacagcgccatgatgaggagcgccgcaccataggcgaagggccatggcagctgcgcgttgacgagcgtcgcaacgcccgcgaacgttccaaacattacaaactgaccggcggcgaaattgaccacgccggtagcagagtaaacgatcacgaagccgatcgcagcgagcgcatagacgctaccgatcgccagaccgttgatgatgagctgaacgaagtccgccatgacgttccctgcacgatcccggtctgcggccgacttgtcggaccgcagaccaactcgtttcgaatgatcagttgagcgagacaggttggaccagttccaaggtcttggtgcccggctttgccttcacgaccgcgaggtcgcgaaccccattgcctttgttgtcatacgagtagacgtggccaatgccctgccaccccttgaccgaggacagccattcgcgcagcgccttcgggtcggttccggccttgcgcatgccgtccgccatcagcatcgcaccgtcataatacgcgagcccgtagggatctggatcaaccccgaatttcgatttgaagcgctccacgtagtccttcatccggccgccgacgctgacgtccatgaaggcatcgaccacgccccagaccccctcgagatccgacggcgaaagaagctgcgtcgccgcgggcaccagcgcagcagaggacgtaacgagcggcatcttgaagccgagctgcttcgcctggcggaggaccagcgcgccatcctgcggataattgaagatcagaatggcatcggcgcctttattgcggagactgaggagctgcgcggagaagtccttgtcgttctggccataggcttccatgccggcgaccgcgatcccggcggcctcgaagcgcttggcggcagtctgcgcaccgccctgaccaaagtcgttctggatgtagagaattccgggcttctttgccttgatgacgtcgactgcggccttcaccattccttcggccgaaacgctgtccgccggacggatccggaacatccattcgttgcctttatcggccacgacgtcggcaccgccggcatacatcgccggtacctgaactttgcttagctcgggcgccgttgcgagattctgcgtggagtagctcgacaggaagaagaatgctggcttggtttcctgggccagctttacgaacgcgttgacagcagttccgttggacgcctgcgtgtcctcgaacacgatcttgatatggcgaccgttgatgcccccggccttgttgatgtcctcttcggccatggaaagggagttttgatactgtttgccggtcagggacagtggccccgtcatcggcacagtcgcgccgatcaggatagggctgccctgctgagcctgagccacactcacgaacgacagcatcgccgctccgatcgtcacgccgagaccagccttccgcgtaatcttcatgtcgcctcctagaatgaaaaaatctctccatcgcacccagcggatttcacgagggcttgacagtcgttccgtttttcggaacataatcccgaattatgaaacggtaaacggccgcctcgccaggagtcaagccgttcatttttgcttgcgtcgcacaaagattgatcggatcacatgcaaatggatgacaactcgcccggcccgctggctcgatacatcgacgtgctcgaagtgattgccgccttccccggcgcgatcacgctcgccgacgtctcatcgatcctcgaactccccaagacaaccgcacatcgactgctgaaagggctggttcgatcagggctggcagtcgaagcggaagcaggacgcacctattccgtgggcgatcggctgacgcgtttgcttcatgcaagcgcggacgatggctggtacgcgtcgctcgccggtccccacattcatgctttgacggaggcgacctccgagacctgctatctcgcacgcctcgttgggtcgcgcgtcctcgtagccgtttcatattcgcccgatgtgaggtggcgcggatatgttcagccgggaatcgagatgcccgtgaatgccgcagcgactggcaaggccatcatggcctttcagagcaaggagctgatcgctgaggccctttcaaatgagcttcccaagccgaccgtcaattcgcacaccagccgaaagtggattgaccaggagttcgcaaaagtcagaagatcgggctacgccacttgtatcggggagatcgacgaaggacttgcggcacttgcggtccccgtcacgctttcggatggcacagtccttcaatccgtcggcatgaccgggccgcttgagcgcatcatgaacaagcagatggaggaacggctttcggctctccggaagactgcagcagctctctcgaaagccctatcccgaggaatggctgtaaatcgtcggcgttgagacttcgcgacgaagggcgctgcagccgctttgcccgcggccgagccagaataaccctcagtcgatcggcgcgcgccgggtatgccaatccgtcaccgactggaaggcatgcccggcgcgggcgagcacatcctccgatagatgcgggccgaccaattgcatgctgagcggcaggccgtccgacgccatgccattcggcagcgtgatggtggggcttccggagaagtcgaacaccgcggtgaagcgaaggatgctgagcagcacagtcggatcggcgccgtattcgcccatcttggtcagcgttgggatcggcacgggcatggtgggaatgagcagcaaatcgacctcaccgaacaaggccgcgaggcttccgcagaacttcaagcgctcgtgatggatctgcgcgatctcgacgccgctcatggatctcccctgctcgatcagctgcgccagatcggggccgtactccgacttccgcgatggataggtctcaagatgcgcctctgcggtctcgatcgagcacatcggaatccacatgctgacgagcttctcgtatgcggggaacttgatctcgcggatgtctgcgccgagctccgcaagcgtgcgttcagcttccagcagcgcggcgacaacctgcggatcgataccatcctgggtgtagctgcggtccacgccgatccgcaagccgcgaacgccgccgccaatcccggtcagatagtccggtaccggctcctgcagcgccgtgggatcgttgacatcggcgcccgcgatggcgccgagcatggcggccgcatccgccgcgcttcggcacatcggcccgacatggtcgagcgagtccgcgaggggaaaaacgccgtgacggctgacgcgtccccaggtcggcttgatgccggtcagcccgcaggtagcggacggaaatcggatagagccgccggtgtcgctgccgatcgaaccgaagcagagccccgccgacgttgccacgcccgatccgctcgaggaggagccaacccagtattcgatgttccaaggattgagcggagcctgatcgttcggatggtgactggtgtaggcgccctcggtcatcttcagcttgccgagcgcgacggcgccggcgagttcgagccggtccacgatcgtcgcgttgaaggacgggataaacttggcgtggatcgtggtgccgcccgccgtcggcgcaaaggtggtgtaacagagatcctttagtccaatcggcacgccgtgcagcggcccccgccagatgcctttcgcgaactcggcgtcatggcgtttcgcatgagccatggcgcgatcggcgagtacgagtgcatagctatggaacctgccgtcgagcttctcaatccgtcccagcatggcctcggtcaccttcgacggcaggagctcaccccggcggaacagcccggagagctctgtgatcgacttatagtgaattggatctgctgacatctgacagccctgttgttatcggaaatggcttcgccccacgtgccgcgcccccgttgctgcgtggctccggatgcgtctagaactgcacgccgcgcgtgagcgcaccgtcgatcacgaggttggtccccgtgatgaagctcgcggccttgctggcaaggaataccgcaccgttcgccatttcctgcggcgtacccatgcggccggtcgggttaagcgcgagcgcggtcttgtaaagctcgggattgccgtccttgatctgattccagaccccgccctcaaagtaggtgttgcccggcgagaccgagttggcgcgaatgcccttgccggcaagctggaaagccagcccttgcgtgtagtggatgatcgcggccttgaacgtgccataggggccgctggcgaagtcgacttcgcggcccgacacgctggagatggtgacgatcgctgcggccttgctcttctccagatacggcattgctgcattgaccagccgcacggtgcccatcatgtcggtcgagaactccttctcccagctctcctcgtcctgcccgatcgacagcgcgctgacattggcgacgacaatatcgatgccgcccagcttggaggccatatcctccacccaggctttgagcgccggtccattggagacgtcgaccgagctgccgaatgcagcgacgcccttcgccttgatcgcggtgactgcgttgtcgacgtcagcctgattgcgcgcgcaaatgcccacattggccccctcggccgcgaaggtctcggcgatcgccctgccaatgcccttcgtgccaccagtgacgagaacctttgctcccttgagtcccagatccatgttcattccctcccaattgacgcttgaatacgccgaaacggcctttcagagcagcagctgttcgcggacgttgtcctcgttgacctcgccgccggccagcgacttcgtgatcctgcccttctccatgatgtagcagcgctccgcgatcgcgaggatcgtgtccaggttctgctcgacgaagatgatggtcgttccgagctcgttccggaacgacctcagcgcctcgcagatgtgctggacgatcgacggctggatgccttcggacggctcgtccagaatcatgagggacggattgccgatcagcgcgcggcctatggccagttgctgctgctcgccgcccgacatggtgcccgcggcctgccgccgacgttctttcagccgtggaaagtattcatatacgagctccggcagcttcttgctgcgcgggccaccgatcagttcgccgaccagaagattctcgtcgaccgtcatctgtggaaatacgtcacgcccttgcgggatgtagccgaaacccgccctcgcccgtgcgtcggcctccagcgctgtgacgtcctcctccatgaagctgatcgtaccgcgccaagtttgtagcaggccgatgagacagcgcatcagggtcgatttgccgacgccgttgcggccgatcacgccgacaatctcgccgcgcgagaccgacatggtaaccccctgcaggatcggcgttgccccgtatccggcccacagctccgatacgtccaggatccggtcggtgggattgggcttagtgagcatgggtcttaccgagatagatttcagcgaccttctcgtcctgcaagatgctctcgagattgccccgcgcaaagatcttgccgagatgcagcaccgtgacgcgctgcgcgacctgccgtacgaaggccatgtcatgctcgacgacgagcaccgtcattccctcggcattgaacgatttgatcagctcgcctgtcttgtaggtttcttccggcgacatgccggccgtcggctcgtccagcagcaggagctgcggcttcagcgccagcgccatcccgatttccagccattgctgctgaccatgcgacagcgcaccggcgagtttgccgctgtccggtgcgaggttgagcagcgtcagcaggcgatcctcctcggcgatgcgctccgcgccggacaatcgttcctggagcgccgtctggatgttctgtcgaacgggcaattccttgaacacgctcggagcttgcatcttgatgctcatgccccgctgcacgcgcgcatagggacgctcggtcgtgatgtcgacggtatcgaacaggatgttgccctcggtcggcggatagagccctacgatcagcttgaacagcgtgctcttgccggcgccgttgggcccgatcagacagtggacctcgcccgcattgaccgtgagatcgaccccggagacggcggtcagcccgccgaacctcttggatacgcccttgacttcgaccagcgccacgatcaggcctcttccgactgcaagcgaccggcctccgtgacgacggcatcgtcacctcgacgtcggtcgcgccaccagtccgcaacgagtttaccgatgccgagaacaaagccctgcggcgccagcatcaccgttgcgagcagcagcgcccccatcagcacgagcgcggcctgctggctgtagacggtgatggtctgaaagccgaacagcagcaggaacgatccgaccagcgtcgccgtcaggtcgctccgtccggagaacgccacccatacgatcggcatcgcagccgcagggaggccgatgctggagggcgtgatgaactgcccccacgacgtgtagagcgcaccgctcaaccccgcgaggccgctgccgatcacgaaggtcagaagctgatatttacggacatcatagcccagcatctccgcgcgttgcggattctcgcgcgtcgccacgatgacgttgccgacacccgaattcaacagcatccgcagcgccagatatacaatgacgatcagcgcgaccaggacgtagtaaagcgccgatccctcgatgtagaagtcacccacggtcagcgggtccatgcccttcatgccattgaagccgttcagccgcgccggaccgatatgccattcgggcccggccgtctggccgaggaagaaggccagcaccagcgttgcggacagcgtcacgatgccgaagaatatcccgttgatgccgccccagatcatgaagtagccgaggatgcctgccgcaatcatcgcgagggcgaccgagagcacgagcgcggcgatcgtcgcggtgccgccgcccatgttgatcgcgagcacgccgtatccgtagccggcgatgccgaagaacaaggtctggccgaacgagagcatgccgccatagccccacatcaggcagaggccgagcgccatgaagatccagatcaggaagtaggcgaaattgccgacgtcgtaggagtcggcgaacagcgggtaagccagcgctccccccaacacaacgaggaagcaggtccagaacatcctgccgcgcccgagcgtctgtggaccttccagcagcttgaacatcaatgtttccccctagcgcccacgacgaaccagcacgcttgagagcccttcgggcaacacgcgaatgatcaggatgacggccaccagcatgccgatctgtccgatgatctgaccgtagcttgcgttcagcgtcatccggatcatcgccaggagcacggccgccggcgccgttccgagcagcacgttggctccaccgatgacgacggtcacgaagctctcgaccacgaaggtcgcacccatggtcgggatcagcgtcatggtcggcgcgtacagcgccccacaaagcccggcgaggccggtcccgatcccgaagctgattgcatagatcctgccggtgcgcgcgccaagcgccttggccatcgccgcattctgcattgtcgcgcgggcaatcacgccgaaccgcgtcctcatgaagatgatgtagaggccgaccagcacggctaccgcgcaaccgaacagcaccaggcgataggtcgaaaacgtgtagccaccgatcgcaaaacttccctcgggcgttccgatacctcgcacggcggagccgacgatcaggagcatcgattgcgtcacgatgagactcaagccccaggttgcgagcagcgaatccagcggccgcttatagaaacgccgcacgaccaggaactcgacgatcacaccgataaggcccgcggtcaccgcggccaggatctgggcgagcgcaagcggcacgccgaggttcacgaggccaacggtgacgtaggcgccgcacatgatgaactcgccatgcgccatgttgatcacgcccatcatgccgaacacgatggcgagacctgcggccgagagaatgaggaacgcaaacacgtcggcgaattgatagaataccgagaacacttcagccgacatcctgatccccttgccgctcccggcgccgcatcgttgcggcgccggccttgttcaagatcgtgacattcaacacgagcaagatctgtgcccgagcatcacgatttcttcggcagatggctcggcgtgtactgatccttgtcgttcttcttggtcagatcgcacccgatctcgccaagccagtaaggctggatcgttccatagtccttttcgaccttcacctcgtgcttgggcccgaccgagatcagccgcatgcgatgcgaggtgtgctggctcttgggatcgatgcagaccttgccttcgggagcgtcgatgcaggcgtcgccgctcgcgatcaccttccgcatgtcttcgagcttgatcgacttcgccttctcgaccagcgacttgtacatgtagagcgcgttgtaggcgttgtaccccatgtcgttgatgtagagctcgtcggggaacttggcgcgccagcgcttcttgaattcggtcgcctcgggcgtgtctatctcctcgaaccagttcgcggtcgcatgcatgttgttcagcgccggcggcttgaaccgcttgtgctcgaagccaagcatgaccttgatcgatgagcccatcggcaggttgagattggccgccgctgcctgctcgaagaacgaatcctgggcggcgccgacattgatcgtgagcagccagtccggcttcgctttctggatgttctggatggtctgcgcgaactgcgacacgccaagcggaatgaactcctcgccgacgacctggccgccgagatccttgatgatcttgcggttccactctgccgatatctgaccgaagttgtagtcggcggcgataacatagaccttcttgccgaacttctcgaccatccagggaatcagcgtcgagaattgctgctcgggtaccgcgcccatgctgatcatgctggcgtcgcaaacgccgccttcgtactggttggtgtagaagtacggtgtcgaggtacgattgacgatcggacgcagagcttcgcgcgaggccgaggtgataccaccgatgagcacgtcgaccttgtcgcgattgagcagccggcgtccgaactcctggtagcgcgcattgtcgccctgcggatcaaggtggatgagctcgatctgccgacccaggataccgccgctcttgttgatctcctcaacggcgagctgtgagccgtgcagtttcggcatgcccatgaaggcaaggtcgcccgacacgtcctcgagcaggccgaccttcagcggtggctcggccgcctgggcaagacttgtcgatgccgccgcgccaagcatggcgccgagcaaaaccatccttaacttgcgtctcgaactcatcgtgatgtcccctctcattggaatcggttggatgtcatggcttgaggtaattcttgaggatcgacgcacccatcgtgtatttggggtcgaccatgttgccgaggcgcatgcggccggcctggctgagcagcatgtaggcgtcgatctcgtcgaacccgtaatcggccgccatccaccgcacgagttcgcgatatgcgatgcgcgctgcgtcctcgagaggacgcgcgcttccgatcgtcatgatgaaatcctcggtctcaagccggggccaggcaaagctccagttcttgatcaggtcgacctgcagcgtgacggtcgcgcgctgctccagcgccactccggaaagctcgccgtcgccttgcgttgcgtggcaatcaccgacgtagagcattccgccgtcggtatggaccgggaaatagatgattgcacccggagcgacgtcgggcagatccatgttgccgccgtgatagtccggctgcagcgaggagatcgcctcgatctcaggcgagacgccgatggtcccgatgaacggctcgtagggcagcgtgagcttgtcgttccagcgaatgccgttcctgtcgacatgcagcttcttcacgcgttccgggagcggcggattgagcagcgcggtcgagcccgtcccaaccagtccgccgaattccggaataatgcaggtcgtgccagcgggttgttcgccccgggtctcgacgtcgcggatgtagatcgcaaggcaatcgcccttcttggcccccttcaccgcgatcggcccacattgtggattgagataagggaagttgagcttggcggtgggactatcagtctctttggtcagcacgccgccaaaagcatcttcggtctcgacgacgaccacctcgccggggtcgatcgacagcgtcggcttggcataagggccgtaaacgtagtggaaaccgccctgctgctcgatcgtcagactatgcgttgcgcccgccgcgcctttggcgacagcgcgcttggccatgatggatgtcttcaaccagtcttcggacatgtagtcggctcctcggctcaaatcgcgggatgacgcttgtgccagtcggtgacgcgctggaacgcatcacctgcgcgaacgaggccagcctcgtcgaaatggcggccgacgaactggaagccgaccggaccaccattcgccgcgaagccgccgggcaatgtcacggtcggacttcccgtcatatcgaaagggcacgtgaagcgaagcaggccgccgatcagcgaggcgtcctcgccgagcgccgccatctttgaaagcgtgggcgccgcgaacgcctgggccgggaccgcgatgagatcgaccgtctcgaacagcagacgcaccgcgccgcgaaacgcttcacgccgaagcacgatcttctgatagtccatgccggattgctgccggccgagttcgagcaggcccgcaagggccggaccatactcgtccttgcgcgctggataggtctcctcgtgcgccaccgcgacttcgatgccacagagcgggaaccagtcatcgataaccgccgccggatcggggaacgcaatttccttgatcttcgcaccgagatcagccgccacccgcaaagcctcggccagcactttggctgaatcggcgtcggtgccctcgctggtccatcgtcgatcgacgccgatcgtcacgccgcgcagatccccggtcaggccagcaagataatccggcaccgtcagcggcaccgacgtcgtatccttgggatcctgccccgcgatcacgccaagaatggcgccgcaatcgaccgcgcttcgcgccatcggaccgatgtggtccagcgtcgccgcgagctcgaatgcgccgtagcggctgactcgtccccaggtcggcttgagcccggtgacaccattggccgcggacgggaaacggatcgacccgccagtatcggtgccgagcgaaccgaagcagaggcccgcggcggtggcgacgccggagccactggaagatgcgccgggccacagatccgcgttccacggatttttcggcgggtcgatcttcgggtgatgatcggcgtaagcgccctcggtctgctgcagcttgccgaggatgatcgcgccggcgtccttcaatcgtgcgaccaccgttgcgtcctcggtgggacggaagtcgcggtggatcgtcatgccatgggccgcaggtgcacccttggcccagcagagatccttgaccgcaaccggcacgccatgaagcacgcccttgatttttccggaagcgatctcctgttcggccgtagtggcatcagcgagcgccgagtcagccatcacatacgcgaaactcttcagctggccgtcgagcttctcgatccgctgcagcatcgccttggtggcttcgaccggtgacaacgccttcgcctggatcttctgcccgacttcgacgagcccgagatagtggaggtctgttgccgtcatcgctcttcatcctctgctcgacatgacgcacgatctcccccgagcacgcgtcaccgttctggcgatgcggacgcatcgccagctttccccggcggcaaacgaaaaaagccacccgtccctcccgaatgaggtgacgaatggctcaaatgccgcggctatgatctgtcgcttcagggtccgtgatcgaacgaagcacttagtgcaaggagctggacgtcatcggccagttcggcgcacgcgaggttcgacaggtagccctgtatgagaaaagtctaagtaactgcccatcgcattgtcaacgatgctgtctgcctaaatttagagagtgctgcgcagcaaagcggcaagccacttgccctttcatcggcgatgatgatttcatctccgcgtttccgcgatcgaaagccgtcaatgaccaagccgtctgttcccgttggcatcatctgctcacagtccgggccttatcaggcaatgggccgcgagatcctcaagagcgcgatgatggcagtcgacgagatcaacaaccatgcggagttcgagttcgcgatcgcaccccatattcgcgatcctcgcggcattgtttccgaataccatacggtgtgcgacgacctcatccgcaatgtcggcgtcaagcacatcatcggctgctacacctccgcctcccgcaaacaggtgcttccgatcgtcgagcgcaccgatcgactgctctggtatcccgcccgctacgaaggcttcgagtgctctgacaacgtgatgtatgtcggcgcgtcgcctaatcacaatgtgctgccgctcgtccgctacgtgctcgacaatctgtcgcgggagatcttctgcgtcggctccaactacgtgtggacgtgggagaccaatcgcgttacccgtgaattggtcagcgcggcagatggccatattctcgccgaacgtctgcttgagctcggggaaagcgccgtcggtcacatcgtcgaggagatcgtccgccgcaagccgccgatcgtgttcaatacgctggtcggaagctcgagctacgatttcatccgggcatttcacgcaggtaccaaggctgcagggctgcagattcccatgctgagctgcagcctctgcgagccggaactggcgatcgtcgggccggcgtcggccggctgcatcacgtcgtcggcatatttcgagagcatccgcctgcccgagaatcgtgccttcgtcgcgcgctggaaggcgcgctatggcgaggagagcagtccctccgtcgacgggcaatccgcctatgtcgcagtctatctgctggcgcgcgcgctgcagcgcgcgggcacgtccgacatagcggaggtgcggcgcgcagcggccgggtatcgctacaattcgccgcaaggaccggtgtggatcgacggcggcaacaatcattgcgtccttacaccgcggcttgccgtatccaatccgcaaggacagtttgatatcttctgggaagccgacgcgcctgttaagcctgatccttacctgacgcagctcgacgtggccgtcagccccttgagggaagcctcggcgggcgtcttgccaaatgcgccgcatttgcgggttgtgaaatgagcagaccgtcttcgttttcgctgcgcggacgcaaggcactcgttgcaatcaaggacgagcgcgacgcgactatcgtgcggcgccagttcgagcgtctcgggatcgagggcgtcgcgtggacgccggctgagcccgtcggcttcacaccggatctgtcgctgatcgacgacgagttcctgcctttgctgcaaccggcgcaacgcgcgtccctggcgcgatcacctgtcatcgcgctgctcggcacagagaccccgagccgcctgaaactggtgttcgaactcgaccccgcttcattcctgatcaagccgttgcgatcggcaggcatctatgcagcgctcgtcatggcattcgagcgaagcgaacgcacaagcgaactgaagcaacagattctcaagctggagcaccgtttgaaatctcgtcgcgtcgtgcttgccgccgtcctcaaggtcatgcatttgcacgcactcgccgagccggccgcctttgcgctgatccgcaaagccgcgatggagcaacgcaagacgatcgaagagctttcggcggagattacggcaaaaggcatgctcccgcgtgcagcaggctagagcgccttctgtcggggcggggaccgggctgcaatcgtctatgctgtgctgccacccttgcctttggattgtcagacaggaaataagccgcagcacgcgcatcgcgtagcgcggctgacgcctcgtctgattgctacccctcggccaagccttggcctaagcttctggctcgacgctgctccggccaagcgcggagcaagggtccgcctccaagccgagaacgggtcgttctgcccttgctgcagtcgtcagccggctctccaaagctgactcgctgtgcaaatgacggcgagactctccttgatgccctctcagcgcaatcggccgtgaaggccgacagacctttcatctgtgggtatggagcaagcctttgctctgccaaaccggtcaggtcacggtaggaaccggccgatgccttcgcggatacaagcgaggatttcgtcctgccgctcctcaagacgggacaccggcccgccgacgccgaggacgaggttgcgtccgaagtcacgctttggcaacaggactgcgatcacgccggcatcctgaacgatgatgtgttttgagaacatgtagccgtcgcgccggatgccgttaacgatcttcatcaacgcgttcagttcgaagtgctcctcccgcgggcaaacggcgttgatgcgacgcaggagcctttcaatctcgacgtcagtatgaccactgagcagcgtgcgtccgattccgctgatcgcaagcggcctgacatcccctggcttcacttcgaagcgcaggcgcttgctggtttgcagggcgtgaatgtattgtgcatgcagatcggactgtgtgctgatgctgacgagctcgtcgagtctcccatggacgaaatcgacgagcgcaaggatggcgctgtcgccgaagagcccggtgtccagccatcggcccatctgcgcgatgcgcatcgtcggcatgtaggtgcgattgtagctgtcgtagaacagatatcccagcatcgccatgctcttcagcaaggccgcggcacttgacgtcggatagccgcacttcgtcgcgacttccttcagggaaatcggacgcttcacatcctcaaagtattcgagaacttcgaagatccgcttggccgacttgatgctggaatccatcatttacacgtaggtggaagtaaattccggggcgcggaccaatacctcgatatactcaaagggccgcctgcgcgaagccgcaaactagagccattcggcttcattcgcaaacctgttttccatatatatgtaaatagaactacatatctgtaatagatggactccaggccgcgccgctcctagtgttctttcaggccgataggccgcggcgtcgtggccgctcaaaaaacaagacgtcccaccacaggtgggcgcgctgcagggagacgtcatggagccgggaatgaatttttctgctgcgatcaactgatctcgacaggtcgtgcaccagctcctcgtcgccacgtcgaagctccccgcgaccattctccttgagatcactcatctcgtttcacgacggcgacactggccaggccactgtgcgcagcggcggtaacaccttctcaaaactgaacagggatttgcggcatggattatcgattgcctgaaggcagctgcgattgtcattttcacatctacggccccttcgatcggtttccgcccggaaacgaaggtcgctttaccgctgcaaaaccattcacgatcgaagacgccttcgccatctgggatgagctcggtatcacgcgtggggtcatcgttcacgccgtgggatcgggcgaagacaacgccgtcacctacgacgcgctgcatcgctatcccgacaggcttcgtgccgtcgcaatcctgcggcccgacgtttcggatcaccggctcgatgaactcaccgacgccggtttcagggcggtgcgcgtcaccatgatccggcaggacggcaaaccggtctcgacactcggcaccagctacgacgatctggtcaagctcgcccctcgcatcgcggagcgaggctggcatgctcagctctggatcgagagttcggatctggcggccgccgcaaccgagctcgagaagctgccgctgaactacgtgatcgatcacatgtcgcggaccatggccgacaagggccacgatcatccggatttccgtgccttcaccgatcggctgaagaccggccgttactggaccaagatctcgggcgcggaccgcaacacgcgtatcggccgtccctatgcggacacggcacctttcatgcgcgccatcgttcaggctgcgcccgatcaggtcgtgtggggcagcgattggccccatgtcggccacagcgccgagacgatgccagatcttcaggatctgcttcgtctgctgcacgaatgcgtccccgacgaagccactcgccgaaagatcctgatcgccaatcctgcgcgtctctacaacttctgacagaaccgagggtaccttggacaacagcaagaagctgccgctcgaaggcgtgatcgtcatcgacctcggccaggtttatcagggtccgtatgccggcttcctgatggcgcaggccggcgcgaccgtcatcaaggtggagccgccaaacggtgagccggtgcgtcatcgcgcccgcatcagcaagggcaacgccgtaccgttcgctatgctcaacgccaacaagcgcaacatcagcctgaacctgaagtcgccggacggagccagagtcctgaaggagctcgcctccaaggctgacgtgctgatcgagaattatgccccgggggtgctggatcggctgggcgtcggctatgccgcgctcagcgccgtcaatccgcggctgatctacggctcggcctctggctacggcctgtcgggtcccagccgggacaatctggcgatggacctgaccatccaggccgtgtccggcatcatgagcgtgacaggctttgccgatggtcccccggtcaaggcggggccagccatcaccgacttcatcagcggcgtgcatctttacgctggcatcctcaccgcgctctacgaccgggagaagagcggccgcggccgcctggtcgagatcgcgatggtcgaggccgtctatccggcaatggcttcgaacctcgctgatgtcttcaaccgcaaggccgccgccccgcgtaccggcaaccgtcacggcgggctcgcggaggcaccctataacgtctatcccgcatccgacggctatgtcgccatcatcagcgtcaacgagtcccactggaccggactgacgcgcgcgatggggcagccggaactggccgacgacgcgcgcttcaagacggtgcttgaccgtttgaagcacatcgacctgaccgaccagatcgtgtccgactggtcttcgcagctcacgcgcgacgagatcaccgagctctgccgcgtcaaccgggtgccttgcgccgcggttcgcgacctgcgcgaggtgatcgaagacaagcatctccacgtccgcggcatgctgcgcgagatcgcgcatcccgaatacggcgacatcctcgttcatcgcagtccgctggtgctgcacgataccgcggcgccggactacgtcccgtccgcgcgtctcggtcagcacaatggcgaggtgctgtcgcaatatctcggcctgtccgacggcgagatcgatgcgttgcgccgcgctggcgccatcgcacaagcatgacgaacgtcacggggcgaatgccctggtccgcgaattcagggggagatcacaatggtcaagctgtttgaaagcattgcattccgtggcgtcgagctgagcaaccgcatcgtcgtctcgccgatgggaatgtattcggccgagaacggctacgtcacgccgttccatctggttcactacggcaagttcgccatgggcggggccggcctcgtcttcgtcgagcagacctcggtcacccggaaagggcgcatcaccaacggcgatcccggattgtgggaagacggccagatcgacggcatgcgtcagattgttcaagtcatcaagtcgcatggagccaaagcggcgatccagatcaatcacggcggacgcaaatccagccagcagcgcgcattccggggcaatagccatctgaccgatcgcgatatcgagatgggagaggaaacctgggtgcctacgggcccatcggatgtcccgttctccgaaggcttccagactcccattcccctcagcaaggaaggccttgttggcgtgcgggatgcattcgtggcggcggcgcgccgggccatgcttgcgggcttcgacgtgatcgagctccacatggctcacggctatctcctgcaatcgtttctatcaccactcgccaatttccgggccgatgaatatggcggcagcctcgagaaccggatgcggtttccgctcgaagtgacgcgcgcggtgagggctgcgctgccctcctcgacgccgctcttcgtacgcatctcggcgacggactggattgatggaggctgggagatcgaggacagcatcgtcttctcccgtaagctgaaggaactcggcgtcgatctggtcgactgttcgacgggcggcaatcttcgcgccggatcgaccaatgccaatcttggtcgcggtccaggctaccaggtcccgtttgccgaacgcattcgccgtgaggccgacattgcgacgggtgcggtcggcatgatcaggactccggatttcgcggagaagatcctgcaggacgaccgtgccgacctcatcttcatggcccgccagatgctgttcaatccattctgggcgctccacgccgcagaacatttcgggctgaccggcaactttgagaaatggcccgagcagtatggctggtggcttgccaaatggggcggtgcccttcgtgccaatggcgaaagcctggacgggctggagcgataccgcgaggcggccgaatagagcctcacggcgcgggtaactccgcatgatcaattctgacttcaagcatcaaaatttccaaagggagtgaaaaaatgagaagtatgctggcagcgtcgatggttctcctgggccttgcttcggctcatgcgcaggcgcctgcatcgaagccggtcaagctcggcgtgctcaacgatcagtcggggcaatatgcggacgccgccgggcctgcggcggtcgaagtcgccaagatggcgatcgccgatttcggcggcaagctgctgggacagccgatcgagctcactttcgccgatcaccagaacaagaccgatatcgcttcgggcatcgcgcggcgctggatcgacaccgaaaacgtcgacgtcattctcgacatcggcaactccgcggtcgcgctggccctggcggacctcgtccgcgacaagaacaagatgatgatcgtgtcgtcggcgggcgcttcgacgatcaccaacgaaaagtgctctccgaacacttttcagtggacatacaacaccaacacgctcgcgcgcagcacagccaaggcattgatgggccagggcggtaacgaatggttcttcctgacggccgattacgccttcggtcacgcgttcgaagcggatgcttcggccgtggtcaaagcgaacggcggccgggtcgtcggatcggtgcgccatcccttcaacacaagcgacttctcatcgtttctgctgcaagcccagagctccggtgccaatgtgctggcgctcgccaatgccagcggtgatacctccaactcgctgatgcaggctcacgaattcggcttgctcggcctcaagagcaagatgaaggtcgcggcgctgctgtttcagatcacggatgccaaatcggtcggcctgaagaacatgcagggtctgtacacgtcggaagccttctactgggatcgcaacgatgcatcgcgcgcgttcgggaagcggttcttcgacaaggtcggccgcatgccgaccatggttcaggccgggatgtactcggcgaccatgcactatctgaaggccgtcgaagcggccggcacgctcgatactgccgccgtgctggcaaaattccgttcgatgcccgtgaacgacttcttctcggagaagggctatgtgcgcgaggacggcatgcacatccacgattactatctgctgcgcgcaaaaacggtggagcagtccaagggtccgtgggacttctacgacgttgtcgcaaccaccccagccgaagacgccaacattcctcgtgaacagagcaagtgctcgctgatgaagaagtcctgatcttcaaggcgtgatcgacaagccaacgcctgagcggccgccgccttcgctgccgctcaggacgttcaaccccgccggcctgctcttctctcgatcgctggcgaggttggcagcgatgctccggcccgagatgtccgggagcttacgcgtcgctcgaccccgaaatcctctccagccccgcctctatggtcgcgatgtcctgttcgacctgagcgatcgatgaccggcagtcaaagcctggtcttgccttcaggtcgccgaccaagcgccggcgatgcattctcatgtcctccagtgactggcggtccctcagtctagtgaagctatctacaatcaactcgatcgcactcgacatgacacaaccccacattcaagaatctgcatccgtagcgaacggcaagccgaaaccgggaagattatgcaacagctgcctgcggacagtaagatggaacttaggtcaggactgagcgctgatggcttgtcgccgaactgacgcagcggccgccgcgcagtgccataaaggtgcccggccggcgggccaccctcccgcacccctgtttggcgactttatcgcgcccaaactgcactgcagcattcgaaacggcagagcgcacgcgtcgcgagcgaaatggcgattatcatgcgacgaaatcttcgtgaaacaatcggctgctttagttggcccgtccgggcatggcgtttgtatccttagaaattttcacccggggctggattgaacgcaccaaatttttggcacgggaaagggtcgccgagaggcggccctttcttcagttgatccgacgcagagctctcgccgctggcgacgccatggggatcgagccacctcgatcacaccccaaggacatggacgccagtccggaatgagcggatggtacccaaggtccggcttcacttccggctccccgaatcttgtgcttatctaacgacgaatccaagtttggatctcgacgatacgcatcgggggcgggtccatgaccgatcaggcgagagaggctgtgcagcttctgctgaaaaaccgtcaatcggacaaccggcaatcctatctcgtgcgtggccgccggtacgaacagctctctgccgacgatctttccaggctgtgggcggagcagatgagccgctgggccgacgactcgaccgcgtttgatcagagagccctcaacgatcttggggtcgagatggggttgcggcagatggcgccgcctctcgaacagatcgcggcagcaagggagaagatcctcgcgaaatcaggaaaggccttggcggcgatttttgcaggctatcctgagacaaaatagcgggtccgccgcggcttctggcggaaatccctccgcgtggcaaagggcatcgcggcggatggctgatctccgctgagcgcagttgcagagccgcgccgcctgtggtgattgcctgcagggcgtgccttggctcgcctcgtgcacatccgatcgtcgggcaatcaaagacacatgtcctattcagaactaatcaggcagatccaggctcgccgtccgccggcatgggagcttctgggtgtaggaggggtcagctatgatcagctcctgaatcgcgttacgatcgaatggcatgccgaacagcgtcactgccattcggtcgaagggcatcccaagggcggcatcgtccagggcggtatcgttacgggttggctcgacgccgcgatggccaccgcgagcctgttgcacggtgaataccagatcgccgtcgccagtctggagatcaaggtcgcattcctgcttccggcgcatcccggcctgtatcgcacccatggcaaagtccttcggcagggccgcagcatcggcttcatggaggccgagctgcgtgacgccaacgacgtgctcatcgcaacggcaagttcgacggcggctttgcgcgccaagaacccagccgggaccagcccggcgtgatccctgcacggcccgcggccctcaggccgtagagccggtccaattgtctatcaggatcttcctgcggacggtttcgtcagcacattctcgggcttcaccactcgtggtgaagtcgtcagtcgtgtcgcggatcttgcggtcgggacgaacaattcagagccgctatctcaataggcgcgcgcgaagtcaccttcctgcttgatgtcggtgaataccggaaagcgcggcttccatggcgtgcccttggcggtggtcagcttgttcaatcgctccagcacgccgaggccgtccttgcgcagactggccgatactgccgcactatccgggaagttcttcaggacggcatccagccagatcgtgcggccggcgagaaagccgcttgcgccagcagcataggaatagtccagcacgcgctcgaacttttcgggcgcagcgccgccggacagcagcacccagggaatactgcgctcgcggcagatggcgccgatcgcgtcgaactccttctgcgcggccttggcttcagggctgccgtcgcgagccgggaggctgttggccgcaagcgggctctccagcttgagcagatcgacgccatactccggcttggcgaactcgcgcacactgtcgatgacgaggcccggcagcttgccgggcgattccacgtaatcgacggtgtggttggcgctaccgaggaacggatataccagcagctcgaggacgtaaggaatgtcgtaacgagcgcaatcccgtccgatctctcgcacaaatcgcttctggtgctcgttcaccgcggcatcggcgtccggccgataccaggccagcaccttgactgcatcgccgcccatggcgcgaattttctccacactccaattgctgatggcgcgcgacttgcggccgccggcggtctcctcgacacggtgctcttccagggtcatgatcaggccgcagcggggcggcaacagatcgatcgcggcgggcacggcgaagttcgggtcgaacagcatcgagctgcaatgcggcgccaggttctcgacgagaaggcgcttcgccgcagtgacgtcggaatattcgacctgatcccgagtgatgcccttcgccttggcgatagcgtcgaacaatggcggccgctgatcaagcgcgaccatgcgaaagtggccgtccgcgtcagcaagtctggccaggccgcgattctttccgatcgttctcatggtttcgtcctcatgaatgcaagacactcgttgatatcggggattccgttccgcccgccggcgtggcggcatttcatggcggccgtggctgccgagaacgccatggcggcgcgcacatcgaggccggcgccgattgcgagcgcgtaggcaccatggaagacgtcgcccgcgccggtcgtgtcaacgacgtcgacggcataggcggcctgccggtgcagccgtccctgctcgtaccagctcacgccaccctcgccgcgcgtgacggcgaccacgcggcagccgaagcgcgcgagtcccgcgagggatctgtcatcagcggaaccggcataagctgtcagcgcgggctcggagaagatcgcgtggtcggtcagcggcagcagccgctcgaacacctcggcgtcggccatgtcgccgtcgagcaccgtcggaatgccccgtgcgcgcgcttccccgaacagcgttgcggcgccctcgacccagcgcgggtcggccagcacggaggacgcctgcgccaccgcgtccagcggaagccagtccgcagcttccggataaagaccgcgaaagttgacaatctgccgttcaccgaggctgtcgacgatgattccggagacggacgaacggccgtcgggaaacagccggaaattctcgacgtcaacgccttcggcggtgaaagccgatgccatctcgtgaccggcggcgtcattccctgcccgcccccagaatgcgacggacgcgccgagcttcgccaccgcgacgctcgcattggccgccatgccgccgccaagcgtgccgtacgcgacggccttgatcttctcgcttccgcccgcgaagggctgctcgacgcgccagacctggtcgagcgcggacaggccgaggcaaatcacatgcacaggcttcgctctggaagcaacctccgccagcgccgagaaatctcccatgtccgctgacgcactcaccgcaagacctgtccacctgcggcatcgaacagatgcatcttgcccggctgcgggcgcagcgtgatgcgatcaccgaccttcggccgcagggccggatcgacgcgcgcgatggcggggccgccggcgagatcgaaatgaatcagcgtgtcggagccgagcggctcgaccagcttgatgttgacagccatgccgtcggccgcatcggcggcgacggcgaaatgctcggggcgaatgccgagcacggcgctgccggcttggcggaggcggcccgcagtctcaccatccagcggcaccgccgctccgccttgcgagaggatcgctccctcgccactccactccaccggaaagaaattcatcgcgggcgagccgatgaaaccggcgacgaactggttggcgggccgctcgtagaccccctccggcgtatcgtattgctggatcgtgccgctctggaggaccacgatccggtcggccatggtcatggcctcgatctgatcgtgggtcacgaagaccatcgtggtctgcagctcctgcgacagcgccttgatctcggcgcgcacctgcccgcgcagttttgcgtcgaggttggacagcggctcgtcgaacagaaaggccttggggttgcgcacgatggcgcggcccatggcgacacgctggcgctggccgccggagagctccttcggcttgcggtccagatagggctcgatgtgcagcagtgcggcagcgcgcttcacgcgggcgtcgatctcggccttcggcgtgccccgcaactccagcgcaaacgacatgttgtcatagaccttcatgtgcggatagagcgcgtagtcctggaacaccatggcgatgtcgcgctgcgcggcctgcacgccgttgacgcgcttgtcgccgatatagaggtctcccgacgaaatcggctcaagacccgcgatgatccgcagcaaggtcgacttgccgcagccggacgggccaacgaagacgacgaactcatggtccgcgatctccagattgagatcggggatcaccgtgaaattgccgtagcgcttggtgagattgcggatcgagatcgaagccatgatcgctcagtccagcgccagcacaggcttgatcagctcgcccttggcgaagcgggcgaaattctcagggagagccgacaggccgaactcgccgtcgacgaggacgcgatattcatccttgtactcgcgcagcagctcgatattcggctcgaagtccgagaccgggaagtagaaggtacggatcatgtagaagtccttgcgacgaaataccttgccttcctcgatgatccagggcgcggcgttctcgccgacaagcaccaaggcgccacgcggcaggacgagctcgatgccgagattgcgcgccgcatgggcgccggagcattccatgatcagtgcgaaacgcttcgatgtgtcgccgacggggtgggcctttgcgccgaaggattgcgcgatcgtgagacgcgccgcattgggatcgacgacatggacgtcgtcaaagccgagcgcgcggagcgccagcacgactccgagaccgacgggtcctgcccccatcacgagcaccggaccagcctcgcgtggcggcaccacgcgactgacgaagcgcacggcgtggccagaggtaccgatggtatcgagcagcagcggcgccagactgtcctcgatgtcatcgggcaccggcaggaggcagttttccggcaccgacacatattcggcatatccgcccggcctgttccagccgatcaggctggagacttccaggcacatctgggtgtcgccgcgcttgcacgccgcgcagcggtcgcaatgcaaggggatatagacggcgcaacggcggccgtgcaggcggtggccgggttgctcgacgacgccgaagatctcgtgaccggcggtgaactcggcacccttgtgccagagcttgaagtccgaaccgcacaaggcggtgcgcgagacgcgcaccagcacctcgccggcgccgacgtcgggcatcgccacgcgctcgatggtaatgcggtcattgccgtggaaaaccgcggcctgcatgatcgaattcggatggagggataggttcatcggattcagcctttcaccgcgccgagcgtcagtccggacaccagccagcgctgaacgagggccgcgagcaccagcggcggcaatgcgatcagcgtcgccgcggccatgagggcgccccattgcgtcgagccctcgccgatgaagttgaaggccgccgcgatcagcgtcttggtgtcaccattggacagcaccagcgcaaacaggaagtagttccacgaaaacacgaaggcgaggattgccgagaccgcgatcccggacgccaccagcggcatcgcgatgcgccagaggatgcgcgtgacactgcacccatcgacctgcgcggcttcgaagacactgcgcggaatggcgtcgaaagagggcagcagcacccagatcacgattggcagcgtgatgacggcatggctgaggatcagcgcggtgtaggagccgatcatgccgatctgccggaacatgacataccacggcagcaggaacagcgtgcccggcgccatgcgcgccgccagcgtcagtatcgccggccacgaaatccgcgtccaggagacggcgaaggcggcgggaatcccgaacagcagtccgagcgcggtcgagccgacggtgacgatgagactgttgagcgcgtagctcaggaacggcgtggtcctggtcagctcgtcgtaattctcaagcgtcggcgagaagatcagcgtcggtggataggctgtgacttcgaaggaaggcttgaacgacgacagcaccatccacaccgtcggtgccatgatgagcaggccggcaagcacgagctgtagcgtgttgagccagcggatccagcgatcagtgttggcggcatcgctcatgagatcaccacgccactgcgccgcggaggcggttgaaggcgagcacggcgccgaacacgatcgccgtcagggtcaacatcagggcactggcatagccgatgttgaagaactcgaagccgacccgaaagccgtagatgttgagcgtgttggaggcgttgcccgggccgccctgggtcgtgatgtagatgatgtcgaagaagcgcaagaggtcgacgctgcgcaggatcgctgcggtgacgatggtcggcagcagcagaggcagcgtgatgcgctggaacgtcttgaacggggaagcgccgtcgatctgcgcggcctcgtagacactcggcggcagcgactgcaatccgcccaacacgatgagggcgacgtatggcgtccactgccagctgtcgatcagcgcaacagtgggaatgacccatgtcggcgaggccagccagtccgacggcggcaggccgagcgattgcaggatgtagttggccgcgcccagcgagggatcgaggatcaccagccacatcatgccggccacgacaggcggcatcatgaagggcgagatgaacagcgagcgcacgatccccggcagacgcttggcatggaacagcactagcgcgagccagacgccgaacacgagctgcagcgcgagcgacagcacgaacagcgcgatggtgatccacagcccgtgccagaactcgacgtcggagatcagcttggaataattggcgattccctcgaaagactgcttgccggtcgaggcgaatgtctggaaaccgagccagatcgtatagacgaccggaaatgcgatcatcgcgaccgtgaacagcacggccggcgccgagagcgccgccatctccagcttctgccggtcctgcgtgaatgtcgcagccgtgtccgacatgcgtccttgtccccggggagtgaagagccggcaggcggcaagcccgccggcatgaggagtttacttctgagcgatcaacgcatcgagcgccttgtcggcatcggcgcaggcctgatcgaccggcttctgcttcaggatcaggtcctgcaccgcctggccgatgaattcgcgcgattccggattggcgacgatgggatagccgacctcggaggatcccttggtggcgagcacgtcgagcgccgcctgccattccttgcggaccggctcctcgtcgatccacttgcgatattcaggatccttggccaccgacgggcgcggcggggcgatgccctggagcgccatcttcttctgcacttcggggctggtggcccattgcacgaagtaccaggccgcctccggctgcttgctgtgtgaggacacggccaagccccagccgatcgtggtcggcacctggccagcctcgcctgccgggaacggcagcaggccggtgtccttcagccgcgcaccgccgtccatcaccgtgcgcagttcgttggaggattcgaacgccatggcagcacggccgctgcgatacagcgccgaaatctgctggaagctgtagttgacgacgccgggcggcccgaagtcgcgcagcagccggctataggtgtcgagtgcttccttgcccttggccgagcacagattcgacttgccgttggcgatgtacgtgcccccgatgttgtgcagcatgttgctgaacgtgtaggcgaccgcgggcttgaggccgcgcgatacgaacggcgttaccgtgctgtcgcaggtcttgatcttctcggcggcggcttcgacgtccttgatggtcttgggcgcttcgaggccgcacttcttgaagatgtcggtgcggtaatagaagatcggcccctcgatgttcatcggcatgctggtcagcttgccgccgaaggtcgcggacttaagcaaggcctggctcaatccgctcggatcatactccttggcgacctcgttcttgaccatcgcggtgagatcgccgtaccagccggcggcggcgaactgctcgccctcgcgcgagggcagcgtcatgaacacgtcgacctcgtcgctgttcgcattcatcaccgtgaccagacgctggcgcatctgctgttcctgataaccgtcgaccttcagggtcatgccggtcagcttctcgaaatcagccttgtaggtcagcagcgcctgcgagaccggattgttgttggcgagaaaggtgatcgtcttgcccttgaacttcatccagtcgaaatcggcagcctgcgcctgcgcgctggcggcaatgacgagaacgggcagcgcgacatgggtcgcgagcatcctggccttcatcgaactctcctcccggctggccgccttagccggcggaccattttgacacgtttgaacacaacttgaaaacggttacaaaatagacctcacatccgccatgtcaagcgatggacaagccgcacaatctgcggcagattgcgattaattccacgatctgaccgctcgcgccgcgctttgtaacgttacattcatgcgactgaccaacgccacctctgtgaacaaatccgtgaaacagggcatccgcgccgtggcggcccgcgccggcgtttcgaccgcctcggtctcgcgcgcgctcaacaatccggatgcggtcagcccgtctctgcgtgcgcgcatcgaacaggccatcgatgcgctcggctacatcccgcatgcgcccgcgcgcatcctgtcgtcgcgtcgctcgcgcacccttggcgcgatcgtgccgaccatcgacaacacgatgttcgcgcgcggcatcgcctcgctgcagcactatctgtcgtcggtcggatacatgctgttcctcacaacgagcggctatgatctcgatgtcgaattgcagcaggcgcgcaacctgattagccgcggcgtcgatggcctggtgctgcgtggcgattgccatcacgacggattgcgaaagctgctcgcggacaacgccgtgcccttcatcaatgtcggtatctaccagcccgacaggccctatccctgcgtcggcaccgacaacgaagcggccgctcatcgcgccgccgcgcatgtcatcgagctcggccatcgccgcatcgggatcgtctcggcgctccagcgcaacaacgaccgcgccagcgcccgcgtcgccgggtttcgccgcgcgctcgccgagaacggactcgagttgcctccgcaatggcatgtcgaggtgccatatacgctcgacgacgcccgcgaggcggcccgctatctgctgaacctgaaagaccgtccgacagccgtagtttgcggcaacgacgtcatcgcctatggcgtgctgctcgaagcggagcgcgacgggttctccgtgccgcgcgacctttcagtggtcggcttcgacgacctcgactggagccggcatttgcggccgagcctgaccacgatccatgttccgaccggagaaacctggcagcgcgccggcgaatatctggtgcgcagcctcgccggcgagcagaccatcatgcacagagaggtcgacttctcgcttgtggtccgcgaatcgaccgccccaccgccgaaatccccgaagtgagaccttgccgatgacttcgaatttttctctcgcccccggcttccatgccgtcgtgattggcggcgccggcgacattggcgccgcgatcagcaatcagttttgcgatctcggggcgactgtgacggcaacaggcgccaacgaggccgatctcgcccgcacgctgctgaagccgcgcgccggcctcaccctggcgacgctggacgtcaccaatgacgcggccgtcacgtccttcgccgggaagcacacgcgcgtcgacgcattggtcaattgcgccggcatcctggcgcgtgacaaggaattcgagatcgaaaccttcatgaaggtgctcgacgtcaacctcaccggcacgttccggacctgcatggcgttccacccgctgctcgcggaagccaggggctcgatcgtcaacatcgcgtcgatgaacgcgacgcttgcgctgccacgcatccccgcctattgcgccagcaagggcggcgtcgtgatgctgaccaaggccctggccttgaaatgggccgaggacagcattcgcgtcaatgcggttgcgcccggctacatcgaaaccgccatcaacgccgcgggccgcgctgaccttgcgcattaccagcggatcgcggaccgtaccgcgttcaagcgctgggggaagcccgaggatattgccggcgcggttgcgtttctctgcatgccggcgtcgcaatatgcgaccggcactgtcattgctgtcgatggcggctttctcgccggttgacatcgcggaagcgccggcggccatacggtgactgagacgcaagcggcacatcgtcaccttcacaccatctctatcgaaaagcgcatccggacttccaaggctgcgcgatgtctttccaagagcaacgacgcacggcgactttgccgcggttcacttgctatagcgttcaggcaaatgttcttaatgcttcccgtagatgatggttgcttcggcacggcacccgttcacacttttcgcccaacggatgtggcctgcacaatgtcgccggaaatgtctgggaatggtgcgaggagcattcttcgccaagctatcaccgcctcacaccgtcgcgagaccccttgaaccgcgcgccagctcccaaccgatcgatgcgtggcggatccttcctctgccacgaatcctgctgcaaccgctatcgcgtcacggcgcgaagctccaatacgcccgattcctcctcgagcaatatcggcttccgcgtcgtgcgcatcgagccgctgcgggatccctcatagaatggaaccggcaccacatcctgcgaggccgcccgctgcccccggcatccggctactgccactgttcctgcgcaatttcgtgcgcaatcgcgagaccggccttgtgctggtcgccatcgtcgtcggactgctcagcggcgtgctcgtggcagcgatctcgaacctcagccaggtctcccacgcactgctgttcgacattccgttcgacgcccacctcagcgcaaccggcgtgatctcgtggcagcgcacgctgcttgttccggtgctcggtggcctcgtgcttgcgctgatcggactttacttcgcccggcgcgtcaagggacagcagctcgccgacgccatcgaggccaacgcgctctatggcggccgggtgtcctttcgcggcagcttgctgatctcgatccagacactgctgtccaacgggttcggcggatcggttggactggaagccggctacacccagatctgctcgatgttcggctctcacgtcggccagcgcctggccgcccggcgcaatgacatgcggctcctggtggcctgcggcgccgcgggagccatcagcgccgcattttctgcaccgctggcgggcgccttctacgccttcgaagtcgtgctcggtgcttacacgtctgccgctcttgtaccggttatcgccagcgccgtcaccgcatggctcgtcgcacggcaactgacgcaccagtccttcctgatggtgcctggattcccctcaccggtttccgtcgaaatgatcggccagacggtgctgatcggcatcatctgcgccttcgtaagcatcctcgtcatgctcgccgtcgcattctccgagcgctgctttcagcgcatcacggtgctcaagggcctgctgcggccgattctcggcggcttcctcctcggctgcctcgccttgctgacgccgaccgtgctcggcgccggccacggtgcgatgcagattctgctggtcagcaatccgacttggctcctgctcacaaccaccatcgtgttcaagatcctggcctccgccatctcgctcggctcgggctttcgcggcggcctgtttttcgcctccctcctgctcggcgcgctgatcgggcagctctacagtgtcgtgctgacaggcctccttcccacgatcgcgcttcagcccggcaccgccgcgatcgcagcgctcgccgcgctcggaaccggcgtgctcggagcacccttcagcatggtctgtctcgcgctcgagatcaccggcgatttctccgtcaccgttggcgcggtggtcgcctcctcggtttgcgcgctgatcgtccgtgagctgttcggctatagcttcgcgacctggcgctttcatctgcgcggcgaggcgatccgcggcccgcaggacatcggctgggtccgtcagatgagcgcagcatccctgatgcgcaccgactttgagaatgcgctgacgacgatgccgatcggcgaggcgcagaggcaattctcgccggcgctggtccgccagatcgtattgcgcgatcctaacggcatctatgcgggtatcgtgcctgccgccgcgctgcattccgtgtccaaccaggacgacgaactcctcgggtcgctggcgcaacaacaggatgaatacctgcttccgaccacgccggttcgcgagatcctgaaggccttcgaacgcagcgaagccgacgtgctcgcggtcgtcgaccgccccgaccaccgcgccacgatcggcaccctgagcgaagctcacgttctgcgcacttacggcgaagagctcgagcgccggaaccaggagctgttttcgcgttgagggcgctagggccgcagatccatgtcgatccgcacgaagtcgccgcgataggtgacttcgccgagatagatcacggtgcggtcctgcgtggtgaagatgcggcggacttcggccactggcgagttcaggggcacgtgcagcagccgcgccgcctcgatatccgcggtaccgatcgtcagggtctggcgcgcgctggcgatggtgggatccctgagatcgttcaggatcggaatcacggtctcgttgcgaaaacgcttcggcgacctgcgaaagatcctctcgtcgagatagatggaaatgacgcagtagggctgcttctcccgcgaatgcagccgacgcatgaaaacgtacttttcggccggcttgccatccccgggaagcagcggcgcatcgctgcggctttccgagatattgatgatctcgggcgaggtgtcgcgatacatgtcggcgagatcggacaacgtggtctcgaccttgagccagcgatcctgccgcacggtccccgtgacgaaggtgcctcggccctgctgcgcctcgatcacgccgtcgcgggcgagcagctccaccgcctgcctgatcgtgacgcgtgacacaccgaactcggctgccagctcctcgttggccggcaggcgaaatccctgagtccagacgccgcgcgcgatgcgctgccggaagatgtcggcaatctgcgcgtatttggggatgtgactgtcggaacttaattccatctcgtcctcccgaactcaggccgcgcggtcacgccgtgaccagcgcggcgccacgttcgccgatcatcaggctggtcgcattggtgttggctgaggtgatccgcggcatcaccgaggcatcgatcacacgcagccgctcgacgccgcgcacgcgcagctgcggatcgagcacggcccccgcatcccggcccatgcgacaagtcccgacacagtggaacacggtaccaccagtgttgcgcgcaaattcccacagcccggcatcatcctttgcggcctcgcccggcaccatctcgacgtcccagagcgtacgaaacgctttctgctgatagatctcgcgaagaatcttcaggcccgcgacgatagtcttgcggtcgatctcctcggcgaaatagttcggtacgatcctcggctgttcaaacggatcggtcgagctgatcgcaagctgtccgcgcgattttccatggcactgccagaccgaagcggtgaagccggaatagctgtgcaagggctcgccaggcttgtcgaccgagagcggcatcacgttgaactgcacgtccggccggccgccgacggcgtattccgtgcaggccgcgccgcccacctgcccggcgccgaccgtcaacggaccactgcctgccaccatccactgcaagcccatcttcgcaaggccgacgggattgcggacctggtcgttgagcgaaattcgctgcttcaggcggacgatcagtcgggcctgataatggtcctgaagattggcgccgacttccggagaatcggcaacgatgggaatgccgagcttgcgcagcaggtcggccggaccgacgccggaaagctgaaggatctggggagactgcagcgcgccgccggatagaatgatttcacgatcagccgtcgccctgtggacctgtcccttgctgatccattcgacggcggtcgcgacgcgaccgttgaagacaaccctgctgacctgtgcgtgggtgatgatggtgaggttggggcggccggcgatgggacgcagaaatgccgaggcggaactggtccgccagtgccgcccgatgccgagctggtaggtgccgacgcccagcgtcgtggcgccgttgaagtcgggattgcgcggcaggccgaactgcacacccgcctcgacccaggccttcgatgccggattgtcgttgcgcaggtcggatacctcgaactccccgagcccaccatgaaactggctctcgccaccgcggtagcgttcgtggcgtcggaaatagggcaggagttcgcgatagctccagccatcggcgccaaggcgctcccaatcatcaaagtcctcgtgctggccccggatgaagatcagcccgttgatcgacgaggagccgccgagcacgcgaccacgcggccagacgatggctcgaccgccgctcccttccgaaggctcggtcctgaacaggcgcgagtatcgctggttatagatggtccggtagtagccgaccggaagcttcaaccaaaaattgcgatccgatccgccggcttccagcaacagcacgcggcaggacggatcggccgacaagcgattcgcaaccacgcagccggccgagccc

SEQ ID NO: 279 - DNA, 38055 bp, Bradyrhizobium colbertium
  misc_feature (33249)..(33258): n is a, c, g, or t
tcggcagcgtgcctggactgaccagctcgacggcgccgctgagtttcgtcacggcgcgcaagctggctgcaatctcttcgcccagcgcgtcgtttgcggccgccgtttcgaccctcagcgtcattgcgtctgtttcgccttggcgcgtcacgacgaggcgcagtcgtcccagcgaggaatggcgcttgctgatctcggcgatctgctcgggccggacgaacatgcctttgaccttggtggtctggtccgcgcggcccatccaacccttgatccgcatatttgtgcgcccgcatggactggtgccgggaagggccgcggtgaggtcgccgagcgcgagccggatccagggatggtgggggtcgagcgatgtcaccacgatctcgccgacatcgcccggcgccaccggatctccggtacctggcttgacgatctccaggatcaggtcctcgttcacgaccatgccctcgcgcgcctcggtttcgaaggcgatcaggccaagatcggcggtcccgaaggcctggtaggcgttgataccgcgcgccttgatctcggcctggagcgagggcgggaatgcggcgccggaaaccagcgcgcgcttgatcgaggagatgtcacggccggcacttgccgcggcatcgagcaggatcttcaggaaatccggcgtgccgctgtagcccacaggacgataggcttcgatcagctcgaattgctgctcggtgttgccggggcccgctgggatcacggcgcagccaagcgcgcgtgccgacgcatcgaagatgaatcctccgggggtgaggtggtaactgaaggtgttgaggacgatatcgtcggggcggaacccggccgcgaacagcgcccttgcgcctcgccagggatcggcctgccgcccttcgggctcgaagatcggaccgggggaggtgaagagacgtgcgaaagagccgggagggcacgccacgaagcctccgaagggcgcagaggccttgtgcagggcgggcagttccgacttgcgcaacaccggcaggcccgccagagccgctctggaggtcacggaggccggatccaaacccttgagccgctcggcataggccggggcggccatcgccgctcgcagcacctccggaaggcgggcgaacaggtcggcttcccgcgctgctggctcccgcgtctcgcgggcgtcgaaatgagcgatcatggctattgtttccgtgttggcatccgttgcgcgccgccaccggcatggctatcagaccgccatcggctaggtttgaagagggcctgatggcggacgaaggactgactgcggcggacgaggcgacggacgtcgtggcgcgcctgaagcgccgcatgatcgacgaggctctgccgctttggtcgaccgtcggctgggaccacgccgccggcggcttcatcgaccggctgcaccgcgacggcacggcggacgcagcagcgccgcggcgcgtgttcgtgcaggcccggcagatctggtgctatgccaaagccgcacagatgggctggtaccccgaggggcgcgcgatcgcgctgaaggggctggcgcatctgctggccaaagcgaaatcgccagacggacggcccggctatgtgcaccggctgacacccgagggcgcggtgctggacgcccggcgcgatgcctatgatcacgctttcatcctgtttgcgctcgccagcgtctacgcgctcgaccaggatgcgcaggtccgcgccgagatcgaagcgctgctcgccttcctcgacggacacctgcgctcgccccatggtggcgttcacgagggccttccggtttcgctgccgcgccggcagaacccgcacatgcatctgttcgaggcgatgatcgcgtgcttcgaggcgactcacgatctgtcgttccagaaccgggccggagaattcttcgcgctgttcctggccaatctctacgacaagcagaagcgcatcctgacggaatatttcgaggaggactggtcgaagatcgagccggtcagcgtcgagccgggacatcaggcggaatgggtgtggctgttgaagggcttcgagcgcatcaccggctgcccgaccgggcagcggcgcgcggagctgctcgccaccgcgctgcgctatcgcgacgaggcgacagggtgcctgatcgatgaaggcgatgacgtcggcaacatccgccgcagcacgcgccggctgtggccgcagactgagatcgcaaaggcgtggatcgcgcaagccgagtccggcgaggcgggagcggcggatgaggcacgtcgggcgctggtgcggctcgaacggcattatctcagccatcccgtcaagggcggctggttcgaccagttcgatcgcgacggcaagtcgctgatcgacaccattcctgcgtcgtcgttctatcatgttctctgcgcggtcacggaggcggagcaggtgcttgaaaattgaagctctcttgtattgacgcgttttcttcacgcgaaccggttcccacttcgcctgaaaacgctacagccagcgcttgcgccgcttgaagctcttgaggttcttgaagctcttgcgctggtcgccggcgccgccgaggtaaaattccttgacgtcctcgttgtcgcgcaattcgtccgcgctgccgtcgagcacgacctttccctgttccatgatgtagccgtggcttgccaccgagagcgccgcgcgcgcattctgctcgacgagcaggatggtaacgccgaggtcgcggttgatcttctgaatgatcgagaacacctctttcaccagcagcggcgataagcccatcgaaggctcgtccatcaggatcatcttcgggcgtgccatcagggcgcggccgatggcgagcatctgctgctcgccgcctgagagatagccggcaaggccggtccgctccctcaggcgagggaaatagttgaagaccatgtcgagatcggcttcgacctcgcgatccctgcgggtgaaggcgccgagcttgaggttctccagcgatgtcatgtcggcgacgatgcgccgcccctccatcacctggaagatgccgcggcgaacgatcttgtcggggtcaatgccgttgatccgttcgccttcgaacaggatctcaccgcgcgtgacttcgccgtcttcggtcttgagcaatccggagatcgccttcagcgtcgtcgactttccggcgccgttggcgcccaagagcgccacgatcgcgcccttcggcacgtccaggctgagaccgcgcagcaccaggatgacgtcgtcatagacgacttcgatgttgcgcacggcgagaaggggtggcgcagggacgatgctggcggagggacgggtcgcttccgtgatttcggtcattgggtatgccgccaatccgtgactgtcgtgatgcccgggctggtcccgggcatccacgttcttcgtgccgcgtgttcagacgtggatggccgggacaagcccggccatgacgtcggagacttcgatcaccagcccagcaattccggcttgcgcggcagctcgactgtcttgaccttctcgagcttgatcgtgcccttggtcatgagatcgttcagatcgccgtcggtcgcacccgacaccttggtgcgatagagatcgaccttcagcgtgccgcgatggtccttctccgtccaggtcgagggattgcagacaccttccattccggccggcacccaatccttcttctggtggaagcccttggcaacgttctcaccggttgcgccaccgttcttggcggcccactcgatggcctccttcatgtagagcgacgagcagacggccgcgacgtagtgcacggggcgatagaccttgccggtcgggtcggacatcttggagatctccatcaccatcttcatgccgggtgcatcgccgccccagctcaccgcggtccgcagcgggaagatcacgccgttggcggcgtcaccggccgtcttcgcagcgttctcgtccatgccccaaacgttgccgaggaactggatctcgacgccggcggtcttgcaggccttcatcaccgagatgttggatgcagcggtgttgccgagataggcatagttggcgcccgaggatttcaggctcaggcattgtgcgctgtagtcacccggcgcgagagcgaacaccagcggcggcagcacctcgaagccgagctcctgcgccatggcttcaccggcagccttcggcgcgttaggataggggtgattggcgcccatatgcacgaatttcggcttgccggacttgcccttggccttccagtcctccgccgcccacatcagcatcgcacgcagcgcgtcggaatagctcgggccgtagaagaagttgtagggcgcgggcttggccttgccgctgatgccttcgggatcggtgagggcggcggcataggacccggacatgtcggggatcttgtcctgagcgaggaagccggtcagcgcctcggtgtcggcggtgccccagcccatgatcgcggcgaccttggtgtccggcgccgaccatttcttatagagcgcgatcgcgcgcggcacctggtatccgtagtcgttggtatcgacgttgagctgcttgcctccgacgccgccgttcttgttgacccaggcgaaggtatcggcgacggcctgcccatagggcgtgccgacgtcggaagtgccgccggaatagtccgcaagatgcccgatggcgatctgtgcctgcgcgccggccgagaaagccgcgatcgcaagagcgagcgatgctgtgctcaaaagtgactttgtcttcatgggtcggtcctccttgtttattgtttaagtgaagttgcccgcgctcaatgcgagaacgggtagagtttccaatacgccttgatctgccgccagcgatgcgcaaggccgtcaggctcgaacatcaggaatgcgatgatgatcaccccgatcgcgatctcgcgcagaaaggtgatgttgttgttgagcgagagcgccttgtcgatcgcgccgcccttgagatagtggctggcgaactccatcgcctcgggcagcagcaccacgaaggcggtgcccatcagcgtacccatgatcgatccggtgccgccgatgatgatcatggccaggaacaggatcgagcgctcgatgccgaagccttcctgggagaccacgagctggtagtgtgcgtagagcgcaccagcgatgccggcgaagaaggcggcaagcccgaacgagagcgtacgatacttggtgagattgatgcccatgatctcggcggagagataatggtcgcggatggctaccagcgcgcggccgtcgcgcgtgcgcatcagattggttaccagaacgtagctcgccagcacgtaggccagcacgacgtagaaatattgccggtcgccgcgcaatgtgtagccgaagatcgagaacggctcggcgctcgccggcaccgagccaccggagaaccattcggcacgagagaagaagtcgagcaggatgtattgcgccgcgagcgtcgcgatgacgaggtagaggcctttcagccgcgcggccgggatgccgaagatcagtccgacaagcgcggtgacgaggcctgcgagcggaatcgcgaagaacaccgggatcggcgcgttgttggagatgtaggccgaggtgaaggcaccgagcaggaagaaggcggcgtgtccgatcgaaatctggccggtgaacccgaccaggatgttgaggcccagcgccgcgatcgagaagatgccgatctggatcaggatgctgagccagtagccgctgaataactgcggcgcgaggcacagcagagcaatgccagcgatcgcgaagttgcggctggtggtggtcggaaagatcgtggtgtccgccgcgtaggttgtgcggaagtcaccagcagggatgagggcagggccggccatgggtcagatccgctcgatgtcatgggtgccgaacaggccatagggcttgatcatcagcacaatgatgaggacgtagaacggcgcgatctcgtagagattgccccagtgcaggtattcgctgtcgacatactgcgcgacattctcgagcagcccgatgatgatgccgccgagcacggcgccgccgatggagtcgagcccgccgaggattgccgccgggaacaccttgatgccgtaggcggcaaggcccgacgacacgccgttcacgaccgcaacgacgacgccggcgacggccgagactgttgccgagatcgcccaggccatcgcgaatacgctcttcacggagatgccgagcgattgggcgacctgctggttgaaggcggtggcgcgcatggcgaggccgtacttcgaagcgcggaagaaccaggccatgccgatcatcatcgcgaccgacacgacgaggctcatgacatagacggtctggatctggaggccgaacaggctgacggactggctctcgaacacgcgcggaaacggctgcgggttgacgccgaacatccattttagtgtcgcctggagcacggtggacaggccgatcgtcaccatgatcacggagatgatgggctcgcctatcatcggccgcagaatcaggacctggacggcgatgccgaacataaacatgaacaccagcgtgatcggcatgccgatccagaacggcacttggtatttcgccagcagcgcccagcacacccaggccccgaccagcagcaattcaccttgcgcgaaattgacgacctgcgtcgccttgtagatcagcacgaacgacatcgcgaccacgccatagagcgttccgaccacgagaccgttgaccaggagctggatgagaaaggcggtgttcatgccaattgacccaattcgtcattgccgggcttggcccggcaacccatcgacgcggaagaaagcgtgttcggaagtggatggatgcgcgggtcaagccggcgcttggcgattccttgtgtcactccgctgcctccgccatgtgcccatgcccgccgagatccaccacacggagcgtggtgcgcacccgctgcgtggtgccgtcctggaagcggattgcggtgtcgacggggatgtcggagacgccgcggtagatggcgtcgatgatgccctcgtatttctcgttgatgacgctgcggcggacctttcgcgtgcgggtgagctcgccatcgtcggcatcgagctccttgtacagcagcaggaagcgcgagatgcgctgggccggcggcagcgtggcgttgacggtctcgacttccttccggagcagcgcgtagacctcgggccgtgaggcgaggtcgctgtaggtcgtaaacgacagtcggttcttctccgcccatttcgagatgatggaatagcggatgcagatcatcgccgcgagcgcgtcgcggccggcgccaagcaccacggcttcggcgatatagggcgagaacttcagcttgttctcgatgaattgcggcgagaagcgttcgccgcgcgaggtttcggcgagatccttgatgcggtcgatgacgaccaattgccccttgtcgttgaaatagccggcatcaccggagcacagccagccgtccttgaggtcggcgacgctggcctcgggattcttgtagtagccgaggaacatgttgggatggcgtaccacgatctcgccgacgccgtgaacgtcggcattatcgatgcggatctcgacactatcggccatcggcacgccggtcgtatcggggtcgaccttgccctcgggatgcagcgtgtacgctccaagcaactcggtctggccgtacagcgtgcgcagcggcacgcccatggcctggaagaacttgaaggtttcggggccgagcgcggcgccgccggttgccgccgagcgcagccgggtgaagccgaggcggtcgcgcagcgcgcggaacaggatcgcatcggcaaagccggatcgcttgccctgttcgagcgcggcaaggccggacttcatgccgatgtcgaacaggcgctgcttgaacggcgtggcgtccatgaccttggcgcgcacgtcggcggcgatcgattcccagacgcggggcgcgaacagcacgaaggtcggtgcgatctcgcgcagatcgttcatcatcgtgtcgggctcttcgacgaagttgatcttcatccggcacaagaggcctttgccgagcacgtacacctgttccatgatccagggcagcggcagcaccgatacgtattcgtcgtcgggtcccttcgggtcgaaggcgagataggtcgcgcagtggccaagcacgcggcccgccgccagcatcgcaagtttcggatgcgaggtggtgcctgacgtcgtgcagaggatcgcgacgtcctcgcctttcgtcgcatcgaccagcttgtcgtaaagctccggctcgcgcgctgcacgtgcccggccgagctcggcaaacttgtccgccgacatcagcctgggatcgtcatatttccgcatgccgcgtggatcggaatatatgatgtgcttcagcttcggcgcacggtcggcgagggtgagcagcttgtcgacctgctcctcgtcttcggcgaagacgagctgcgcctcgccatagttgaggagataggatgcttcctcgtccagcacgtcgcgatagagcccgaggctgagacccccgatggcgtgcgtcgccacttccgcggcgacccagtccggccggttgtcgccgatgatcccaatgacatcgccacggccgagaccgagctcgacgagaccgagcgcgaagtcgcgcacccgcgtctggtagtcgctccacgtgaagatgcgccacagcccaagatccttctcgcgcagggcgatctcgttgccgtgctccctggcgttgagccggagcatcttgggataggtatcagcctgcgcgacgcggcttgcgtagtccatcatgccgcgctctcctgcgccggccgggcatcgtccggatcgaccagcacctcgtcctcctcgccgagataagcgcgcttgacgtgaggatcggcgagcacggccgcgggatcgccctcggcgatcttcttgccgaaatcgagcaccatgacgcggtgggagatgtccatcaccacgcccatgtcgtgctcgatcatcaccaccgtcatcccgaactcctcgttgagatcgacgatgtagcgggccatatcttccttttcctcgaaattcatgccggccatcggctcgtcgaggaggatgaggcgcggttccaacgccattgcgcgggcaagctccacgcgcttccgcaggccataggagagggtgccggcggtagcttttcgcaccgactggaggtcgaggaagtcgatgatctcctcgaccttgcggcggtgctcgagctcttccttgcgcgcaccggtgagccagtacagcgagcccgtgaggaaattgttcttcagcaggtgatggcggccgaccatgatgttgtcgagcacgctcatgtggtggaacagcgccaggttctggaaggtgcggccgatgccgagcgaagctcgggcgtttggcgtcaagcccgtgatgtcgcggtcctggtagaagagctggccttcggtcggcttgtagcgaccggaaatacagttcacgatcgaggtcttgccggcgccgttggggccgatgatcgagaacagctcgccttccccgatggcgaagctgacgtcggtcagcgcacggacgccgccgaatcgcaaggacacgccgcgcacttcaagactggtagccaccaaacgaatccctcccggtcacggcgcttttttcggcgctcttcgtccgttctgtcgggcgatcctagtacggcggtcgcggtgaggccatgcagcagatggtctcgaccggcgcggcgccactctcgatcccgtttgggcccgagagccgtatcgcccgaggtggctctcaataggggaaagcgctattttgaaatgtctcccggctgacaattctgcgacaaagtttgttgggcgactgcgaccttcatctttggtcgaatggcggtcgaaatcgtcatgctgcaatgcagcagaaggcggagtgacaaaacggtgcggctggccgcgagatcatgatttcagaagatcacctgaagcgcgttgccgcctggtcgcgcgagcttgcgccagcggaaatcgaggtcgcgcgtgccggaatcacggagcggtcctacggcaccggcgaaaccgtgttcatgcgcggtgacatctttggctattgggccggcatggtgagcggccttgcccgcatgggcggggtctcgcgcgacggcaaggagaccagccttgccgggctgacggcgggggcctggttcggcgagggcagtgtgctcaagaacgagccgcgccgttacgacgtggtcgcactgcgcgacagccgcgtcgcactgatggaacgcagtgccttcatgtggctgttcgagaacagcgtcggcttcaaccgcttcctggttcgccagcttaatgagcggcttggtcagtttatcggtatgctcgaggtcaaccgcaccctggatgccaccgcgcgcctcgcccgcagcattgcttcgctgttcaacccgatcctctatccggaatcgaccgcgcatctggagatcacccaggaggagatcggggcgctgtccggcatgtcccgccagaacgccaatcgcgcgctcaaccggctggagaaagaggggctgctgcggctggaatatggtggcgtcaccatcctcgacatcgagcgactgcgcgggtacggggactagcgtgcattggcgggggcgtgcaccggccagaggtcggcgcgccagcgcacggcgatcgccaacatcgcgacgaaccctgcgacggtatagagcgcacccgtcgcggaatagccgatgatgtcgatcaggctgccggccgcgagcagtccgatgggcaggccgtagatcaccatcatgcgcacgcccatgacgcggccgcgcagatgcgcgctcgctgcccgcatcaggatcacggcggccgaaatcatcgacatgctctgggcaatgccggcaagaacgaggcaggccatggctaccggcaaggtcccggcctcgacgaacaccagcagcatggcgtaccaggccagcgttgcgccgatcaaaagccgggcaatgcgtacgccgctgaccaggctgagcgtgatcgagccgatcagagatccgatggcgaagcttgccgagaggtagccgaggccggcctggtcggtatgaaagatgtcccgcgcgatgtagggcaacaatccgccggtaaagggaaatgcggtgagattggcaaggaaggcgacgcacagcgctgcgcgcattcccggcccattccaggcgtagacgatcccttccttgaggtcgccgaataaacgggaaacgaaatggctgtttgccggaagatcggtcgtggtgagggtccttttcggccgggtcaggcagagcatgagaagtgcggctgcgaggtagaggcaggcgatcaccacatacacgagaccgattccgaggacggcaaacaggccggcgcccgtcaacgcaccggcgatccgcgcgctgtcctgggtcgtgcgcccaacgctgatggcggcgaccagctgctccgccggcatgatctcggcaagcagtgcgccccggacgccgagatccgacgggcggatcacgcccatgatcgcgacaatgatcatgacgctcagcggcgacaaatgaccggtcagggccaggaccatgatggtcgacgacagcgccgtgtacgcaagacgcatcgcgacgaggagatcgcgatgaccgatgcggtcgccgatcatgccgaatacgggcgcaaccagtgttccgacgaactggagcgaagcaagtacggtgagcaggagcaccgatccggtttcaaccaggatataccagccgagcaccaacgtctcgatctcgaacgcccacgaggtgagcaggtcggagggccactggaagcgatagttgcggatgcggaatggcgcgagcgcagaacttcgtgctgtgctcaaggcgcgacggctcgtgtcacggcgattccctgcccgtgtgatttcttttcatttcccgcaaggtagggccggcgacgcgcgtgtcaatctgaactgccgcatgccgctcccgcgctgagctcctatctgtcggtcgccggcttccgctcggccagcgttgtggccattgccgagatcaatggacgcatgaaataggcgtcctctggtggcgagatgtcagtgcgcagagcatgcgcagcgagctcaccggagacggccgggccgaccgaggcgatcagcgtgcgctcgagcccggcccgaagacgcgcctcgatgccatgcgccttcgctgcctcgatcaggcggcgaacctggccgagattggtcagggcaatggaatcgatccggcctgcggccatgtcgtcgatcgcggcgacgatgtttgcatccgccgccttggaatcgtagacatagggcagcacggtgtcgacctcggccccttgcgcggccaatgcgccggtcagcgcgctgtggtccttgtccggatagagctgaaggccgacgcgccgtccgttcaggtcgagcttggcaagcatgtcgatcacgccttcggtggtcggtttctcggtggtctgctgcgcctcgagaccgatctcgcgcagcgccttgcccggcttcgggccgcgggtgaatttgcgggtcttggcaagcgccgagacgagggcggagtcgagcccgcgggtgcgggcgagcttcatgatccgacgcagaccttcgcccgtcatcagcacgagatcgtcaaatggctggtcgatcgcacggtggatccaggcttcgaccggggcggggtccgctgcatcgtgaatggtgaacatcgggcactgcacgacctcggcgccttgctcgaccaggagcttcgagaactgcgcctcctcccgcgtttccaggattaggatacggtaaccgttcaagcggtcggccatgggtatgctccggtcagaattcgcaatcgtccgttcatcctgactctgggcgcgggattggcgcaagggcgtggtcgatgctagagcagggcgcaaatcgcagatagttccgctgcacaaaccttcatcgagagccatgcccgaccatcaatatgtcctgaccctgtcctgtccggatcgtcccggcatcgtctcggcggtttcgacgttcctcgcccacaatggacagaacatcctcgacgcccagcagttcgacgacgtcgagaccaggaagttcttcatgcgggtggtgttcacagcggccgacctcgccgtggaattgtcggcgctccagaccggctttgccgcgatcgccgagcgcttcggcatggagtggcagatgcgcgaccgcgctacgcatcgcaaggtgatgctgctcgtgtcgaaatccgaccactgcctggtcgacatcctctaccgctggcgcactggcgaattgccgatgattccgaccgcgatcgtgtccaaccatccgcgcgaggtctatgccggactcgatttcggcggcattccgtttcaccacctgcctgtcaccaaggagaccaagcgcgagcaggaggggcagatcatggatctcgtcggcaagacgaagaccgatctcgtcgtgctcgcccgctacatgcagatcctctcggacgatctctcgggaaagctgtcggggcgttgcatcaacatccaccactcgttcctgccgggcttcaagggcgcaaagccctaccaccaggcgcatgagcgcggcgtcaagctgatcggcgcgaccgcacattacgtgacgcgcgacctcgacgaggggccgatcatcgaccaggacgtcgagcgcatcagccatcgcgacacgccggaagatctggttcgcaagggccgtgacatcgagcgccgcgtgctggcacgggccatccgctaccatctcgacgatcgtgtcatccttaacggccgcaagacggtggtgttcgtggattaggtggaagtcattccggagcgcgcgaagcgcgaatccggagatctcgagattgcaggttttcgatgctgacgcatcgccctggaacaacggcggcgggtcaacgcatctcgttgcccgaagtggtgcccgtcgcacccttctgcgactgctcctccttttcgcgctccgccgccggcagcagccgcttgcgttcgcgttccctcatgtaggcgtcgtactgcggtgtgcccggacgcggcggagcatcggccggcaggcccccggcccattgcgggacgtagtcgcccatcccggcggaaagcctctcgttgaccgtcccacagcccgacattcctgcggcaagcgcaacgatagcgagggcggaacgaaaattcctgggcattgtgtgagcgcgcacgcattcgatcatctggcgccggctgagccggcggacgggagagtagccatcaacaaggtaaaatagacttattcgaggtaggtagtttattaccaaatgcgcggagccaaggaaggcggatgtacaaatactgcaaaagaaagacgcaattctccatccgcttggcccgccgcacttctaaactgcgaggcgcggttcgagcccaacacaaatcggtgcgacggaagggttttattgacaagttcattttctttgtacattcgtgcaaattacggcgaccgcatccgggtgctcgagctatcccggcgtaagccgtggcatgcttccatacgacggtcacgggcttgcgccgaagagtcgccaaacgtccgattgacaaggagggcgcgaaagacgcccatgtggtgcgcgacgatcactccgcgcagagccaacggttgaggcaaaggaccgggcactcggtccaggcacaagagtcaggaatgaaggggagggacatctgatgttcgaacgcaaacaattgtctcatagggcgattggtaaggcgacttgggctgctgccgttacggccattgcaggccttgccggtctcgcgccagtcaaggccgcggacagcgtcaagatcggtctgatcctgccgatgaccggcggccaagcctcgaccggcaagcagatcgagaacgcgatcaagctctacatgcagcagaagggcgacaccgtcgccggcaagaagatcgagatcattgtcaaggacgacgccgcgatcccggacaagaccaagaccgccgcgcaggaattgatcgtcaacgacaaggtcagtttcatcgccgggttcggcgtgacgccggccgcgcttgccgccgcaccgctggccacgcaggccaagattccggaaatcgtgatggcagccggcacctccatcatcaccgagcgttcgccttacatcgttcgcaccagcttcacgctggcgcagtcctcgaccatcatcggtgattgggccgccaagaacggcatcaagaaggtcgcaaccctgacttccgactacgcaccgggcaacgacgcgctgaatttcttcaagcagcacttcacggccggcggaggcgaggtggtcgaagaggtcaaggttcccctgcaaaaccctgacttcgcgccgtttctccagcgcatgaaggacgccaagcccgacgcgatcttcgtcttcgtgccggcgggccagggcggcaacttcatgaaacagtatgccgagcgcgggctcgacaaggccggcatcaaggtgatcgggcccggcgacgtcacggacgacgacctgctcaacaacatgggggatgccgtgctcggcaccgtcacggcgcatctctattccgcggcgcatccctcgcagatgaacaaggatttcgtcgcagcctacaagaaggctttcggcaaccgtccgggcttcatggctgtgggtggctatgacggcatccatctgatctacgaggcattgaagaagacgggcggcgacaccaacggcgacaagctgatcgaagccatgaagggccagaagtgggagagcccgcgcggcccgatctcgatcgatcccgagacccgcgacatcgtgcagaacatctacatccgcaaggtcgagaaggtcgacggcgaactctacaacgtcgaatttgcgacgttcgaagccgtcaaggatctcggcaagaccaagaagtgatgcgcgagagcagggtatcccgggggcgcattggaccgaaaccgggatctcgcaattgctgaaacgagattccgggttcagcgcccagcgctgcccggaatgacgagtgatgacccaggggttttccgctcccgatgaccgcaatcctcaccaacctgttcgatggcgttgcctacggcatgctgctgttcgtgctcgcctgcggacttgcggtcacgctcgggctgatgaacttcgtcaatcttgcccacggcgcgtttgccatggccggcggctacgtctgtatggtgttggtcaacaggatgggctggccgttcttcgcggccctgccgctcgctttcgtctcatctgcagcgattggcattgcgctggagcgtacgctgtaccgccacctctacgcgcgcagccatctcgaccaggtgctgtttaccattggcctgaccttcatgtcggttgcggccgtcgattacatccagggctcgtcccgggtgttcatcaatctgccggccgcgcttcagggccagttcgacctgttcggcgtcggcatcggccgataccggctgatgatcatcgtgatctgcggcttgcttaccatcgcgcttcagctggtgctggcgaagacgcggttcggcagtcgcctgcgcgcagcggttgacgacccccgcgccgcgagcggtctcggcatcaacgtgccgcaggtgttcgcgctcacctttgccttcggttgcggacttgccggcctcggcggcgcgctcagcgccgagattctcggcctcgatccatacttcccgctgaaattcatgatctacttcctgatcgtggtcaccgttggcggctcctcttcgatcaccggcccgttcctggcctcactcctgctcggcatcggcgacgtcgctggcaagtattacgtgccgaagatggggccgttcgtgatctacaccatcatgatcgtgatcctgatctggcgtccgaacggcctgttcggtcgcacggccgcgcgttgagttcgccgatgagcgctgcttccgacgttggttataacgcccagcgccaggcgcgctggcattacggtgaaatcgccttctggctcatcgtgctgtcctgcgggttcctgtttccgtctcgctacctgatcatgaccgatatcctgcggctggcgctgttcacgatgtcgctcgatcttatcttgggttatgccggcatcgtctccctcggccacgccgccttctttggcgtcggcgcctatgcggcgggccttctcgcacttcacggcatcatcaatgagccggtgctcgcgctgatcgccgctggccttgctgccatggtgctcggtttcgccaccagcttcctcgtgatccgcggcgtcgacctgacacgcttgatggtgacgctcggcatcgccctactgctggaggcgctcgccgaacgcttctccaacatcaccggcggcaccgacggcctgcaaggcatcgagatgcagccgattttcggccagatcccgttcgacatgttcggcaaggcgggcttcttctactcgctggccgtgctgttcctgctcttcctgttcgcacgccgcgtcgtgcattcgccgttcggcctgtcactgcgcgcgatcaagaacaatccgctgcgcgccgccgcgatcggcatccccgtcaactgccgcctgatcgcagtttataccctggcagcgttctatgccggcattgcgggggcgctgttcacccagaccaccgcgatcgcctcgctcgatgtctttgccttcgagcgatccgccgacctgatgctggtcctcgtcattggcggcaccggctatctctatggcgggctgatcggcgcggttgtcttccgcctgctccaggaattgttctccaccattaccccgcaatactggcaattctggatcggcctcgtgctggtcgtgatcgtgctggtcggccgccagcgcatgcaccggtgggtactctatgtgcccaatctgatcctcaggatggtcgccgggcgcaaggctgtcgtcgctgtgccggagggcgacgcatgaccatcgcgctcgaaacgaagaacctcgaaaagcagttcggcggcctgcgcgtcacccgcgatctgtccttgaaggtcgagcagggggcccgccacgcgctgatcggcccgaacggggccggcaagaccacggtcatcaaccagctcaccggagtgctcaagccgaactcgggccgcatcctgctcgagggccaggacatcaccgatctgcccgtgcacaggcgcgtgctgcgtggcttgtcgcgcaccttccagatcaaccagctctatcctgacctgactccgctcgagactatcgggctcgcggtctcggagcgcctcggccatggcggcgactggtggcggcgcatgggcacgcgcaatgacgtcaacgacgaaatcgccgatctgcttacgcgcttccatctgctcgatgccatgaacgagcagaccgtgacgctgccttatggcaagcagcggctgctcgagatcgcggtcgccatcgcaaccaagccgcgcgtcttgctgctcgacgagccggccgccggcgtgcccgagagcgaacggcatgacattcttgccgtggtcggcgcgctgccgcgcgatgtgaccgtactcctgatcgagcacgacatggacctcgtcttctcctttgccgaccgcatctcggtgctggtctcgggcgctctgctcacggaagggccacccgagcaggtcgcgcgcgatccgcaggtgaaggccgtctatctcggcgaggaagcggtcgatgtctgacctgctcgcgatcgattcacttcgcgccggttatggcgaggcggtggtcctgccgaacatgtcgctgggccttgccgagggacaggtgctggcgctgctcggccgcaacggcaccggcaagacgacgttgatcaactccatcgttggcgtcacccgctgcttctccggctcgattgcgctcgccggcacggatcttaccttgctccggcctgaccagcgggcacgtgccggcatcggctgggtgccgcaggagcgcaacatcttccgctcgctcacggtagaggagaacatgaccgcggtggcgcagccgggtccctggaccttcgagaaggtctacgagatgttcccgcgactgaaggagcggcgaagcaatttcggcaaccagctttccggcggcgagcagcagatgctggcgatcggccgcgcgctgaccctcaatccgaaagtgctgctgctcgatgagccgacggagggtcttgctcccatcatcgtcgaggaactgctgaaggcgatcggcagcatcacgcgggcaggcgggatctgctcgatcatcgtcgagcagaatgcccaaaagattctggggctggccgatcgcgttgtgatattggagcgcggaacgatcgtccatgatgccccaagcgccgcgctgaaggccgacccgtcggtcctggagcgccacctcggcgtcacagggacggcggcccactagaaaacctttgggagtaaagaatgcagcgaaccagagcccccttccgcgccgacgaggtcggcagtctcctgcgcccggccaagatcaaggaagcccgcactcgtctcgagaagggcgaaatctcggccgacgatctgcgcaagatcgaggacatggagatcgagaaggtcgtgcacaagcaggcctcgatcgggctcaagctcgcgaccgacggcgaattccgccgctcctggtggcacttcgacttcctggcgaagttgaccggctgcgagctgttccaccccgacaccggcattcagttcgcgggcgtgcaaacccgtcacgacgcggtccgcgtgattggcaagctcgactttcccgacgatcatccgatgctcgaccacttccgcttcctgaagaagtgcgccgaccaggcgcatgtcaccgccaagatgacgatcccgtcgccggcggtgctgcacttccgcggcgggcgcaagtcgatttcgaaggacgtctatcccgatctcgacgccttctatgaagacttaggcaagacctaccgcaaggccgtgaaggcgttctacgacgcgggctgccgctatctccagttcgatgacacggtctgggcgtatctctgctcgcaggacgaattgcagaaggcgcgcgagcgcggcgacaatccggacggtctgcagcagatctatgcgcgcatcatcaactatgcgctggccgaaaagcctgccgacatggtggtgacgacgcatgtctgccgcggcaatttccgctcgacctggatctcctcgggtggctacgagccggtcgccgagaccatgctggccggcaccaattatgacggctacttcctcgaatacgacagcgatcgcgccggtggcttcgagccgctgcgcttcctgcctaagggcaacaaggtcgtcgtggtcggcgtcatcacttcgaagttcggcgagctcgagaagaaggacgacatcaagcgccgcctggaagaagccgccaagttcgctcccctggagcagctcgccctctctccgcaatgcggcttcgcctcgacggaagagggcaacatcctctccgaggaagagcaatgggccaagctcagcctcgcggtcgagatcgcgaaggaagtgtgggggaactaaggcgtacgcgctccggcgcacgagtaccgcgagccttcactacatactcaccgtcattccccgcgaaagcggggagtccggtacgctgcggcttctcgggtcaatcattggcgtcacggagcactggattgcccggtcaagccgggcacgacagctcagcgttgtggcgaacaacatggcaatcaaggtcaatccgacctcatttctccgccagatgaacctcgcccagcagtgacgagttcgagcgctcggctgctcgttcttcgcggccgatccctcagccccaccgcgtcagcttcgacagccgcgcgtcgcgccttcgccctcgggtcgcttcaccggcgcgctcgcgtgccgaatcaggggacgttcgccggcgcatatacccggcgcccgatccgctattcccagagtgggcagaatttgctacgtccgagcgacccaatcgctctgcccacggcattcccaccgcatgaagaacgacgaaatcctgagccagatcaccgagttctgccggaaggcggacatggcggaatcgacgttcggccggcgcgcggtaaacgatgggaagctcgtgcatcgcctgcgcgagggcaagcgcatcaccatcgacacgctcgagcgaatccaggcctatatggcggcgtcgatggccggcggcgctccgccgccgcgggggctccaggtgccgccggaaaagcgtgatccgcgcggaaacttccgcttcttcgagaaccgccaaaaatacctgctgttcgtccacacctgcagcgaaaagcgtgtgatcgcggacagggtcgccctggagcttgcctcgatccatccgcgacctccggcgctgcgcctgtttgacgccggggtcggcgacggcacggtgctggcgcgggtgctgcgcgcgacgcaccagcgcttcccgcatatgccgttctacgttgccgggaaggaactcagtctcgaggacctgcgcctcacgctcgagaaggtgcctgaccgcatttttgagcatccggcgtcggtattcgtctttaccaacatgttctatgcggaagcgccctggctcacgccggcgtcgcctgcagcggcggccgctaccgtgtggcacgaagtcccgcttcgcggcgcttcatcgggcgagttcgagcagcagattgccgagttaaggccgttcctggagcagaattggcgcgcggccatcagcccacggacggccatgccgctctacgagcggccggtcgtcctcgtgctctaccgcgaagaccacaggttcctgctggattcgaccattccgcggccgggccaggccgaagccaatttcgaccttgtcatcgcatctcaaccctatcgggctctgtcctccgtcaatttccgggccaagcggatcatcgcgcctctggcgcgagcgcttcggccgggcggtcggttgatcggaattcactcccatggccaggatccgggcatggaaatgatccaggcgatctggcctggagaaaatcctttctcggtcagccgtcatgagctactgcgtgcagttaagtatgaacttggatcggtgggccgcgacttaaattttaatgcctacgcggataaccgttcgatcttcaggtatgatatggaagcgctgcccaacgaggtcaccggcacaatcggaacctcgacggcctttgcagcgtggaatgcggcggtgtatgtcgctcagattgaggacgaccggttgacggaaatgactcaaaacggccgcaccctggatgccgccagggacgtgctgcgaaaatacaacggactctggtttctcgacgaatcctacgtcatctcgcgccggcgtgattgacatcattcaaagtaaacatcgcaaacgcccgccggctagtggcggaacaaggggttactgatgcgcgcgtcctatctcttcaccagcgagtccgtctccgaaggccatccggacaaggtctgtgaccggatttccgatgagatcgtcgacctgttctatcgtgaagggccgaaggccggcatcgatccctggcagatccgcgccgcgtgcgagacgctcgcgaccaccaacaaggtggtgatcgccggtgagacccgtggtccgaagtcggtgaccaacgagcagatcgagagcgtggtccgcaacgcgatcaaggacatcggctacgaacaggaaggcttccactggaagacctgcgacatcgagatcctcctgcatccgcagtcggccgacatcgcgcagggcgtcgatgcgctgcagccgggtgaggtcaaggaagaaggcgcgggcgaccagggtatcatgttcggttacgccaccaacgagacgcctgatctgatgccggcgccgatcttctacgcccacaagatcctgcgcctgatctccgaagcccgccactccggcaaggagaaggtgctgggtccggactccaagagccaggtcaccgtgcagtacgagaacggcaagccggtcggcgtgcgcgagatcgtggtctcgcaccagcacctgatcgaggacatctcgtccaagcagatccgcgacatcgtcgagccctatgtgcgcgaggcgctgcccaaggactggatcacgccgaagacgatctggcacatcaatccgaccggcaagttcttcatcggcggtcccgacggcgataccggcctgaccggccgcaagatcatcgtcgacacctatggcggtgcggctccgcatggcggcggcgcattctccggaaaggaccctacgaaggtcgaccgttcggcggcctatgctgcgcgctacgttgccaagaacatcgttgccgccggtcttgccgaccgctgcacgctgcagcttgcctacgccatcggcgtggcgcgtccgctgtcgatctacattgacacccacggcaccggtaaggtgtcggaggacaagctcgagaaggcggtggcgcaggcgatggatctgacgccccgcgggatccgcacccatctcgacctcaaccgcccgatctacgcacgtacttctgcttacggtcatttcggccgcacgcccgacaacgagggtggcttctcctgggagaagaccgacctcgtcgagcagctcaagcgcgcgctgtagtctctagcatcattccggggcgccgccacatcggcacgccccgggatcttgatccttcggctccgagttcgcccgttttcacgagtgcccggaatgacgagccaaacaaacaggaaccccctatgaacgcgaagcccggcttcaccgactacatcgtcaaggacatttcgctggccgatttcggccgcaaggagatctcgctcgccgagaccgagatgcccggtctgatggccacccgcgaggagtacggcccgaagcagcccctgaaaggcgcgcgcatcgccggctccctgcacatgaccatccagaccgctgtgctgatcgaaacgcttgcagccctcggcgccgacatccgctgggtgtcctgcaacatctattcgacgcaggaccacgccgcggccgcgatcgccgccgccggcattcccgtgttcgccgtcaagggcgagacgctgaccgactactgggactacaccgcaaagctattcgactggcacggtggcggtcatccgaacatgatcctcgacgacggcggcgacgccaccatgtacgtccatctcggtctgcgcgccgagaacggcgacactgccttcctcgacaagcccggctccgaggaagaggaagtcttcttcgcgcttttgaagaagcagctcaaggagaagccgaagggctacttcgccgggatcgccaagagcatcaagggcgtttccgaagagacgaccacgggcgtgcatcgtctctatgacatgcagaaggcaggcacgctgctgtggccggccatcaacgtcaacgacagcgtgaccaagtcgaagttcgacaacctctatggctgccgtgagtcgctggtcgacggcatccgccgcggcaccgacgtgatgctgtcgggcaaggttgcgatggtcgccggtttcggcgacgtcggcaaaggctcggcggcgtcgctgcgccaggccgggtgccgcgtcatggtgtcggaaatcgacccgatctgcgcgctgcaggcggcgatggagggctacgaggtcgtgaccatggaagacgccgcgccccgcgccgacatcttcgtcaccgccaccggcaacaaggacatcattaccatcgagcacatgcgcgcgatgaaggatcgcgccatcgtgtgcaacatcgggcacttcgacaacgagatccagatcgcggctctccgtaacctgaagtggaccaacatcaaaccgcaggtcgacgagatcgaattccccgacaagcaccgaatcatcatgctatcggaaggccgcctcgtgaatctcggcaacgccatgggtcatccgtccttcgtcatgtcggcgtccttcaccaaccagacgctggcgcagatcgagctgttcgccaacaacaaagacggcaagtacgagaagaaggtctacgtgctgccgaagacgctcgacgagaaggtcgcgcgcctgcacctcgccaagatcggcgtgaagctgaccgaactgcgcaaggaccaggccgactacatcggcgtcaagcaggaaggcccgtacaagtcggaccactaccggtactgatttgctggttcgaccgcccatcgacgcaaagccccggagcgatccggggctttcttgtttcggcgcttggaattcaactcgctttgcagttgttgcgcggctgattgccaattgacggccagcagcgacgggcggacaatccgcgcaggcggaggaaaccatgcaacaagaacacttcgacgtcctgatcgtcggtgccggcttgtccggcatcggcgcgggctatcatttgcagaccaagtgccccggcaagagcttcgtgatcctggaggggcgtgactgcatcggcggcacctgggacctgtttcgctatcccggcatccgctcggacagcgacatgttcacgctcggctattccttcaagccctggaccgatccgaaggcgattgcggacgggccgcagatcctgaactatgtgcgcgagaccgccgtcgagaacggcatcgacaagcacatccgcttccgccatcgcgtcaagcgtgcctgctggtccacggcggatgcgcgctggacggtggaagccgagcgcatctcaggcgaaggcgctgccgagctcgtgcggttcacctgcaatttcctgttcatgtgctcgggctattacaaatacgaggcgggctacaccccggagttcacgggcgtgacggatttcgccggccgcgtcgtacacccgcagaaatggaccgacgatatcgactacgcgggcaaacgcgtcgttgtgatcggttcgggcgcgaccgcggtgacgctggtgcctgagctcgccaagacggcggcgcacgtcaccatgctgcagcgctcgccaacctatgtggtgtcgaggccagcgcaggatcccgttgccaacaagctgcgccgcaatctgccgccgcgccttgcctatcatctgatccgctggcgcaacgtgatgtgggggatgttcttcttccagctcagccggcgccggccggccaaggtgaaggacctcatcctcaagggcgtgcagatggcccttggtcccgattatgacgtcgccacccatttcacgccgcgctacaatccctgggatcagcggttgtgcctggtgcctgacggcgacttgttcaaggctctccgggagcagcgcgcatccgtcgtcaccagcgagatcgatacgttcacgcgcgacggcatccggctcagggatggccgcgagcttgccgccgacatcatcgtcaccgcgaccgggctggtgctccaggtggtcggcggtctcgaggtcagcgtcgacggccgcgccgtcgatttcgcgagcaggctgacctacaagggcatgatgtatgccgacgtgccgaacatggcttccgccttcggctacaccaatgcgtcatggacgttgaaatgcgatctcacctgcgaatatgtctgccggctcatcaactacatggaccggcacaatttccgccaatgcatgccgcacaatgacgacccgaacgtcaccctgcagccatcgctcgacttcacctcgggttatgtacagcgctcgattgcgaagatgccgaagcagggctcgaagcggccgtggcggctgtatcagaactacgcgctcgacattgtctccctgcgcttcggccggatcgacgacggtgtgatgcgatattcgtgatcgcaccgacaatgcgttgttttgcgtatactgcgcttgggttgaatcggcgatggttcctggacggttaacgcggatttaacggatgagtcctagcctgtctcggccggggttactcgcaaggccgaggtgagcccaatggaagcccagaagatcgcggtcgacgccgtcgtcgcgctgaccgattgcgaccgcgaagccgtcattgccttcatccgccggctttacctggcgggcgtcaccgatcccaagcgcctgaccttcaaggggctccaggcgctgtcgcgggcctgattcgctcgtctcgcgattcggccccaagttccatcccgtcgctctctccggcgtgactacaacccagtggcgaatatcttgtcgctcgggtgcggttggagtagatgacgtccccggctgggtcactcgggaactggggaatgttgaaacagctttttgcaccgcaactcgtcgttctgtatgtgcttgcggcctcgacaatctacgttcactttcgcggcaagcagcggctgcgtttcgcgcgccagctcggcgaccactcgacctatctcgcgccctacaacgtgctgatgtatgcgggctcggccgtgcccaacaagccggtgatctcggtcgagcagtttccggagctcaagccgctgagcgaaaattgggagaccattcgcgacgaggcggtacgcctgttcgacgagggcttcatccgcgccgctgcgaagaacaacgactggggcttctactcgttcttcaagagcggctggaagcggttttacctgaaatggtacgacgacttcctgccttcggcgcgcacgctgtgcccgaagacggttgagctgctcaacgcgatcccgagcgtgcacggcgcgatgttcgcggtgctgcccccgggcggcaagctaggggcccatcgcgatcccttcgccggctccctgcgctatcatctcggcctggttacgccgaactcaaacaagtgccggatcctcgtcgacggcgtcgaatgcgtctggcgcgacggcgaggccttcatgttcgacgagaccttcatccacagcgccgagaacgcgaccgacgtcaaccgcatcatcctgttctgcgacgtcgagcgcccgatgaaatacggcttcatgactgccatcaaccgctgggtcagccatcacatcgtcaaggcatcggcgacgcagaacgttgagggtgagaatgtcggcgtgctcaacaaggtgttcggcaagctctacgagatccatctcgccagccgcaaagtcaaggagtggaatcgcaacgtctactatacgctgaaatactcgctcacggtgctgatcctcggcctcatcgtgtggtcggcgttgcgttgaacaaaaaaaggccccggacacctccggggccttctgagcttgacgccgcgcagctattccggctgaccgatgcttaccttcagcgtgccgacgccgtcgaccccgcattcgagcttgtcgccgggctggagctgcgacacgcccgctggcgtgcccgtcatgatgatgtcgccggccgcgagcttcacttgctgcgagagctgccagatgatctccggcacgttccagatcagctctgtgaggtcgcccttttgcgcttccttgccgttgacggtcagccagatcttgcccttggagggatggccgatcttcgaggccggctgaaccgcggagcagggcgccgaatagtcgaacgacttgccgatctcccaggggcgctctttcttgcgcgaggcgatctggagatcgcggcgggtgagatcgatgccgacggcgtagccgtagacgtggtccagcgccttgtcgggagggatattcagcccaccgctcttcatcgccacgatcaactcgacctcgtgatgcaggtccttggtcagcggcggatagggaatggtggcgccgtcgggcaccagcatgtcggcgtgcttggcgaagaagaacggcggggcgcgctcgtcattgcccatctcgcggatgtgctcgagatagttgcgtccgacgcaccagatgcggcgcaccggataccggccgctctcgccaacgacgggaagcgaagcctggggcggaagcgggatgacgtaggaggcggcgttcatatcgcggatctcgctgctcttgaggttgatgaggaactctatgccgttgcgctgatcggcgccagggcaccggaatcgtgatgttgcagccggaagaacgacgcatagcgcccaccgcgacgcagcagttcgtcatgccggccctgctcgacgatctcaccgccctcgaccacgagaatcgcatccgcgtgcatgatggtgtgcaggcgatgcgcgatcacgatggtggtgcggttctggcagagatgctcgatcgcttcctgcacctggcgctcggattcagaatcgagcgcggcggtggcttcgtccaggaggatgatcggtgcgttcttgatgagcgcgcgcgccaccgcgatgcgctggcgctgaccgccggacagctgcgtgccatgctcgccgactggcgtgtcgtagccgagcgggaagcccatgatgaaatcatgcgcgcaggccgccttcgcggcgccgatgatctcgtcctcgcccgcgccgggtcggccgaaggcgatgttgttgcggatggtgtcgcggaacagatagacgtcctggccgacataggcggtctgcgcgcgcagtgacttgcgcgagaccgcgccgatcgactggccgtcgatcacgatgtcgccctgcgttacctcgtagaagcgcaagagcagcgccagcaccgtagacttgccgccgccggaggggccgaccaaagcggtgaccttgccgggctctgcgacgaagctcatgcggttgagcacggtttcgccatcgcgatacgagaagctgacgtcgcgcagctcgatccgggcatcggacagcttcagtgccggcttgtcgtcgtcggcatactcgctcgccgggctgtcgatgatctcgagcagcatgcgcgcaccgacgagctggctgttgaggtcgatgttgagcctggccagccgcttggccggctcggtcgccatcaggaacgcggtcatgaaggagaagaacgcgccgggcgtggcattgagcgcgaccacggcatagccgccgtacatcaggcagccggcgaccgcgaagccccctaacatctccatcagcgggttggaacggttggcaacgcgggccatcttgttggcattgcgttcgacgaccgcgatgttctcgtcgatgcgcttctgcatggtctcttcgagcgtgaacgccttgacggtgcggatgccctgcagcgattcctgcatcgtctccatgatgtcggcggtgccggtgaactggttgaaggcgaggcctttgatgcgcttgactagcttgcgcagcaccagcatcgccggcggcaccgcgacgaggccgatgaaggacatcagcggatcctgccacaccatcacgccgatcatggcaagcagcatcaacaggtcgcggccgacggcgttgaccagcatgttgagcacgtcggtgatggatttggcgccggccgtcagccgtgccaggaattcggaggagtgccgctctgagaagaagccgacgctctcgcgcatcagcttggcgaagagctggcgctggttggtggcgaggatggcgttcgaaatcttcgtcaggatcaccatgtggccgtaggtcgccacgcccttgatgaagagcaggatcacggtgatgcccgagaacatcgcgatgcccgggacgttcttgtcaacataggcctggttgatgacctggccgagcacataggtcgcgccggcggtcgcacctgcggcgagcgccatcagggcgaaggcgacgaggtagcgccgccaatagacgatgccctgttccgtgatcaggcggcggatcaggaccactgccgcgtagggatcgtcggtgattctctttggaaactgcgccatcaggtgtccattgacggcgcaggacaaagcctgcccgcgcgtcagggatcgatgggcctctgtgcccgctcaagcggggtttttcaagcccaattaagggcttgcgcttgggacgattctaggccgagacggcgtggcggagatcgccgtggcgctcgcggaacagcttgtcctcccacgccagcgcgtgtgctgcgatggtctcgaggtcctcgtattgcggcttccagtcgagcaggccgcggatgcggctggtgtcggcgaccatggtcatgatgtcgccaggccggcgcggtgcgtattgcacggcgaagctgcggcccgaaacgcggcgcaccgcgtcgatcgtctccagcaccgaatagccgcggccatagccgcaattgagcgtcatcgaggcgccgccgttgcgcagataggcaagcgccgagcgatgggcctgcgacaggtcggtgacgtggatgaaatcgcggatgcagcttccgtccggggtcggatagtcggtgccgaacacgtcgatcttggcgcgctggccggtcgcggcttccacggcgatcttgagcagatgcgtcgcgccgaccgtggcgaggccgatgcgcgcctgcggatcggcgccggcgacgttgaaatagcgcaaggtcacgtactgcatgccgtaggccgccgcgacgtcgtgcagcatgatctcggtcatcagcttcgacgagccgtacggcgatagcggccgggtcggcgcgtgctcgggcaccggcacctggtccggattgccgtagacggcggccgtcgaggaaaagatgaagcggccgatgccgcgcttgaccgcgacgttgagcaggttgcgcgccgtcgtgaagttgttgcgatagtagccgagcggatcgcgcatcgagtccggcacgaccactgagcccgcgaaatgaatgatgctctcgatgtcgtgctgggcgatcacgccctcgagcaggttctcgtcgccggcgtcgccgatgaacagcggcacgccttccggcagataggtggagaatccggtggagagatcgtcgatcacgacgacatcctcgccggcttccgccagcgccaggaccgtgtgacttccaatatagccggcgccgccggtgactagcacagccatgatctcacccgtctcagatcaacgcgcaaacttagcgcttgcgtggtgaagagggggtatcggcacagctgaactggtcactatgcttaatgttgcgtatagggactttgcgaaacggagcatgacgtggcgaactcccccggcgacctcgacgtgatcgtgccaaatctgcacaggcgctattccggggtcaccgcgaccaaccggatggtggcgccgcggctggcgaaactctatcgcgcggcgtggttcggctcggatacgccggaggggatcgggcgactcggcattgcggatcttctgaagctgtggcgccgcaggcgaccgttgatctggcatgcgcgccgcaacaacgagatgatcgcaggcgtcgtgctgcgcgcgttcggctggccgctcaaggtggtattcacctcagcggcgcagcggcaccacagctggatcacgcgctggctgatccggcgcatggatgcgatcatcgcgacgtcagatgtctcggcgtcgttcctgaaggtggcggcgacggtgatcccgcacggcgtcgacaccgaggtctatgcaccgccgatggatcgcgctgctgccttcgccgaaagcggcctgccgggccgccatgccatcggctgcttcggccgcgtccgtgcgcagaagggcaccgatctgttcgtcgaggcgatgtgccgcctgctgccgcactatccggatttcaccgccgtcatcgtcgggcaggtcacgcccgagcagatgccctttgccaacgacctgaagacgcgcatcgaagccgccaacctgcaatcgcgaatcgtcatcaccggcgagttgccgatcgaggcggtgcagcgctggtatcagcgcctgacgatctacgcctttacctcgcgcaacgaaggcttcggcctgacgctgatcgaggcgatggcggccggcagcgcgctcgttgccgcacgcgccggcgcggccgaactcgtggtggaggatggcgtcaccggcgtgctgatcccgaccggcgatgccgatgcgctcgccgcggcccttgagccgctgatgcgcgatgtggctgcagccaccgcgatgggcgagcgcgggcgggcgcgggtgctggcaagcttcagcctcgatgccgaagcagcgcggatcgccgaggtctatcggccgctgctctcgggcgattttcgcggagcgcaaacaaaaacacgaaaacaaccccatgcaccgtagccgggtcagcaaaatcaagggtttggcggagagttcgacggactgcggatttttcgaatcaaattttgactcgtcgggcaaaacagtggcagnnnnnnnnnnccatcattggtgcgagccacgatcgcctcagctcgtcacccttgccccggcttcccccagcacccgctccgcaatcttcaccacctcgctggccgcgatattccccatgcagcgatgatcattcatcttgcagatggtgctctggcagggctggcaggacagcacttccctgtcctgcacaacggtcgcggcgaggccgttgagcggtgcccacagataggggctggtgggaccgaaaatccccatggtgggcgtgcccagggcggctgcgatgtgcatcaggccggaatcgttggagatcgcaacgccggccgcggccatggcgaggacgccgttgcgcagatcggtgccggtgaggtcacgcacgccgggaccgccggccgcaacgatctcctgggcgaggcccttctcggcggggccgccaaccacccagacctccaggccgcgctcgaccagaagccgggcagcctcgggataataggtccagcgttttgagacacctaccgagccgggggcgagcgccaccgcggctccggcgctgaggccgttggcttggcgccagctggcgatctcctcgacggggacccggagttgcggcaccggccattccggcggcaagggggctccgttgggctgggccaaagcggcattcttgtcgatgaagcggggcagcttcttctcaccccagcgccagcggttgatcaggccgaaccggaactcgccgacaaagccgacccgttcaggaatacccgccagggccggcgcaatagccgccttccatgtgcggggcagcaccagcgcggtgccgtagttccgctcgcgcaggagcttggccaggcggaattggcgggctatggcgagccggccccggggcaagtcccacacaacgccttcccgcacgccgggcatgtaatcgaccagcggggcgcagagcgaggtggtcagaagatcgaccggccggtttggccagcgctccttcaagacacgcacgaccgtgtgattacgcacgaaatcgccgatccacatgtagggaatgatcaggatcggccgggtgtcgctccggtctgcatttccgctaagttccgaatcttgattcattcgataattggggtgaggcaatccaacgtggcggttcggttagccgctccgggccggcaggtaaagccggcaggcctctcagtccaaaactgcttacactttggcggctcatgcgctacggcaggaccgggccgcaaaatcgggcagggatttcggaatgttgctggtgaccggcggagccggttttatcggatcgaatgtcgtggccgcgctcaatgacgcgggtcgcagcgacgtcgtggtctgcgactggctcggcaccgagggcaagtggcgcaatctcgccaagcggcagcttgtggatatcgttcccccggccgagctgatggactggctgaagggccgcaagctggacgcgatggtccatctcggggcgatttccgccacgaccgcgaccgacggcgaccttgtcatcgagaccaatttccgcctgtcgatgcgtcttctggaatggtgcacgatgaacgcagtcccgttcatctatgcctcctcggcagcgacctatggcgatggcatggaaggcttcgacgacgacggctcgctgccggcgctgaagaagttgcggccgatgaatctctacggctggagcaagcacctgttcgatcttgcggtcggcggacgcgtcgcgaacggcgagccgctcccgccgcaatgggccgggctgaagttcttcaacgtgttcggtcccaacgaatatcacaagggctcgatgatgagcgtgctggcgcggcgcttcgacgacgtcaaggctggccgcgtcgtgcagctgttcaggtcgcatcgcgagggcatcgaggacggtgatcagcgccgcgatttcatctatgtcgacgatgtcgtgcgggtcctcatgtggctgctggcgacgccatccgtgtccggcgtgttcaacgtcggcacgggcaaggcgcgcagcttcaaggacctcatgctttctgcctatgccgcgctgggcaccaggcccaacatcgaatacatcgacatgccggagagcatccgcgacagctaccagtacttcaccgagagcaaggtcgatcgcctgtgccgcgctggctataatggcggcttcaccacgctcgaggacgcggtgaaagcctatgtcggggactatctcgaccggcccgatcgctttcgttgaggccccttagaccatgccgactcccattctcgatttcgatgccctcgcgcaagccatctcgggccgaacggtgctgtgcatcggtgacgtcatgctggacgagttcgtctatggcgaggtgtcacggatctcgccggaggcgccggcgcctgtcatcgccgcccagcgcagcgagatccacatcggcggcgcgggcaacgtcgcgggcaacgtcgcttcgctcggtgcgcgatgcatcttcgtcggcctcatcggcgaggacgatgccggcgcacggctcgcggcggcgctcaaggagcaagccggcatcgaaagcgtgctggtgtgcgatccctcgcggccgaccacgcgaaaggtccgcttcgtctccgagcacttttccacgcatatgctgcgcgcggattgggagcaggcgctgcctgcatctgatgacatcgaaacgaaattgatcgatgcgatcctgccgcagatcgcccttgcggacatcgtgctgctgtccgattacgccaagggcgtgctgaccgcgcgcgtgatccgccataccatcgacgaagcgcgaaagctcggcaagcccgtgatcgtcgatcccaagagcctgaactgggcgatctatcgtggtgccacgctgctgacccccaaccgaaaggaattttcggaggcgacccgcagccgcgccgacacgccccagagcatcgtcgaggcgagcgaggacgtgatgcggctcgccgattgcgaagcaatcctggtcacgcagggcgagcatggcatgacgctggtgccgcgcaacggtgaggccgttcacgttccggctttccctgtgaaggtgcgcgacgtctccggcgccggcgacaccgtcgccgctgcgctcgcggtgtcgctcgcggccggcgcggactgggacacggcgctgcgcgtcgccaatgccgccgcggccgtcgcggtgggtaagcagggcaccgccaacgtgagcacgaccgagctgcgacgcaagatcctgccgcacgccacactcgcggccgaggagaagatcgtgctcgatccggccgcgctcgatgcccagctcgccgaatggagaaggcagggccagcgtgtcggcttcaccaacggctgtttcgacatcctccatcccggtcacgtcaaggtgctgacggcggcgcgcgcggcctgtgaccgcctgatcgtggggctcaacagcgacgcctcggtccggcgcctgaagggtgccgatcgcccggtgcaggacgaacgcgcgcgtgccgaggtgctcgccgcattggaggccgtggatcttgtcgtcatcttcgagcaggacacgccgatcgagctgatcacacggatcaagcccggcgtgctggtgaagggtggcgactacacgcgcgagcaggtggtcggccacgaggttgtcgaggctgcgggcggggtggtcgtgctggtcgacatcctccagggcttcagcacgacggcgctggttcaccgcgcccggggagggagcaagtgacggtgcttgcccgggagacctccggccagaccttgcggcggcgcctgcgcagtccggcggcctggagcgagacagtcgacctgtttgcgatcctgaccgcggcttcgctgccgtggtcgacgtcccttgcggggatcttcaacgcgctgatgctgctctgcatggtgccgttcctcgatttgcgcgcgttcctgcaatcgctgaagcgaccgatctgccttgcgccgatcgcgctcgtcattctcgcgctggcgggaacgctgtggtcggatgcgccctggggcacgcgcttctatgcggtcaatccgacggttaaactgctcgtgctaccggtcctgctctatcatttcgagcgctcgcagcgcgggcactgggtgctgatcgccttcctggtatcctgcgcgctgttgtcggtgatgtcctggcttgtgctcttctatccgcatctctcgctcaagaccgacccggtggagcgcggcatcttcgtcaagaactacatcgaccagagccaggagttcgcgctctgcgcggtcgcgctcgcctatccgatcgtgatgctgctgcgcgagaagcgctactggttcgccgcactgctcaccgcgcttgcgctcagcttcgtcgtcaacatggccttcgtcgtcgtatcgcgcactgcgctggtcaccattccgatcatgttcggcgtgttcgcgctgcttcacctcaaatggcccagcatcgggatcgtcgccgcagcgcttctcaccggcgccttcctcgcttggcaggtctcgccgcagttgcgacatactgccgagcggtttaccgacgactacacgcgctatgtggaaaagggcgagccgacctccctcggcctgcggctcgaattctggcgaaagtcgctcggcttcttcgcggaggcgccggtcgtggggcacggcaccggctcgacgcgcggattgttcgagcgcgtcgcgacccccagcggtcggtaccaggcctccgccgaggtgatcggcaacccgcataaccagacgctgaacgtggccgtgcagtggggcgtgatcgggatcgtcgtcctcta

SEQ ID NO: 280 - DNA, 2898 bp, Bradyrhizobium colbertium
agtgctcacgcctcagatgctgtgctgctgattcgaaggatgaagcggccacagtttcgtagccaagtttatcaccaatcttgctgattacggcacgctgaacgagatcaacttcgactacgagaaggcgtccgatcgactctgccacgtggtggtgcatcgccatcacagcggaaactccttgcgatatttatcatcatcgaccagattggtggacttcacgtgacgctggatacttaagattctcatcaactcgtcaggatcgattcaccacgacgggcccgcaacacccgaacaccaggggcacggttgtcgccattgaagcagcttcgaacttctccattgaccccgtccacgatcagattgacaggatagcgatgttcgagctgcatccgattcacttatcgcttttcgtcccgcatggatgattgtcacgatccgtcatcgtcgtaacgcgctatttcttggattgggtgagaggctcaacccaatccgaacctgattgtcctctgggcaatcgatagattgagtgtctcgaatcgcttcttcgccgtggctatctcagccgtagacggttggggaacatttcggctacgtaggactgccaaggtcgtctgccagtttaaccgagcggctcggcaagccacgactaatccgtcgtaggctctgtcttccatcaacggctcgattctttccaaggatgcgccagacagcacggttaaagccgcgatgatattggtatactcgcgccgcatggcgaaaccactaacggcggagtcgttgagcttgccggacttggtgagcgcgcgaacgcgagcctccgcatcagagtagatcacgggttcggggacttcctcggaaatgtgggtggcgatctggtcgagtgcatcgcgaatgtctgcacgcgagcctggcggcgctgccttgatgagctgcagtcgggcctgatcggacatccccgaaaggagttgacgcaacatgaggggagagatgtccggtcgcagggccaacgattcggcgatgtccggcgtaagcgtagcggcggcaacaatcgcggagtatccctccgtagagaacctcgcgcccacgttctttgccagggctcggcacacgccggcggagcatcggtccagaagcgcatcagttagagcttcgtcgagagtggagcggctagaaatccatacgaggtgctcgccgttgagttcgcgtgcaaactgacaaagatcatcatttgaaagacaacgagatagatgcagaacgggtgccgcgacagaggtgttggggtgacaagcaagctgacgtatggtccgacgaggggctgacggcaggtcagcaagcatcaaactcagttgaacgagcgagtcggtatcaacccaatccaagaggcctacaagaagcccatcgaatacgtcgagctgatggtcattaaggcggcgttcgtaggaaagaagcagatgtgtcgcgcgacgcagcatcaagatgcgccgttcgagcgaacggttcgaggcagccctggcgacatccgaggcgagagcgatgggagtccaaatggccatgatcagtcaattagagtaggaaaatacaaggtcttcgcgcaaacaccggctcacgcgatgagcgccattctagcgagaaaaacttcaagagttcctaagagaagaagtgccaagccaaggagccgagccggctgacttgtccattgatcagcgcgtcaaggccacgtccctgaatgccgagaccaacggccgttcgagcttgtcttgcatggactgcaagatttcgtaggccttttcgcgcggcatcgtcggcttgtaactccgccgttcgacaagcgccgcgaatacatcggcgatcgtcaacattcgcgtcagatcgcgaatgctctcggcgccaaggccgtccgggtacccactgccatccagatactcgtggtggtgcctgacggcgtcgagcacctcgggcgagataccgggatgcgcctttagaacgtcatagccggcgactggatgcgtcttgatcagttcccgctcggcgtcgtccaggcgcccggccttgtccaggatggacaagggtatcgttgcttttccaatatcgtggaacatggccgcgagaccaagccgattgacatcttgctttccgagacaaaggctgagaccaaaatcaacagcaatacccgtgaccagcaggcagtgctggtacgtaccctcgtgatgatgacgcaccgagtccagccacgccgcgaggccaaattccgaaatgttgtcagcaatggcactactcatttgggcggcttcgttcacatcgatggaagcgccgcttagcgcagcgcgaaaaattgaggtgaagcaaccggcggcatcagccgccgccccgtcaacacccgccgtcgtctcgttgacgggttgcgcaggtgcgctcgcgccgaccaactcagaaatcaggcgaaggcggttgactggagccgtcagcaccgtcgttgcgccgagcgcgtaggcttgcacgatcgacagccgagaatccgcaccaacgataaagaccctcttagagacatgcccggccgcagtttccagcgatgccttgagcgcgcagatgctgtccatccgtcggagatcgacggcaaccagcagcgcatcgtgctcgcgatggtcgatcgtcgggcgccctagaagttcggtggtgacgggacagcagtcgcccaccatcgcatgaagctctgccaacttcgcggtcgtatcgcttagaatatgaacgcgtgccggcgcgccgtgcgcctggcggacgcgaagaaaaactggttgcattgccaccgctccaaaaagtgttgcgtcgccacgttggtggcgagcgtttgcacaacttcgcgtccgccgcggtcgagcaagatatccgtgacagcgc

SEQ ID NO: 281 - DNA, 1384 bp, Bradyrhizobium colbertium
tcgaggacgcgatcgacgtcgaggacgaccatgagctggccatcgaggcggtggacgccgccggcgagcttggccatgcgtgggtcgaggttgacggggttctcctccatgccggcctcgggcaggcgcagcacctcgccgatctggtcgatcaagaggccataggattcgccgcgcaggtcgacgccgacggccatcggggtcttgccatcctcgtccctgggcaggccgagacgagagcgcatgtcgacgacggtgacgatgcggccgcgcaggttgaggacgcccgcgatctcgcgcgaggccagcggcacgcgggtgacgcgctcgggcatgaacacgtcctggacgcgggagatcggcaggccgaacagctggccgccgatcatcgcggtgacgtattcgaccatggcgccttcgccgatctgggtcttgctgctcatatgcgtatctcctgatccatcccgcttaaggttcaagccgccgccgcccggctcagctcggaggcgccggcggcgcccgcggtctgctccttcagtgccgcgatcaggccgggacggtcgaacttggcgacgtagtcgtggaagccggcctgccggccgcgctcgatcgccgccggcgacaccagtgcggagaggccgatgatcggcgtcgcggcgaggttgttgtcggaacggacgacttccgcgaactcgaacccgttcatgtcgggcatctcgatgtcggtcaggatcacgtcgaagctctgcgcgcgcagcgccgccaggccctcctgcgcggtcggcgcggtgcggacgcggtaaccggcggccttgagcacgggcgccagcatgttgcggaagaacgcgctgtcgtcgaccagcagcaccgattgcgaatgcaatgacggcgtcatctccttgcgggtgaaccagtcggagaacgccatgggcaggaagtggccgacgtcgatcacctcggtggcctggcccttgatcacggccgagcccagaatgcccgaacccgagccgccgacctcgatgttgagccgttcctcgacgatgtcgatgatctcgtcgacgacgaggcccatggagcggccgtcgtcggcgaacaccaggatcggctgggcaccctggctcgcaatggtgacgccttccatggccaccagcggcatcagctgctcgcggtactgcaccatgtagcggccgttcgagaactcgatcttgtcggccggcagctcttccaggcgcgtgaccagcccgagcgggaccgccttgggctgcgacgagccggcgcggaacaccagcagcgaggtggtctgctcgcccgagccgatgtgatgggccccgttctcgtcgcccatgtcatgggccgaggagccggcggcgccgagcgccttggc

SEQ ID NO: 282 - DNA, 18325 bp, Bradyrhizobium colbertium
cgtcaccccgcccctctccccacgagcggcagggctatcgcgtatgacgttcggaagagcatgagcaagcgcctcatccttcgagacgaccgcttcgcggtctcctcaggatgaggcgaagtggcaccgcggccgctgaactgctgccgcgcgcgtggtcctcatcctgagggcccgccgaaggcgggcgtctcgaaggatggccgcaggcgagtatcccgccgcgtgtcctgtgcgattgccctgccgcaagcgggacgaggcgcagagttcgagctcacttcatcttgcacttctcgtggaaccgatcctggttgttctcgacgatggtggcgacggtcttcagggcgagctggccttcggcgtccttgacgacgtcctgaagatagaagctctgaatcggaatgtggttgttgccgaacttgaaggcgccgcgcagcgacttgaagttggccttctccatctcggccttcatcgcatctttcttgctggtgtcgcccttcaccgcgaccaccgcactattgatcagctgcgccgcgtcgtaggattgcgcgccgtaataggtcgggcgcaggccgggatatttcttgcggtagtcggcgacgaaacgcttgttctgctcgttggggagatcgttgacccattcctgcgcgccgggaacgccgagtgcgttctccttctggagcggcagcgacagctcgtcgatggtgaaagcggtgtagagcggcatcgtgctcttcaagcccgcctgggcatattgattgaggaactgcacgccggcagctcccgggtagaacacgaagatcgattcggcgccggaggcgcgggccttggagagctcggcggagaagtcgagctggctcggccagaccgtgtactcctcgcccttgacctcacccttgaacgtgctcttgaggccggcgagcatgtccttgccggccgcatagttcggcccgatcaggaacacgctcttgacccccttctggttcatatagaggcccatggcggccggcgtctgatcgttttgccacgaggtcgagaacacgtagggcgagcacagctcgccggcgagctgcgacgggccggcattggcggagatcaggaatgtctgcgagtccactgcagtcttcagcgaggcgagcagcacgttcgaccagatatagcccacgatgaagtcgaccttgtcggactgcaccagcttctcggtcttctgcttgccgacgtccggcttctggccgtcgtcctcgtagatcacctcgaccggcttgccgtccatcttgcggccgagatggtcgagcgcgagctcgaaggaattgcgcatatcgttgccgatcacggcggtcgggccgctgaacgtcgaaacgaaaccgatcttgatggtgtcgccggcgaatgcctgatttgccagcaccagcgccgctgcgcccgccagccaaaatgccgtcctcataaccaacttcctccttattatcggtcccggaaacggagtgatcgccgctccaagcctgtctctattgaacgtaaaatccgtggagccgccaatggctcagcgcccgcccctgcaccatatttcgcctcaatcgacgatggcaagaaatataattctacccacctctgggacggctgcggccctttttcgcgccggatcgatacagcaagcctatgcggtcattgatgacggctattggaccgcggcgcccgatccgcacttaaatgaaggcgtagagcagcagcgagatcaaagggtgcatcatggccgcaactccccatcgcgtcgtcatcgtcggcgccggcttcggcgggctggaggcgacctaccggcttgcgggcgcaccggtgcagatcacgctgatcgaccgccgcaaccatcatctgttccagccgctgctctaccaggtcgcgaccgcctcgctcgcgaccagcgagatcgcctggccgatccgccatctcatgcgggaccgccgcgatgtgacgacgctgtttgccactgtaagcggggtggatacggcacgtcgttgcgtgctgatcgacgacggcagcgaggtgccctacgacacgctggtgctcgccaccggcgcgcggcacgcctatttcggccacgacgaatgggagcaatttgcgcccggtctgaagacgctggaggatgccaccactctgcgccggcacatcctggtggcgttcgagcgcgccgagcgcgagattgatcccgccaagcgcgccgcgcagctgaccttcgtcatcgtcggcggcggcccgaccggcgtcgagcttgcgggcaccatcgccgagatggcgcatcacaccctgcccggcgatttccgcagcatcgacacgcgcaaggcgcgcgtggtgctgatcgaggcaggcccccgcgtgctcgcaggcttccccgacgatctctcggcctatgcccaggcctcgctggaaaagatcggcgtcgaggtcgtgctcgggcaggccgtcaccgagatcaatcgtgacggggtcgtattcggcggcaagctgctcgaggcaaggaccaggatctgggccgccggcgtgcgcgcttcccccgcggccgaatggctgggcgcgccgagcgaccgcgccggccgcgtgcaggtggaggccgatctcaccattcccggccatcccgagatctttgcgatcggcgataccgtcagcatcaacgcctggaatggcaagccggtgccgggcattgcccctgccgccaagcagcagggccgccatgtcgccgagaccatcagagcgcgcctgcgccgtgctgcgaccggccccttccgctacaagcacgccggcagcctcgcccagatcggcaagcgtctcgccgtgatcgatttcggccgcgtcaagctgcgcggcgccatcgcatggtggatctggggcatcgcccacatctacttcctgatcggcctccgccaccgcctgagcgttgcgctcagctggctctggatctacgcccgggatcagcgcgccgcgcgactgatcacgcaggggagcagcaaggtggtgtagccctcttccctttctcccttgcgggagaaggtgcaggagcgctcgctgaccctacttcaccaattcacacccgccctccgccagcgggcggaacgcctgttctgcgggaatggtcgagaccagcttgtaatagtcgtagggatatttcgactcctccggcttcttcacctcgaacaggtacataggatgcacgacgcggccgtcctggcggatggtggtgtcgccgaacaacttgtccctgcctttgaacttcttcatctcgggcacgacgttcctggcgttgtcgctgccggtcgccgcaaccgcgttgagataggccagggtggaggcatagacgccggcctggttgccgctcggcatcttgccgttcatgccgggacgcgcggcgaagcgcctggcgaacgcacgggtgtcctcgttcatgtcccaatagaaggcctccatcagctgcaggccctgcgcgaccttgattcccatgccgtgaatgtcgttgatgaagagcaggaaggcgacgagcttctgcccgttctgctggatgccgaattcggcggcctgcttcacggcgttgatggtgtcgccgccggcgttggcaaggccgatcacctgcgccttcgagccctgcgcctgcagcaggaaggaggcgaagtcggaggtgccgagcggatgcttggaggagcccaccaccttgccgccgtggccctcgatgtatttctgcgcctccgcctcgatgcccttgccgagcgcataatcgaccgtgaggaagtaccagtccttgccgccgcgcgacatcatcgccgcggcggtggtgttgccggttgcccaggcgtcgttgacccattggatggtgtttggcgaaacaggccttgccggtgagatccgagcttgcagtcgaggacgccaggaaggtcatgcggctgtcgcgcaggagcgcattgatggagaggccgacggccgagttcggcacgtcgacgatggcatcgacgccttcgacgtcgagccatttgcgcgcgatggcgttgccgacatcggccttgttctggtgatcggcgtagacgatctccaccttgatgcccttgccgccgcctttgaagtcttcggccgccatgcgcgcggcctcgaccgagcccatgccgttggtgtcctggaagatgcccgagatgtcgttgagcacgccgatgcgaacgacattgtcggaaatctcggcgctcgccgcgccggacaacaggctcgcggccagcgcaagcgtccacttcagatgtttcattcttccctccctgttggatatcttgcagcgccggtcgttgccggcatcttgaaaatcagacggagcggcaggtcagacctgccgctccggcagcttgacgacgagccaatcgagatcgggcgtgatcgtgatctggcaggacagccggctggtcggtcgccgctgagcggcggtgccgtcgagcagtgcgtcctcgtcgccggccatcgcaggcagtcgcgcgagccagctctcgtcgacatagacatggcaggtcgcgcacatcgcgttgccgccgcattcggccagaatgccgtcgaggccgtgacgggtcgcggcctgcatgacgctctcgccgcccgcggtctcgacgcggtcggacttgccgtcgggatggatgaaggtgatggcaggcatcaaagctcctcgtcaggccggggtgatcgtcacaggcaggctgtcgagcccgcgcagcgtgttgttgaagcggcgcttcggctcacccgtgatctcgaccttcgcgatgcgcctggccagcgccgtcagcatcacctcgccttcgaggcgcgcgacgagctgcccgacacacatgtgaatgccggagccgaagccgacatggccagaggtgcggcgcgtgatgtcgtagctgtccggcctgtcccagcggcggggatcgcggttggcggcggcaaggaacatcagcaccttctcgccctcgccgattttcgcacctgacagctcgacctcccgcgtggtggtgcgaaagaaggtctgcaccgggctttcgaaccgcacggcttcttcgaacgcgccgcgcgcgagcgacgggtcgtcgcgcagccgactccattggtccgggaagcgggcgaggcagtacacggcagcgccgatgccgttgacggtggtatcgaggccggccgacagcagcgagcgcaccagcagcggcgcttcgttggccgtgatggcgccctcgtcgacctgcgcatggatgcaggcgccgaagccgccgggcgccagattctcgcgctggcactgctcggcgacgtaggcctgatgcggcgccgaccgttcgatcgcctcctggcgcagccggttgggcgggccgaacgcgttgaacaccacactggcatagggaatcaggtgctcgcgcccctccggtttcaggccgagcgcatccgggaagatcgagagcgggtaggcctccgcgagatccgcgatcgcatcgaagttgcgcatctgcagcagggcatcgacacgcgcctcggccgcctcggcaaagcggtcacggacctgcttcatcacggtcggcgacaacacttttgacaggacggcgcgggtgcgggtgtgcgcgggcggatcggcctcgaggatcaggctcggcggccgccagggcgtctccttcttgaagtcggacaggccgacaccgcggccggagcagaaggtcgcggggtcgttcaagacggcatggacctcggcatagcgcgccacgccgtagacgttccatttgtcgagatacaccacgggcccggcttcccgcagcagctcatgtgccggataggggtcggcaagaaacctcatgtcgaaaggatcgacgtcgagatgcgggacgcccgatcccgcggcgccggatgcggtcatggaaggtctccctcattttgatcttgtgaaagggtggtgcatgcccttaggtctttgcgcccgccgcgagtcagaaacccgatatgccgccgtcttcgaccagagcccgccacaagcccacgcccacagatgcgggaccgacgctcgatctcgaccgctacgtgccagcgttcatcaccttcatcgccaacaagctttcgaacagcgcgacggcgttctatcagaagcaattcggcgtcaacgtcacggaatggcggatcatgtcgctgcttgcgatcgagcccggcattcccgcctcgcgcatctgccacgtcatcggcttcgacaagggaccggtgagcaggacgctcacggggctcgagaagcgcgggctggtctcgatccgcaccgatccgaacgacggccgcacccattcgatctcgctcaccgcgaagggccgcaccacgcatgacagggtgatcgtcgccgcgctcgaacgtgagcgccgcctgttgtcctgcctcagcaaggacgagcgcgaggtgctgatcgatctcttgcggcggctgcacgaaaatctcggcgcggtcaccggcggcactgggccctgacgggccgcgcatcgggcgccaccttcggtcacatccaggcatgcgccggcgcttgccgacggcaccatgcgggccgagcatcgtttcctccaggatcgggatgcggcagtttccccgccgtcatcgctggctggaacggttcgcacaaattagttgcttaggcaacaaaagaaatgagatatattgcggcagggtggctggcgtattttgcgagccgcttgccctatcttccgtcattgcgagccaacgggtccgcgcgaagcgcggcccgatgacaggctccgcgaagcaatccagaatccttccgcggggacgaatctgcttcgtcgcaggagcccctcgcaatgacggcgtggaaggagctttgcccgaagtgacttagctgcagccgatccactcgcccgatgcgtcgtcattcaaccgcaccaccgcatcggcgcgccgcgtcagcacggcgcgctggttgatatagcctttgtcggtgatctcgccgccatcgacggatggcggctcggcgagcaacagagcgcgcgtggcgtggccggaggagttggggccccgctgctgcagtttcgccaggccttgcgcgactgcatccctgacccggtcatgcgccagtacgtcactcacatcagccgtctccggcagcccggcatgggcgcggcacgccgcgatattcggaaacaccagaaagcgcacctcgtcgccgccgtggccggacaccacaatgtcctgcgccagcggcgccagcgcggcgatgcctgcgatgcgcagcgtgccgacgctgacccaggtgcccgaattgagcttgaagtcctccgcgacgcggccgtcgaagaacaggccgcgctcgggccgcgcgctatcggcaagtttcacggcatcgccgatgagataaaagccttcgtcatcgaacgcctgcttcgtcaactccggcgccttccaatagccaggcgtgacgttgggaccgcgcacccgcacctccagcttgtcgccggaggtgaccagcttcagctcggtgccgggaatcggcacgccgatattgccggaacgctcggccaggaaatggcagtccgtcgcgagcggcgaggtctccgtcgagccccaggccgaaaccatcggcaacgcacggccgacggtctcgatggaaagctgctcaagagcatcccagagattttgcggcagcgccgcgccggcatagaaggcgaatttcacctcgccgaagaagcggcggcgcaattcctcgtcgcttcgcagcgaggcgatcagcatgtcgaagccgcgcggcacgttgaaatagaccgtcggcatcacgctcttcagattggcgagtgacatcgcgaacaggccaggagcaggcttgccgccgtcgatatagagtgagccgccgttgcgcagcacgagattgaaattgtggttggcgccgaaggtgtgactccagggcagccagtcgagaatgacgagattgccgcggctctcttcgaggaaggtccaggtctgcgccttggcctgctggctggaggtcagcatgcgctgggtgttgatgaccgccttgggcgtgccggtcgaacccgaggtgaacaggaactttgcgatcgtgtccggcgtcaccgcggcaagggcctttgcgacctcggacgtctctggcgattccacaatggtgcggaagggcagcgaatcggcgtccttgtcatggccgctgatgatctgggccgtgtgcagcggcctgatcgcggccagcgccgctgcgaaaggcttggttgcggaaacatagatcgcgcccggctcgagcaatgcgatcatgctcttgagcttgtcgaagtctttcgacatcagcgaataggcgggcgagatcgcggccgagggaacgcccacgtgctgggcggcaagcgcgagcaacgcgtggtcgatactgttgtcggagaggatcacgagcgggcgttcggcgctgaggccctgcgccagcatccacgacgccgccgcgcgcacctgccgcagcgcctgcgcgtaggtgacggtggtccagggcgcctcgacaccgccacgttcggccaggaagatcgtatccggcgtttgccgcgcccactgctccagccagtcgccgatgcaacgcgcgatcgcgcgcagtggctcgggcgagcgcagcacgatactgccgtcggcgcgatgctctgcaacggtccttggtgttgcgaacaggcctgcaacgtcaccgtctgggacgaccgtcatgtgtttcctcctccgcccggatacgggtccggccgcagcctcgttcgggccgctttccataatgttgggcacggcaattgttgtcgtcaacaacaatctttctctcgggaccacgaggcgttagcatcgcgcgacaggagacaccgacgtgacagccagcgtagcccgggcggacaatcgcccttcccctcgcaagcgtgccggcaatggtgcggcggctcgcgatgccgccgacggcgtcggcctcgacgcgctggccggccacgccggctatgcggtgcggcgcttccagatctggatcttccaggacttcatcaagacgctcggcgaggtggacatccggccgacgcaatattcggtgctgacgatcatcggcgccaatccaggactgtcgcagatggccgtggcaaagcggctcggcatcgagcgcgcccgactggtgcatctgctcgacagcctcgaacagcggaagctggtgaagcggatcaagtcgaagacgaaccggcgctcccacgccttgcacctcaccgcgcagggcgagaccgcgctggcgaagttcaagcggctcgcggccgagcacgagcgccacgtcgaggcgaagatcggccgggagaaccgacaacacctgctcaggatcctcgccgactttacctgacccaatctgctcataatttaagcagatgcgcatggccgcgggttgacgcgcgctctccaagcgagacgcaagctactcggaaaactacagttttgggatcgcgcggccgtcgttgatcctgtacacaatggcacatcgcttgcttccctcgggcgaggacagattgccggagttttgtcgccatgggggctgagcagcctgaaacgattgccgcgattgtggccgcgcatcgcgcggggacgcggacgccggcagagacggtagcgcggacctatcagcgcatccgcgaccacggcgacccagcaatcttcatcagcctgcgcgacgagaaggacgcgatcgcggacgccgagagactggccacggcggatgctgcgcgtctgccgctctacggcgtgccggtcgcggtgaaggacaatatcgacgcgctgggctttccgaccacagcggcctgcccggccttctcctactcgccggcacgcgactcgaccgccgtggcgcgcctgcgtgccgccggcgccatcatcatcggcaagaccaatctcgaccagttcgcgaccgggcttgtcggggtgcgctcaccctacggcatcccgagaaacccgatccgtgacgatctcgttcccggcggctcgagctcgggctccgcagtcgccgtcggcgccgggctcgtgccgctttcgctcggcaccgacaccgccggctcgggccgcgtgccggcaatgctcaacaacatcgtcgggctgaagccgagcctcggcatgatctccaatgcgggcctggtgccggcctgccgcacgctcgactgcatctcggtgttcgcactgacggtggacgacgctgccctcgcgctgtcggtgatggccggacctgacccggcggatccgttctcgcgcgaccggccgctcggtgccctcacgccgttgcctgcgagcttgcgtctgggcgtgccgcgcaacggacagctgatcttcttcggcgacaaggaatcggaagccgcttacgccgatgcgctgaagcgatgcactgcgcttggcgccacgctggtcgaattcgacctcgagccgttctacgagaccgcgcggctgctctatgagggaccgtgggtcgcggagcgctatctcgtgatcaaggatctgctcgcctccgcgcccgatgccatccatcccgtgacgcgcgagatcaccgcggccggcgcgcgactgaccgcggcggagaccttttccgcgctataccgcctgcaaggcttgcgcaagatcgccgagcggacgtttgcaggcatcgacgcgctggtgctgccgaccgcgccgacggcctatacgaccgcgcaggtcctggccaatccgatcgagctcaacagccggctcggcacctacaccaatttcgtcaacctgctcgacctctgcggcctcgcggtgccggcggcgatgcgcgcggacggcatcccgttcggcgtcacgctgctcgcgcccgcaggacgcgatgcgatgctggcgagcatcggccgcgtgttccatgccgatacgaagctgaccatcggcgcaaagggtacggcgcagcccccgctcgcagcgctcgccaccagcaccggcgacgacataccgatcgcagtcgtcggcgcgcatctgtccggcatggcgctcaacggcgaattgaccgcactgaacggacgcctgatcgaggcgacgaagacggcccccgactacaagctctacgcactcaagaccacaccgccaaaaccgggcatgctgcgcgtcgcagccggcaagggcgccgccatcgagctggagatctggtcgctgtcgccgtccgccttcggcaggttcgtcagcgcgatccccgcaccgatggcgatcggcacggtgcgccttgcggatgggcgcccggtgaaggggtttctcgtcgagcccgaagcgctgggcgacgcccgcgaaatcaccgcttacggcggctggcgcgcctatatggcggaagccgcgacggcgtagacgacagttgcgatctcacgccgatttgcgccaggcggcttcgttcttcttctcgtaatcgtcgaatgccttgacgaggcccgacagcacctcggccgacgtctcgaacatggcagtgagctgcggctcgtcgaccttgcggatgtcttcgcgcagatgcgtcacggtctcctgcagacgttgcttcattttctgggtgtgatgccggggatctttctcggacgacgccatgatgcttctcctcatcggatcgatgggagcaaacgatcgccgcaaagccgggttcccgacgggagacctcgctccttcacctcctggtgaacgcataacaatcaaaccgaaacggcgtagatctcatactcgccgcgcaccagttcgatatgcgcgcgcatcgcggcggccgcaccctgcttgtcgccgcgcatgatggcgacgacgacgcggtcgtgctcggcctgcgatttcgccaatcgaccgagattgcgaaattgggcgcggcggaacggctgcacgcgcacgcgtgtcgccaacgtgatctcggcgatgtagccgttctgcgatcccgcatagatcgcgttgtggaagcgttcgttgacctcgtggaagcgatcgggattgccggcgtagctcagcacccgcagctcctcgtggatggcttccaggccgtggcgctcggccgccgacatgcgttcggcggcaaggcctgcgcacaatgcctcgagctcggccatcgcctcgaacatgctcttgagccgcgcgatggatggccgcgccaccaccgcgccgcgatggggccgcgcctcgaccagcccgctcgccaccagctggcgcagcgcctcgcgcaccggcgtgcgcgagacgttgaagcggcgtgcgatgtcggtctcgtccagcggcgcgcccggcgccagcgttccccgcacgatctcgtcggcaagctgcaggcgcagttcctcggcgcgcgtgaccttctgcagcgacgacaacgcccggtcgacgcgcggcactaccggctccgacggtagtgttccccgcggaagatcatcaagcgtcatgcggtctctttcggctcgtcgatcatgctgacatgggcggcgacgacgcgccatccttccggaaagcgtatccaggtctgcatctgccggccgaccttgccgggcgccgtgtcgcgatagaacagggtggaggccacggccgtgtcgcggccatagctgctgatgacggtctttgcggtgcgccgattcagcccgacgggggagcgggcggcgcggaagcctgagatcgcctcgtagccataaaggttctcgccgatgccatagcgcagcgtgcggggatcgttgcggaagagctcaccgagcacagcgacgtcgttgctgacgagggcctgctcatagcgttcgaacgcggctttgacttccgcgatcacgtcggggagatcaatctccatctcaaaatcctctcaaagtcccctcggcgcgggcgcggcggctacgcccatcttttccagcgtgtgggcgacgcgcaacgcgatgtcctctcgccagggcgcggcgatgatctgcacgccgatcggcagcggctcgagcggcaccggcacggcgacgacagggaggccgacgaacgagatcggctgcgtgtggatgccgatattggcacgcaccggcagctcgacgccgtcgagattgaaattgacctggccgagcttcggcgcggtgcagggcgtcgccggcgcaagcagcacgtcgacggacttgaagatctcggcaagctgcgcgcgataccagcggcgaaacttttgcgcgcgatcgaccattggggcgggcaccatggcgcccgcgatcagccggtcacgtaccgccggatcgaaatcgttcggacgcttgcggaggcgatcgagatgcagcgaagcaccttcggtcgtggtgatgacataggccgccgcgcgggcacgcgaagcttccgggatatcgaccacctgcgttgcgccaagcgccttggcaacgcggccgatcgcctccaccgcttccggaaacacgttcttctggaagtggccgccggcgatggcaatgcgcaagtccgagatgggattggcgatcaaaggcagcgtcggctcgaggccgcgcgtcgtgcaggcgctgtcctccgcgtccggcccttgcatcgcatcataggcgagcgcgagatcggcggccgagcgcgcgaacgggccgagatgatcgaggctcgccacgaacgggaacgagcgcgcccgcgacagccggccataggtcggcttcaggccaaagatgccgcagaaggaggacggcacgcggatcgagccgttggtgtccgatccgagcgcgatcggcaccagcgcgccaccgacggcgctgcccgaaccgccggaggagccgccgctcatccgcgtcgtgtcgtgcgggttgcgcgagggcccgtcgtggatgttctcgccggtgaagtcgtaggcatattcgcccatgttgagggcgccgacgagaacagcgccggccgcttccatgcgctcgatcagcgtggcatcgcgcttggcgggcgcgaggtcgcggttgatcttggagccggccctcgtcggcagaccagcgacgtcgaacaggttcttcaccgcgaacggcacgccggcaagcgggccgacttccttgccggcagccaggtcggcatcgatcgcgcgggccttcgcgcgggcgcgatcggcagtgacgtcggtgaaggaattaaggacaccatcatgctgcttgatgcgcgcaagcgcggcttcggtggcgtcgagcgccgacatcttgccgccggcaaccgcgctggcgatctcggaggctgtcatttccggctttgtggtcatggcagcatcaggccgtgaagatcggtgccggctcggtctcgtccggcagcgcgaattcgtcgacgaggcgggcgagccgcagcgagacgtcgagattggcgcgcaccgaaggccgccaggcctcctcgatcggaagcgccagagctttcgatacggcgtcgatatagtcgtccaggggttcggccatcacgctctcaagcaatcagtgcaccggcaacggcggatgcgggatcgccgtcagcagctccttggtgtaatcgtccttgggatcgctgagcacctgctcggaagagccctcctcgacgatccgtcccgtccgcatcacaatgacacgatcgcacaacaagcgcaccacattcaaatcatgcgagacgaacagatagctcatacctaggcgctgcttcaggtcctggagcagattgagcaccacggcctgtaccgagacgtcgagcgctgcggtcggctcgtccaggatgacgagttttggatgcagcgcgatggcgcgggcgatgccgacgcgggccttctggccgcccgacaattgatgcgggaagcggtcgagcagattgtgcggcaggccgaccatggtggccagttcctcgcagcgcgctcgcagcgcgtcgcggcccttgatgtcgccgagctgcataatgggatcggcaattgcgcgcgcggcggtgaagcgggggttgaggctgtcggtggggtcctggaacaccatctggatgcggctgcgctgcggcatccgggcaaaggccgatggtgcgatggcggatatgtcctcgccgtcgaactggatcaggccggaggtctggtccaggagccgcatcaccatcatcgacgtcgtcgatttgccgcagccggattcgccgaccaggccgacgctctcgccatggccgacggcaaaggagatgccgtcgacggcgcggaacacgtcaggctcgaccggcggcctgcggctgaacaatttgcccagtacggcggtcgcgccctggcgggggtattccttcacgagcttgtcgacgaagaggaggggccttgcactctcgtcaccccccatcgagggagaggcgtctttcgaagttcgatcgatggccggttcgggcccggccatgacagacggagattgcgccgctacgccctcctcctccggcagcaagtctcgcaaggacacgccgagccgcggcgtcgcacgcatcagcttcctggtgtaggggtgctgcgggttggcaaagatgtcgacggccttggcggtctcgaccacgcggcccttctccatcaccacgacgcggtcgcaataggcggcggcgaggcccaggtcgtgggtgatcaggattgtcgacatcgcacgtcgcttggtcagctcgacgatcaggtccatcaccgccttctgggtggtgacgtcgaggccggtggtcggctcgtcggcgatcagcagctgcggattgcaggcgagcgcgagcgcgatgacgacgcgctggcacatgccccccgaaagctcgaacggataggcgtggtagcgctcgcgcggacgggctatcttgacctgctccagcgcctcgatggccttctcgccgcgatcggaaaccatcgcctgctgcacatgggtgcgcagcacatcctcgatctggtcgccgaccttccggatcggattgagcgcggcgcgcgggttctggaagatcatcgagacttcgcgcccgcgcaggtcacgcatctggtcttcggtcgccgccttgacgtcgatgcccgaaaacatcaccgagccctcggcgatccgcccggcgcggtcgaggatgcgcatcactgcataggacgtcaccgacttgccggagccggactcgccgacgatggccagcgtctcgcccttggcgacggaaatgttgacgtgctgcaccgccttgacgatgccgcggcgggtgctgaactcgaccgtgagatcctggacgtcgagcagaggcggggcggtcatgaacgcctcccgtcgctcgagagttcgaaaacaaccccatgcacagtagaggcgcgactgaaatcgttggagaatttgcgacaggcgtttgccatcacgtcctccgctgcgggtcgacgatgtcgcgcaggccgtcgccgagaaggttgaagcagaacacggcgatcatcagggcaaggcccggaaacagcgcgatccaccattcgcctgagaccatgaagccggcgccttcggcgaccatgataccccattcggcagtcggcggacgcacgccaaggccgatgaaggacaggcccgcggcgttgaggatggcgtagcccatggtcagcgacatctgcacgatcatgatcggcatgatgttcgggaggatgtgcaccaggaggatgcggaattcgccgttgccggacagccgcgcggcctgcacgaagccggcgttgcggcggacattggcctcggcgcgcgcgacgcgggcatagagcggaaaattcacgatcgcggtggcaaggatgatgttctgcacggtgttgccgagcgccgcgacgatgcccatcgccagcacgaacagcgggaaggccatgatggtatcggcgatgcggccgacgatgcgatcggtccagccgccgaaatagccggccgcgatgccggcgaggccccccatcaggaacaccagcgcgaccgaggcgaccgcgatgaagagatcgaggcgtgtcgcgacgatgacgcggctgaaaatgtcgcgcccaagctgatcggtgccgaaccaatgcgccgccgatggcggcttcaaggcggcggcggtgtcggaggcgagcggatcgtaggggaccacgtaggggccgaggatcgcggcggcgaggatcaggaccagtagcgcgaaggcaaagccggtgaccttgttctcgctcagcacgtagcgggtctgatcgaggattgcgacccatcccgaggtccgcgcgggaccgacaggttcaacggcaggcgaaacggtgctcatcgaatccccctacccttccagtcgcacacgcggatcaatcacgccgtagagaatgtcgatcacgagattgagcagcacgtacatgacggccatggtcagcacgaagccctgcaccggcgcgaaatccgacgagatcaacgcttcgacggcgtaggagccgatgccaggccaggcgaacaccttctcgaccagcacattggcgccgagcaggaacgagaacaccatgctgagcgtggtgatcacgggcagcatcgcattgcggaaggcgtaggtgacgatgacggtcgatggcgacaggccgctggcgcgggcggtgcgcacgaactccgaagccagcaccgccagcatcgaggcgcgcgtcatgcgcgcgatcggcgccagggagaagatcgcgagcgtggttgcaggcaggatgagctggctcagcgcggagcgaaacgcctcgacatcgcgcgcgaccagagtgtcgatcagatagaagccggtgacggtcggcggcgcgctgtagaacacgtcgaggcgcccgagcggcgccggcgaccagccgaggcggaagtagaacacatagaccagcacgaggccggtgaagaacaccggcagcgacacgccggccgtggtcgtgacacggcagagatgatcgatccatgaccccggccgcgtcgcggcgagcacgccgagcgggatcgcgatcgcgaccgagacgaacaggccgagcagcgtgagttcagcagaggccggcaggcggttgcggatctcggccgcgaccggttgtcccgtggtgagcgagttgccgaaatcgccgtgcgcgagatcattggtgtagcggaagaactgctcgatcagcggcttgtcgaggccgagtttcttgcggatctgctcgacggcttccttcgttgcggcgggaccggcgaaataggcggcggggtcaccgggcagcgcccgcgtcagcaggaaggtgacgatgacgacgccgatcagcgagggtatcgcgaacatcaggcgcttggcgatcatggtcagcatgagggcgtctcgcgctttgctttgaaacgagatcgcgctccgtgcgccgctgcgttccctccccccttgtgggggagggctagggaggggggtggctccgggagctgtctcttatacacatctc

SEQ ID NO: 283 - DNA, 48262 bp, Bradyrhizobium colbertium
  misc_feature (11093)..(11102): n is a, c, g, or t
  misc_feature (11909)..(11918): n is a, c, g, or t
  misc_feature (21121)..(21130): n is a, c, g, or t
  misc_feature (46650)..(46659): n is a, c, g, or t
  misc_feature (47473)..(47482): n is a, c, g, or t
  misc_feature (48066)..(48075): n is a, c, g, or t
ctattgcgaaacgcagccggtccatacattgggtcagcgccggtgcgtcgttgatcccgtcgcccaccatgccgaccttcttgccctcggcctggagctccttcagccgttccgccttctggccgggcagcacttcggcaagcaccgtatcgatgccgagctgcccagcgatgcgttgggcggtttcccggttgtcgccggtgatcatggccacatcgacaccgcgctcgcgcagcttcctgactgcggcggccgaagtggggcgcggggcatcggcgatcgcgatgagcccgacaagctcgccgtcccgcgccacgtggaccaccgtctgacctctgccttgcagccgcccgatctccggtgccagcggcgacagatcgatgttgccttcgtccatgaggcggcggttgccgagcagcacgatgccgccgccaacctcggctcgcgctcctcgtccttcgagcacctcgaaacccttcggatgctcgacggccaggccctccgaccggcgcaagatcgcctgcgccagagggtgatccgatccctgctccacggcagcggccaatgccagaacctcgtcctcgctcgagccgggcgcggcgaccacctccaccacctcgggctgaccgagcgtcagcgttccggtcttgtcgaacacgatcacgtcgagcttggtcgcctcctccagcgccgaggcgttcttgaacaggatgccgttcatggcgccgagccccgtgccgaccattacggccatcggcgtggcaagcccgagcgcatccgggcaggcgatgacgaacaccgtgatggtgagcgtcagggcgaacagcaggggctcgccaatccaccagaaccagaccgcgaaggtcgtgagcccgatcaccatggcgaccagcacgagccactgcgaggccttgtcggccagaagctgggcaggcgccttcgagttctgcgcttcctgcaccagcttcacgatctgagcgagcgcggtgtccgcgccgaccttggtcgcgcggtatttgaaggtgccgctcttgttgatggtggcgccgatcacagcatcgctgggccccttcttcaccggcatcgactcgccggtcagcatcgactgatcgacctgcgactcgccctcgatgacctcgccgtcgaccgggatcttgttgcccgggcggataacgacgacgtcaccgaccagcacctcagcggtgggcagctcgatctcgcgctcagcccgcagcacggtggccatcggcggggcgagatcaagcagggcccggatcgcctccgaagcgccggcgcgggctcgcatctcgagccaatggccgagcaggataaagacgaggaggacggcgaccgcctcgtagaactgtacgccggagaagaagaaggtcgctccgacgctgaacacgtagcgggtgccgaccgacagcacgaccagcaccgccatgttgaggacgccgttcctcagcgcccgccaggcggcgaccaagaacggccagctcggatacacgacggcggcggtggcgagcaggaacagccaccgatcgaggcgaagcccgaagggcggcgccggcggcgtgaacatcccgcccatcggcgagtagacgaagatcgggacggtgaagatcagggcgatccagaagcgattgcgcatgtcgcgcaccatcgcctgcatgtccatgcccgccccgtggcccatctcgtgggccatggtttcccccttcccggaagccgccgcctgctcgccgggcatcgccgctgcctcgtgggcttggtggggcgcgtggccggcgtgggggcggtgcgagtcggccggaggcgctaccgtcaacgcctcgcccggcgggtcgtcgggctcgcagacgtgcttcggcagcacctggccggtgcagtggtaaccgcactcgcgtaccctgctcttgatcgccttgagaccggtgagggtctcgtcataggcgaccgtcgcgctgccggcggcgtagttgacctcagccttctccacgccaggcagacgagcgagctgcttctccacaccgagcgcgctgagcgccgagagcatgccggcgacttcgattgtggctgtcttcatcgtgccatcctccttgcagacgcgccgctggcgctcatgaggcaatcatgccgttcttgaggtatgcttcctggtattcaaagatgatgtccgggttcactgccagcgctgcctcgtccttgtcgtcgtagtgcaagcgcgacaggaggtccttgatgaggtcgagacgcgccaagcgcttgtcgtcggcgcgcaccaccgtccagggcgttaccggttgtgcgtgcgggcgaacatctcgttgcgcgccagactgtagtccacccagtgcgttactgcccgagcatcaatgggactgagcttccaccgtgtgagtgggtctttgcgccggtccttgagccgcctcctttgctcgctttggctgacgtccaggtagtacttgagcagcttgatcccggacaagcacagccacctcgcgcttcccagtggtggtagagtcgaggagaggcgcggtggcttgagccgtgctggcatcgctccgttcctctcctcgctcatcagtagggtcgaagactggcgcgccgacaggcttctcgaccgtgccacgtttccagggaaagctcgttttggtcgaaagggcttttcgggcgggagcatagccgccgatggaaggaatttcggatcactttgttcggagctaccccccaccgctcccaagccgcttagtccggtccgcctcttttctgtactcaagcgaaatcctcgatggtgccgccgcccaactgcagtacgaagtctgaagtatcggcatctggagatgcacaggtgtgcctcaaaactgactggccttctgtgtggtacttcctatggcctttgtgtggtactccgtggtccttggaaggactccggtggtcctgtgtggtactgggtcgcgacgagagatgtaatcggctcgatccagtcgcgctgcaacgtcgcgccaggactgcgcagctcgacgcgcttggccgcgaccgtcttccgttatgctttcggaacgatcagatccgggagtcaccttgccgctgcggatcgctaccagcttgcgcgcagcgagcccatgccagcgtagctttggccggcactggaaaactcaccggtgaggcgcccgggttcgcgagccggcgactttctcgctgactgcaactacagtctgaacatcatcatcaacaccgcaggtaccggagaataccgccagctcggacacgagagtgtggtcggcgtccaagaagccgtcttgatctccagtgccgaagaggtcagctgcgtctatccctgcgccttgcggtctctgctgatcggcctgccacgccagtcggtctcggcaatggtccgtaatcctgaaaccatgttgtgtcgcccgctgccgtcatcgggcgcgctgcggctcctcctttcctacgtgcagtccaccgacaagatgagccttgacaccccagggcttgccccggctttcgcgacccacgtgcaggatttggtcgcgcttggaattgtggccacccgcgacggcaagcaattggcgcgcggcagtggcctgcgcgctgctcgtctagcggcaattaacctcgatatcggcaagtccctcggcgatagcgagttctcgatcggcgcacttgcgctgcgccatggcgtgacgccgcgctacatccaaaggctctttgagaacgacggcacgacgtttacccacccctcaccgagcagtgattgctgaaagcaagacggcttctgacagatccggaattcgcaggccacggcatcggcgatcttgcgctcagggccggctttggcgacgtgcaccattttacccgcttgtttcgccggcgtttcggcatgacgccgaccgacgccagacaacaggcgcgccgcaggcgctcgggatcgcgagcccttgtcggtagctgtcggttcaaagccagccgaagctattgcaggacgcgctcgccgcaagatcgattaagtcaagtcgtagctggcaaaatcgactactattcaactcggtcgtggagagcgacagggaatgagtgattgtaaccagacagtttctctacggcttgggcgaagcggctgtccgaagtgtagacgaacgcgcctccgaacatggtccatctgtcatccagatcaatcggtacacacacgacattgcccgtattgcgctttatcaaacgaacccctggcgtttcctcactcggcttgaaggggccatcgacgttgacgatgcagacctctgtgtaccttgcgctcacgccgtcgtttgagcaattgccaagcgaagagtcgtaaatatgagcaagcattcccatgattccatccaaactttgaggcctgttgaactaccagcgctcggcactggcgataagtgatcgcacgttgaaaatgatccgttaatacatcgtgacccagcgttcccagctgcgcagatactatcgacagaagcgtgtcgcgacacgatatcctatgcgaaagctcttcaagaacgataagcgcgttcctcgggataggatacgggccggcggctcgcggtgctgggacaaagattcaactttgcacgattcgattggtagttgattggccctattctggctcacgtgtggccccgggtggcgcccttaacctccgccacctacttacctgcatcatggatatcgatcccaaaactctgcgcgggcatgtgaatcggctcaaagccaatcgtgtcgcttcgccgatcggcaaggtcaagaccggcgcaaccgaaatcatccgcaagcatttcgacgagcttgagcgcctgcatcatgaagacggcgcgagctggaccgaaatcgcgagcggtctggcggcgcagggcgtcacccaaggggagggacagccgcttacggggcggcggctgacggccttgatgcacaacatccgaacacgggcggagaagctgaagggcaaggcgatcccgcgcgatcggaccaagatgccggccgaaagaccccaacaggatggccggaccgccaggaagaccctcgcgctcagcgcggagatgatgggcccctccggcggttcgctgatggacgagaccattagtgaagacgagatccggcgcaccgagcttgccagacacgcccacctcctccgcaagcgctgatcggacctggcaggcaattttcaattggcctgcaaacctgggcgatggttctcgctagacctcctgcttcacccacctggcggaccgcaaccggattgcggctgcccttgtgcccaggagcagtcccatgccacgccttttgctcatcgcccaggagaccggcggtgtcggtaagtccacgctcacccgcggggtcgccgaagccgtgcccgacgcgccgatcattgagctggaatccacgccgcggatcctggaatacgaccacggcaaggccaagggcttgaagcgggtctcgcatttcccggtgcgtgccgaccgcgcttcgatcgaccgcaccggcggccaggccgcccgcgccgagttcgacggcccgatcaacgccatggtcggcgccgcattgccgaccatcatcgacgtcggcgccaacaccgcctcctcattgctggcctccttcgacgacgagtacgtcgcaggcatcgccgacagcgggatcgagatggcgctggttgtggtcgtgaccgccgacgcggcggcgttgagcgacggcgccaagctgctggcgtccgccaagcgctgggccaaggcgcgcttcgtcgtcgagaacaagctgcgcggcgacgtcgaccccgcgatgctcaagcgcgtcgccgacggcgcgctggtcacggtgctgccgaagttcgagttcgaaccgcgcacgctcggcttcctgcaggccacgggcctctgtgccatcccgcagttgaagacctccgacttccagaaggagtacggcttcagcgaggcgcggcgcatggtgagcgacctcaaggcctttcgcctggcggtgatggaggcggttcgcccggcggctgtgtggcttgcgtcatgagccagcgccttgcaaccctgcgcaagcggttcgccagcgcaaaggcggacgccgatgcggcgaaccgcgagatgcgccaggcgagcgccgtcaagctcgccgagcttcgcgctctgccggaccctgccgcacgtctggcagggctgaaggatccagcgctgcttccctatgaccgcgagatgctggagcggacggtcgcggatttgttgccgcggcggcgcatccagcttccgcgcagggtcggcggcttcgcgcgatccgtgcttcggcatgcccgttaccattggcgcggcctggtgatggtcaccatgatctcgatccctgtcatgatgatcggcggttttgcggccaacaacaccggttacacgacggttcatttcgaccgggacctcgacctcatctggacattgccggacgggcataccgaactccatcgactgacgaccggcaccgcggtcgtcgtgatgggtcggactgcggctggagacgttcggctgcggatctggtcgccagcagaaggccacctcgacgccatcatgctggcaaatgcctacgcgcggcttgcaatccccaaggagtaatcaaatgttctggaagatcttcgtgccgctcaccatcctggccttcctgttcggttttcccgtcgcggaatttatggtgcatggctttgacgcctcgctgtggccgaacacgatccagccgccgtccgtctggtttacggcgatgcgggacagttggggatgggattcgctgcttgcctaccgcgacatgacatttggccagaccaaggctttgggctcctatggccggactgctctcgcctggatcctggcgggaccgctgctggccttcgtcgcgtgctttgtgccgaactacggaccgcggcgagatcctcgcggcacctacggcgatgcccggtgggcgagccgcaaacagcgggcgcgcatgcgcatcggcctcgagctcggcctcgatcccgacagccgtcggccgatccgcgtctcgaccgaaagccatctcgtcaccatcgcgccgccgcgcaccggtaagacgtccggactgttgatccccaatctcgccgtccccgacaacaagggctggtgtgggcctgccatcgtcatcgatcccaaaggcgaggcctatcgcgcggtggtcgcacgccgcaaaaccctcgggcgaaccgtgcgctgcctcgacccgatcgggattgtcggcggcaccgatagctggaatccgctggccacgatggacccggcggacatcctgcatctgcagcgtgtcgcccgcgcgttgttgccggagcacgccacaggcgaagcggtgtatttccagaaccgcgcggtcgacgtcatcgtcggcgccttcctggctgcgcacgccatcaagcgcccgatgcccaaatgtgccgcatggctgttgtcggacgtgtcgcgcttcgaaaaggcgcttgcgccattgaaaggagcagccgcggcagccgccaagggtgtgcttgccatggatccgaaagggcgggactcgattctgtcgaccgcagcccaggcgttcagctggtgcgccgacgaaagactgcagcgcctgacggacaagagcaccttctccatgtcggacgtgacgtccggcaacatggacctgttcatcacattgcctgccgaggacatgaagacgctgaccccgctgatgcgatggttgctttgcgagctcttcaccgccgtgcgacgccgccgggcacgggagccgatcatgtgcttcatcgacgaggcggcgacccttggccgcttcgaggaactcctgatcgctgccggcgagcttccgggacaaaatctgcggctctggactttctggcagagccgtagccagatcatcgacatcaacggcgccgacggcgcccgcacgctgctcaacacggcggagttcaccacctattccgatctgcccttgatcgatccggacgagcgcgagtttctctcgcggtcgatcggcgattacacgctgatggacatggtcgagaccaccgacgagaaaaccggtaacacctcgcgagcctttcagcccaaggcggtgcgtttgatgagcgaggatgccatcgggcaggtctcgacgacggacctgatcgtgtttcccaacagcaagcggtacaccaagcggccgatgatcctgcgcaagaccgcccatagcgactcccgcctgactagtcttgtcgtctccgagccgcgctgaggacgggcccaggccccgcagcctggttgttgtaggctcgggactcgttgatgagccgcaagatgttgcagcctcaccgccacagtgagatgacgaaaatgattcttcgtgctgtctgacgaccgaaggtcgcgaggggacgcacggcccgggtactatcttgaaatagcgcccgggctccagcgtctggcgcaacgccctggaggactttagtttagagcggctgggggcggcagcgggccggggccccagatgaaattgtcgatggactggctgcgctcgacgccagcgacttggacagtcaaatagtcgtcggcctcgcgatcgatacgattctcgtacacccctaccacttcccaatgggaggatggcaccacttctgcagcatcggctgtcccctcatccgcaatgatccactttgcccaataatggccgggctctttgggtttacctgtcatttaacttccttcgcagtcgcccgagcttgccgcgccgacaacgcaagcctacacgtcgagcttgatttaagtccttcgacctcgtgcgcggcggagcggtggcaatggcgagaggccatgccacgagattaaacagcgggcgccacgcgcgaagtcgaagcggccctcagattgaggctaaatcggacaaaaagatgctgtcaatgcggcgcgcaaggaatcgggttgatatctttgccgcggtgctcccaggcacgtcctgcatacgagcacaggtccagaggcggacgacggaacaatattgatgacgcgggagatcgccgcgcttcaggtctgcgacggcaggaggcggactcgcgacgaggcgccgatcggtcacccctctagccaatttatgacgctcactttagagctgcacggccgcagaaattctttcagctccgagagcacgccttctgagtcatgcccgtccttggaccatcggcctcagaaggagggcgccttgcgcttcgagcttggcatgatccgcttcggtgagtttggcgccgaacgtcgagaggtcctcgccagggcggaagtgcacgacgttgtagggatggctggccccgagctttttggcccagtcccgacctgcagccatccagtctggatagcgatgctcgtcgatgagcacgatatcccgcatcagcttgttggccagttccttcttgctctcaggcatgggttcctcagtgggcgcaaacttgatcctgccaaaccgtctaacgaagaaccgtttaagataagcatcgcacacgattgcaagtcgacgagccgctttaacgcgtcggaaacgagtagacgcacttcaacgaatggtcccgaagctatcttccctgcgcgaatttgcactcatcgtcttgaacatgaaaaaactatccaaggttgggcggtgttccttcgcgagccgggccgtgaggcccggcgagcgcggcctcacgcgtcaacagccgatccggccagccggatcggcgcaaaatcgcgaagttaaacggcctgcacatcagccgtgcagccggtggacggctgcacggctccagcgatgctcaagcggcggcctgctccaacagccgctttgccttgccctcaatctcaagccgcgcatcctgatgagccttcccacgggccagcgcggtgatgccttgcacgaaatcgaaaacgctttccggcggccgaccttcttcatgcaggacggtttcgatgatcttagcggtctccgacttggagaaaccgcggttgcgaaggaagctgtctcggtcctcttcggtccgggccacgatccgctcccgcgcggctcttattcccgcgacgaacggtgtggccgaggaattggcaaagcttgtgagagctggcgccgcttcgtgcgcaaagcgctgcgccgcgaacttggaatgacggatggtgatttgctcgaaattatcgacaccccagagattgcgattcatgcagaccgcgcgaagatagaagctcgcaatgccgagcgtcttgctgccgacctcgctattccagcaatagaagccacgaaagaacaaatccggcgatccgtccggaagccgtcccgcttcgatcgggttggtatcatcaaccagaaacaggaagacgtcgcggtcactggcgtaaagcgtcgtggtgtccttggtgatgtcaacgaacggattgtgggtcatggtcgcccaatccagcacccccgggaccttccatctcgtgtcgcctgtcccgttgccggcgatcttcatcacggctgccgccagttcatgatcccagatgcggccatagtccggtcccgtcaccgcgcgaagctcgacccgcccatcatcggcttccaatgtcttcaatagctctccacgatgtgacagcagaccgtgttgcaggttgatgccggcgagcggcgcgggaagctgccgcatgtaagaggtcggggcaccgacaaggctgcacaactgcccaaagctccaatgcgtcggaaggactggctcgctgcggcccggcaccatcaaggcgagccgctccgcatcgtcgcggcttgcctcaacccgcacggcgcggctttccacggtccgggtctgggcgcagtccgcgcggcggcggacagcgtcatgaagatcggtcaggctgagataacgctcgtcatcggggcgggaaaaccactccgaagacacgcggccgacgcgctcgccgcgcgagatatcaacgcgaaagccgctggtaacaggctgctcgttgcgggtcagggtcatcacggtcatgggtctttctcctatgggctggggttaaagcgcagcgctgcgctgcaaccctgcccgtcggcgagaccggggtagcaannnnnnnnnnagcaagggcggcgggacgcggagggggatcacccgcccgaaggggcgcgcatccggcgcgcgtctgcacgcgcccaacgaccatgtcgttcaaatatctcgtgggcgcggaagaccggggaaaccgctcccgccggcaccggcttcggtgcttcacccttgcgcgcgcgagggcggagcccttagcgatcgtcctaaaaaagcatgaacgaggctcttgccgaaggtcttcaactcttcctgtagcgcgtcgagccatgggaacaaaaaaagccccgcctccgaggaggcggggcggattgatccggccgattactcgccgttgcggcgggaccagatcagcgtgtagctgtcgtcgccttcgcccttgaccagcgaggcgtagatcggggccgggaagctcggatcgtccagcttgaccgagagatattcgcggtcggtctcgcgcgcgatcttcttccaggctgcaccgaactcggtcgctcccgaccggatgcgatagtccggcgccttgtcgttgtctttttcggatgcgacgaaggtcgccttgacgttgagcgtgagcgttttgaccgagccggtgaagccgttttaggtcagccgtcaactgtccttttgaaacgaagcctcaggctttgcttcgctatctgatggaggacactcccgagcgtcctttagctggatcgcggcgccccggggtggagcgccgcgttcgctgactggtggcctcagcgcgaccagatgaggacgtatccgccctcgttctcgaccaggctcgcgtagatcggagcggggaagctcgggtcgnnnnnnnnnngagcttgacggagtggtattcccggccagtctccttggcggtcttcttccacccggcgccgatctcaatagtgcctgcgagagcgcgaagatcgggcgacttgtcgctttccttctcggcgacaaccagacgggtcttgatgttgaggttgagggtcttgatcgctccgacgaaagagccgtcttcgttgcgggtgaacgtgccgatctgagccatgggtcttctcctttgctgtatcaggtcgcgaccatcgcggccttgatggcgatcggaaaacaccgggcgaccggcccgcacccgaagggctggaacgaagtggaaggcggcgcagggacgagcttcttgcctcgcgaggaagccgcgcggaggcgtcagccgagcacggcggggaagaaggtcggcatcgcgctgttgcgggatcaagggcgggctgcgcagcagccgaacgcggtgtgagatacgccagcaagaaaggccgcaatggacgcacttctggacagccctgcgaaggagagaccttggctcacggcgtaaaagcaccagcgacgacagcgtgacggattatcgagacacttcccgcgcattggccacacctcgtcgtccgagagatcgcgatagccacgacgttatcctgcatcgtccggcaacgagctatcggtgcatggcgcggcaaggaggctggcccggacaacgacatcatcagctatcgtctccgtgctcacctaccgaagatcgtagcaacctggggcgacgatggtgatcaagctccttcgtcaactgcgcgacgcggtgttcggccctgtcggcacggcgctccgcttcgatcgcgcgacgcaggagtccggcattctcggtcgcgagctgacgaagctgaccctgcatggtgtcgacggcgatgcgctgttcggcgaccttctccgtgatggcggcgacccgactgggagcccgccgctgctgacggacgcgggtcagctcggcgaggatatcgcggtgattggcgtagatcgcgttacgaccgacacgtgcttcccgcgcgagggctgcgacggtcaattgccgttcgatcatcggagactcatcggagccgccggccaggcggtcaagggcggcgcgcagcttcccggctgtggcttgcacgcgtcgatcaagtgggtttgcggccgtcatcttcggcacgggcttctcctgtggcggaaagatcggaaaggacacgctcgcactcggcgatgcgcgtcttggcgagagcgatgctcgatccatcgagtcgatcgtcggcgagcaaagcgagattgcggtcaaggcgcgcttgccagaccgggcgatgccgctcggtgaccgcgaagttggcgcagctcatgcaagtgctctcggtgcgccactgtgggttcggaccacggtcgtcccccatgcaggcggcggactcggcgcgatagacacaatacccccagtcgcagacgccgagccgcatgccgctctcctcgatgaggaaatcgacataagctgtgagttcgccgtcgtgggtacggccgcgaaagcgcgaccgcgacgacaacatgcgtgccgccttgccgccgagacgcgacgcggtgagcaactcctcgagcgcggatcgcgtctcctcgagcgtttgtgcatcgacgagttcgccgagatcgaaatccgttccgacataggcgccgtcggtcatgatgcgtgtcacgtgcccgaaatggtgctgcaaggcgtgaaggccggtgcggtcgcgcttgccgacgaaacgggcgaaggttttgcggccttgatgtgtggtcagacgccagggcgttccatcgtcattgcgcggcatgtcgatgaaagccgcgaatctctcgtttaggcgaataacgagagaactgccggttgcgacctccggcacgcggcgatcgatgatgccgttcccggcgatggagagccacaggtccgaccggccagtccgagcacgcaggggctctgacaggcgccgcaagacgtcgatggcgcgcagaacgggcggcggcgctggccagagatgtggcgtgccggcttcatttgcggcggtcttgaatatccgcccacggagataagcaaaggcttccgtcttatctgcggacagatgctcctcgacgcagtcagcatcaagcgtcagaatctccgagactcttgcgccgaccagataggcaacggtgacgaagcaagcctcttggatcctgttgatcaacgcccgcaggtgcctcgttcgcgtcagcggcggatgccaaggcgtattctcgccctcgatcgtgtaaaagcgaaatgaagaaacgagcgttcggacggcctgccgatgaacgaaaaaggagcgaccccgatcatccatgcgaaacggcacggcctggtcgcgcagcgcaatgacgtcgtcggctggctgcccgattaaccggattgctgccgagatgagcggaacggcaatagcgtcgggcgtgaatggcaagcgctgtacggtgtggcgactgaacccggaataggcgctcgcgcggccttcgtcgaacgggcgctctgatggtgggtatgcgagcttgcgcctctgctggtagagggcgagcaaaagattagcgtaggcgtgacgggttccaggtctgatcagcgcgccattgtgtcttcgtcgctcggcaatgtcgtgcatgaatcgggcggcggcatcgcgatcgagttcgccaaagctttgcatcgcctcgccggccatccatcggatcaggatgcggagcttgacggccgctgcaacgagcgttctcgcgcgagcgtgccgccggcctggcggcggatcgatgcgaagcgaccacagaaagatgcgcgcatcttccagccagccggcccagcaagggtctgtgaagcggctgccgtccgggagtttgaaatcccaatcgatctggaactgcgatctccgcaggtcagacctccgaccatcgaggtgccattgcgggtctgaccacagcgatcgtaccgaaatcttctgtcgtagatcgatatcgcgggtggaatcagcgtgtggccgcatggtcattccaactccggcaaggcgggcatgccgttggcgagcgcacgcgcagcctcgtgcatcgccgccgggaagtccggaaggatgtcctgcgtgagaatccgccacgacggcgcatagaggaggttccagcgtcggggatcgagccggctgcgggcttgctcgaaccgatcgatggcggcgaggacgcgcgccagacgttccctgtcgattgggattacgaggccgggacacgcaaggcatccgccgaaatgcgggcacagacgctcggcgccatctcggtcggcagcgaccggcgcgagacaatcatggccgaaggaaacggtaccgcgaagctggtcaggctctggcgacgggacgataggcttgaacccgcgaacccatgcgaccatcaggtcttgcaagcgagcgatcgtctggcgctgaaagcgcgtcgtctcctcgctcttgaggtacgtctcggtcgtggcggcgttggcatgattgaggatcgattgggccacgagaatatcgccgccggaggcgcgatagtgctcggttgcgaccgtgccacgaaacagagcgggcgcaaagctggcgatccgcaaacgcgggctgtcggaatgtgctgcattccactcatcgatgcgatggttggcgcgcttcgtgaatctgaggatcgcccgtctgaggacagagtgctcgatcacctccgtgcgattgcggagcgaacgacgggtggggccggaatagatgctacgcgtcaggaacacccgatcctgctggctgggcggtgcgtccacgaggagcggttcggtcaaggccagcatcatctcgatcaggttcggcgccgcgtatcgtcggcgccgatcgaacgaccggcgctgcgccttctgaagccgggcgccggtcttggccttgttccagtcaatgataacgcgatgttcgtcgagcggatgcggaacgaggcagtctcgccgaatgtggcgcaacggctcgggattggcggccgtctggatagcgatcgccagaaaaaacggaacgagcgtatcggttgtgatgtgaagatactgcgcgatggtgcgatagccgccccaagacttcacgagcatggcggactttatcccgtgttcttcgagaacagccctgtcgggcatgcgaccgccctcgatgcggctgatccgccatatccatcgatcgagtccctgacctcgcagtatcttgggcggaagctcggtgcgccggatgacatcctgcccgtgttgaaaccgggcccaaacctcatcgatctcctcgtagcaggcgctgaggatcgccttgatctgatcgggcggcagccgccggcgcggttgctgatgcattcgtctgccgggaaacggattccagggaatctcaagatcacgcgcgagcgctcctggtcgattgcgctggcaccacaatagcaacggccgaagcacatcaaaggccgtggcgtgcgcaccgcgcggcgcgcgggaggccgcctgtgttctgagccagagcacgtagcggccgagcgcggcggtattgacatcacccgctgtcttgatcgtcccatcgtcgacgacgtagcgggcaaaacggtggatcgctgcccaggtcgttcggcgcgtcgcaggcatctggccgacgccatgctcccggaaagcctggaccatgagcccgcgcagatcggcaggcaggccggaaagctgctcaggatcgaaccgttggattggccggcctccggcatcggagaatatgaccgtatcggcgacaagatcagttgccgcattctttggcgtcgcaactgtgatgcgccgattgatcggcttccttttacgcacggccatgaggcaccaactcgccgtagagataggccaggctctcggcgagcgtgtccgcatgaagctcgacgcaacgcagatagattgccgtcgattgaatcgaggcgtgtccgagcaggacttgtacgatcttcagcgggttgaggtcgggcgtcgttgccgcctgcttctgcaggcgcacgagcatggtcattgcgaatgtatggcgcaaccaatggccagatcctgtcagccctgccgcttgaaaggccgcaccgaacgcagcggaaaacctcgctctcgagacgggatcgccgttgctgttgaggaacagcgccgatgacggacggtaaccggggcgcgttctgcgtcggagcttcaccagcgccgcacgctgctctccagcataccagtgggtcctgtcgatcagccgcagcggcggataaacggtgcgcggccggtcgcccttggtaacggtcagcggcactcccacaagtgggtccacgtcgatatccaggtgagcgacgtccggcacctgatgtagctgcaagccgcacagctccttgcggcgcatgccggtggccaaagcccactcggctatcaggtcatagggcgacgaaagatgccgaaacagggattggagctgatcgacgcgtagcggtcgcggcagacgttcaacctccgaaaccgtcagaatgttcgccatcaccgtcgcaggccgatgatccagatgcgccagcatgccttgtcgatgcactgagcgaagggatatgtcgacgtagtcgaagggcaatgcctcgatcagaccgcgccgatgggcccaagaataaaagcggcagatcgtccggacacgatcgttcacagtggaccgggcatagggccgccccgtatgagggctcggcgttgccagcatccggttccggtaggtggcgatcgtttcctcatcggcgaggcgccaatccagctcgctctgctccaggctatcgaaccagtcgtgcaggtgctcgctatacgtcctcaacgtctccatcgcatgcgagcggccgggaatggtggcgagttcgatcagatagccgaaggcaggctcgacaatcgacatctgcgcgtcgagcagaatgggaaagcctgccggaatcccttcaacaccgggcacggcccgcacaatcgaaaccatcctgctctccggtggcaaggcacccggaggtgcaagaagacatcgacatcgtccaagtgcttaccgtgtcgatgaaactgacagatgacagcacacgaataaaagataaacggagcgccttcggcgcgagtcttattttgaatgcgaggggttcccctcgcgctctcccgttcgccacgtggcaggggtgcaggacttcgcctgcaccccttcaaaaagcttgtggtgtcgccgccgcgtcaagcgttgtcctcgctacgctgcgggaacgcttgactcggacgtctgcgtgccaagccctcagacaatggcgctaaaggacacttctcagcgcatgacctaagccgttgttcgatgcggtgaaggtgccgatggtagccatggtgtctccgttctgttgtcgggccgcgaccgtcgcaacctcgatggcggtccttggcctgaggagcgatcggcccgcagccgtcaggcccgcagcagagcgtaggacagctgagacggcttttttgtcttccgcgaggaatgccgccccttagcggcaggggaaaaaagccggagaagctgttgcgggaaggcgatcgaggcacttgccgtccctcgggcctgttccgtccattcgaggttgcagaggacgcggcacatcaacgaactgatcgaaatatcatggctgcgatcatccgaccgtcacaaggaaacggcctcactgaggacaaggacgttcgctggcgcatcaatgatgacaaagctccgagatgaggacgaccgtgtccgatgttgcatcctgcgcgcacgcattcggaggcccctggagagacctcgcggcgttgagcccgcaatgtgatcttggcgagactccgatcacccagacgatcgtccttgctaaaggggcggcagtgaccgcggcatgctaatttggtttcgtcgagatggcgactaattcagcgggaacgatcgaccatcggttctcccggtgcgggatgacagccgacgcgcctcttcctgtccttgctttcgaaatgcgccccgtcggaatataggtatcgtgatgatggccgcgcgccgagggcgcgcggccgaaaaattcggcggttgcgggtgagaaggccgggaccgcaacagggtcccggccttgccgatcactcggccgcgttggcacaggcgttcgcagacccgtcggtgggagcatccaccgctgatgctgtcacgtcctgctggccggcttgcggtgtccgcagcagcgcaggcagccagtccgttgcagccagcaattgttcggcagcgtccgccatgtccggcttcttcatgtcggccatgcggtccgctgcctcagcgccgacggcttcccgcaccgcttcgaggattcgcgctttggtgatgcgcccgagataggttcgcactgtcggtcgccaatagccggtcatgtcgagagctacggcttcggccagtctgtcggcggttgccagcgcacgcgggcgatgaccgcgcggcaatttgaccgcgttggcggtcaaagccacgcaatgcgcaaagatcgccatgcgactgtcgtaatcgagggcaacgacgaacgcccagagatcggcgacatctcgcggcaactgcgccgcccagcgcgcatggcgatccaaccaagatcggcccgctgcggtatccccgatgccgtttgcatgagagcccaggaacaagctgcccggacgaatatcgaggacattagcctcggctccccgatagaacgtctgggcgaccatcgcgtgggtgacagcgataagggcgacgtcgggttgccccgacaaggcgagacgaaggccaagggtccggtgcgccgtgaggtcggcaaccagattgtccgaaaggccggtttccatatcgtcttcgcattcggccgcatcctcctcatcgtcttgtgcggcgcctctggccgtggccttctgcctgatatcgtcttcggggcgaataaagccgcgctcgatgcggacgccaccgtcatggttgagaaccacgaacgcaccgctacatgcgatgtcatcggcgttgtaggccttgcgcaggacttcaaagcgctcgatctcggcctcaagttcgccgaagcggatatcgacatcgtcgggcagttcctcaaagctctcgtgctgcttggtgaggaggtcgaattccgtctgggcggcctcataggcggcttgattctccggcgaaagttcggcttcccggggatagacccgccgcagaccgtgaccgtgcggaaaatcgaggttggcttctacccacttccacccctcattcgtctgcaaggtggctgcgacctgttgcagcttttccagcgcaagccggtccagcagcaccgcatcctcgaaataaccgccgcgatcctcggtaaagagatcgcgcaggatggtcccgcccgcctcaatgtaggcctcatgcccgacgaagatcgcgcgccggtcggcggcggcgacattggtctctgtcagcatccgtcggatcgtagcgggatcgcggctataggtcagacggctatagatttcctcctgcctgtcatgatcgtcgatcagggcgaatgcgaccagctgctcaaaacccatgtcgccgttgcggtaggcatcgatcaaacgcggcgacacgctactcagccgcagccgctgccggaccagatgcggcgtgacgccgaaccgggcggcgatttcttccgcaccgaacccccgttcgtccgcgagcttcttgaaggcctcgaactggtcggcgggatgcatgctttcgcgggtgacattttcatcgaggctgatctcgtgcggatcattggcggtatcgatgacgcagcggatcggctcggtcttcttgatctccttgcgcctgaggcgcaagagttgagcaagcctgcggccttcgccgatggtgacgaaataaaacccggtggccgcgccctcgctatccaattccggttcaacgacaagattttgcagaatgccttttacggcgatgctggccgcataggcttcgatggacgcttcgctgtgcggcgtcttgcgcgcatttttcggggacttcttcagtttgttgagcggaatcaggacttccgcgccgcttgcggcgagtgtttgaaatttcttggcagacatggggcattctcctttcaggcatgggttgcaagcgcagcacgcgctgcagccctgcccgtcggcgagaccggggtagcaannnnnnnnnnggcaagggcggccggggcggagggggatcacccagcctgcacaagcggatgttggggatgggcctcacgaaaactgggcccgcgcggaaggccggggagaccggcccggccggtcccggcgctgccgggacgtcacccttgcccgcgcgagggcggagcccttagcaccgaagccatgagaggcaggttggcagagcgcaaatcgagacggtcgaatgagcgcctaagcccgctttgcgacgcaactctcggccggccattcaaattggtaaagagaagaaagcaggggcgtcctttcgggcgcccccgcaaatcgaaagtggcctaggcgaccggcggaagcggcggcatgatccacttcaggctcagacgccacagcctcagcggcctcggcagccccggcgtatagatcacgaggatcgcagcccggctcgcgatcacctgctcgcagaacgggaacagacttccggcgatcccgattgcgtcagcgtccttctccacatcggacagccagtcgccgttcgttgtgagataggcgcccaccgtgttggcgatttcgcggccatcgagaacgtgccgtgcgtcatcgaccgtcaagaaatgccaaccgttgttcacgagggaacggatcacgtcccgccccgtcgcgaacggcatttcgccatcgccctcaaccaacgtcgcaccatgctctagaaaagtcgtcatgtacgcttggcgacccccgatcagcccgcccgcagccctctcgctgacgcggatcagcggtacgtcatcaaagcggcacgttctgtattcggccaattcgatacgcggaaggctcggatagtccgctttgaccagatagcaatgcggataccgggcgagcatcgcagcagcgacctcaatggcgttccggtggcacagtccctgtctcagattgcgaacagcctgaactaagggccttttgccgagatcttcactgatttcggcgaggcgattttgcaagatagtccgaatggcgcggaaagtcatggttgttccctgctttaacgacaaccggtgttgtcgtgcgagcaggatggccgatgagccgacgcgacgttgcagaccaattgaatgtaggctgggccccttaggccagggcgctcaccacaacagaggacggaaacaccgcacgcgaagcttttcgcctttcgtcatctgcggaaaattctcgtaatccacggaaaggttgatgccttcgtggccttttccgaccttgaaacgcggatcgatcctggtgtccggatggtcaggttttgccgttcttggcgtaatgacgacgttgtaaaatagtggacgtactgggacagaagttcgcgttgcaagggcctgttgtgccgcctctcggagactttcttctccgacgagcagatcggccagatagtggatctctgtatagatcttttcgagatgctcaatatcatcttcaatgaccgcaaacctcggcttcgatgagaggcaattgatcaaagtcacagcgatttcgggcggcagttcatcataatcgccacgggcgaaatagccgagccacgcggcaaggtcaaagaggtcggtcagcgattcgaattcaccgtacagtgcagtcgggttgatgccgccatagagcgccgcaataaagcagccccagaggttaagatcgaattcttcgccgtaatccaggcgcgcctttattccggcactcacggctgcgccgttcgccacttgaaattcggcagtttcccgcgcgatacgatgcaccgttagtgctctcaggtgggctcggcgcagtacgctaatgacaggtagctcccggtcggcgaccgcctggtagctgaagggaccgtaaatctgctcatagcaaagaatttccacgttggcctgcgccctgatgccggtcggaatctgcttgaaccaggtcttgacgtggtctcgtccttgcgtttcgacgtggcccatggtcacgttgcgctcacgatcttcacgcagttcgggcgtatcatatagatcgctgatgcctcgaaagacgctctcgacttctgcaagttccgagttcttcaactgatcccgatcagttgtgttgaactgcgtgtgcgggtctctttcccgcgccgctctaaattgcgccatctgaagcacgcggttcgctcgcacacattgagcgtggagcgccgtcctcaggatctcggtaatcaatccttggtccggattgcctactacaccttcgtcgtcatgcgccggaacgatggcgatccaatccccccgttgaaatccctgtccctgagctatttcaagtctcacgccacgggcgtgtagctgaaattctgtgaccgcttgaaagtctttcgcgcgccactctgcgagaacgcctggattgctgggaatcggcggaacgccgaacttcgcattgtagtaaacgatcggaacccggctgaggccgaatcgatcgtggatcacatgaattgcaacgtccgggcgctcttcgcccatattcgccaaatggtctgcgtccaggtaaattcgcgcgctgtcgcgatgtccaaaaatatcaggccttccaaagagcatattgcttcctctgccaactaaagtgacgatgcggattagccgagcggacattacaggtcggcgaaacgcgctccgcagttttgaataaaatttgatcttctgtcgcactgggggcggttttccgcgcccccagcgcggcttcttcgattggtctgcaacacgaggcagtagacggaactactgacgggcttccttcgatggaggctgacgtggtagcgacgatcgcggctggaacgaccgcccgatattacagcaagcaatccgagtactatctcgggggcggcgagcctgccggtcgttggatctcctcgaccaatgatttcggcgtcaggcatggcgccgaagtcgacaatgctctcttcgaacgcctccacgcttcccttgatgtggatggacaaccccttctgtccaacagcggcgacaccgcaaagcgcgtcggtggcatcgacctgacgctgtcggccccgaaatcggtttctgttgcttttgcactcgctgatgccgagacacgtcgcgccatcgagaaagctcagcatgaagcttgcgaagcaactatcgcatttctggagaggaatgcggcgttttgccgtcgcggcaaggatggtcatcgtctcgaacgcgccacgctcaccgttgcggcgtttcagcacggagaagcgcgccccgtcgagcatgacgacggcaaggtctacgccgaccccaatctccacacgcacgcagttctattaaacttttcacgtcgtcaggatggcaccgtcggcgctctcgacgcgcgccatctgttcgctcacaaaatggcggccggcgcgatctaccatctcgcactgtcgtcaaatttgcagagaattggtttcgcaatcggcgaaatcggccgcaacggggtattcgagctgatcgtcccgcaggcgggtgaccaatcggcggcgctcgcgaagagttttgcggccttgcagcgccactattcgggacggcgcaaggaaatcgaagaggccatcgcggctgaaggactgtcgacagcggaagcgccgacactggcggctgcgatcgctcttggaacacgctcgacgaagcaagaggcgcgcacggcggatcgattcgaactgtgggccgaggaagccgcgccgtttctggacgtcgaacggctcgtgacgaatctgcgcatcccccggacattgagccaggccgagcaggaaaagctcatcgccgagcgcgtggcagctgtccctacggaactgaccgagcacgagagtgtttttgagcggcgtcacctctacgcagccgtcgcgacggccttggtgggaacaggtgccgccgcgaagcgcgtcgagcacgaagtggaccgcctggtagaggcaggccgcatcgtcgagctcggacgggacgccctccagcagccggtctattcgacgccggagcagatcgcaatcgagcgcgagctggtcgcggtggccgatcggctgacccgcgagcgccgcgcggcgcccgatccggaatacgtgctgcggctttgccgtgagcgggggctctccgcggagcaaacccacgcggcgcaaatggcgacgagttcggccgccatcgttgtcattgagggcgccgccgggtcgggaaagtcgacaaccttggccgctatcgtggcggcgtacgcccgagacaacggtaccggacttccctttgcaggcgctgcgcggcgcatcattggcacgagtcaatcctggaaggtcgcccgggagttgcagaaactcggaatcgaggcaatggccactgacgcgtggcttgcccgaaccaaggagccatttctcgatgccaacaccgtgctcgtcgtcgatgaggccgggcttttatcctcgcgccaaatgttggcgatcgtgaagagggcggaagaggccggcgccaaaattatcgcaacgggcgatcgggagcaactggttgcgttgggggcgggcccggggctctccatcctcgccagcgtcacgggggcgacccgcgttgacaccatcgtgcggcagcgtgaagcctggatgcgtaccgcagtgacggattttgccaaaggccgcgcggcgcagggcttggccgccttcgaggagcgcggcctcttgcaatttgcgagcggtgagaaggcgacggtcacgcgcgttgtcgatgcgtgggagaacgcccagcgcgctgggccgaacgcgtcggtgttgttgatcgccaagaccaacgtccaggtgcgcgccatcaatgacgaggtccgcgtccggctgaagcgcgacgggcgcatcatcggcgaggatatcgaggtggccgccgtgacgccgtccggccacggccagacgcttgccttcgccattggcgatgagatccggtttctggaccggcacgaccgccttgccgtcatcaacggcaccacggctactatcaggggcattgacgatcgcgacacgcaggatccagccgtccacgtagacatcagcgggcgtcgggcgagctttcgggtgtcggagcttgctgacgaacacggccgagcgcggctcggccacgcctacagtacgacgatctatggatcccaaggtctgaccaccgatcgagccttcgtctgggccggaccgtcaatgacaagaaacgaggcatacgtcgcattctcgcgtgcccgtgatcatcttgagatctttgcagacgtccgcgagatcgacgcgcaaatccgactcgatctgccgctgtcggagcggctgcaggccacgattgcgccggagcggagaatcgagtggctctccgcacggctgtcgcgacggcaggtcaaggcctgcacgctcgaccccatgctcgaccaagccgtgcgcgcctatgaacgattgacggagcggggcctggcggcggggtatgagcgtagctaagctaaggcgcggatgcgcggagccttgtcctcatcgaagcgccgagtacgcgcttcgtgaagagcgaacaacaacaggcggctggtcaaattcctcaaagagaaagccagagagggacgtattcgtgcgacggcctacatttccgctgccgcgctgattttttgcgcgcgcgcctgccagacgttgcctgcagttcgcttggctgcgatgtctgccacatgctggctaccgttcacgacctcggtctgaagggaaggcctcccatcgacctcgacgaccatgcccgcatcgaaatctggattctcgcgcttgccgccgggcgccggatatccacgcgggttgcagacgacacgcgtttcgccgacgcaatagtcacggttgccgtgcacatgaccgtgcagccacagcgccggcgcggcgtcgcacgtcatcagtcgctcgacatcgctggcgtagcaccagtccaggtccgtgatcgtcggccagtggagcagcgaccgcggcgagggagccatgtgcgtgatgacgactgcgtcctggcccgccggacgcttggcgagagccttctcgatgtacgtgactgagaccttgtgggcgtcgatcgtctggccggggcggagccggtccttcgaccggccggcgccggtctttatcaaacggtaatcgttcatctgcttcgtggccgcgcgcaccgcgtcgccgaacatcacgtacggagaccgggtcatgaaatccgtccacagcgtagcgccgatgaaaacgacgcccccaatctcgacggaggcatcatcgagcaagatgatcccgagatcctccgcgacctctggcatccgtgcgcgctgctcctcccacgtggtcttaagttcggcattgtgcttgtcgtgaaaggaatagaaatcgtggtttccggggacgtagatgagcggccggtcgcgatcgggatacagctcgcggacacgccgcaatgccaacgtgccgggcgcggcggcgtcgccggcgaccacggtcacgtcggcgtcgatctgcggcatgctgtcgagcccattgcgctcgatgtcgacatgcaggtcggaaactggattaatgcggatcacggcgtcactccattgttctcgataacgccgtgttctggatccacgcgtggcggcagtctcgccatgtaagccttgatggtagcgaggcggaccggagcgatgcccatgacgtcgacgccgatgtccgcggactgctggttgcctggcatcttgccgtggtggtgcccatacaacatcaacgtggtcggcttgcgagaggcgggccagctcgcccatcgatagtggcagatgacgcatttggtgctctcgatcgtctcatacgcgacatcgcggatcgattcccaaccgagactctttgtggcctcgccgtcgtgattgcctgctaccaaatgcttgcgtccgggtaggctgtcgaacaggttgcggagcgcagcaggatcggccctgtgagcgaagtctccgacgacgatgatctcgtcgtccggccgcacgacggcgcgccacgacgcagccatggcctcgttcatctcgcgtccgttcgcgaacggcctgttacacattcgaataatgccgtccgccttgtccggcgatgcgtggaaaaaatgtggatcagcgtagaaccaagtcgtcactgcagctttccctccctgggatcttttcgaacttcatcggcgtcgcccatcccgatgtcgcaggcgaatagtctcacagcggctcttcttcctagtcaaattatcgggaaatcggacggaggcgtcagttcttcgggccggcttcaatcaccgctagttcctcttggtttgctctgatcgcgtcttctcaatttgatggccgaaactgcttcaggtcagcgaatacgatgcgtcagcaaccccgttagcgcgcacaccattgacgatcagttactcgccaaggttggcaattcctcgcaaatgctacgtggttgacgcccagtaatcttgtccgactccagccgcttcctggcggcgagccgcaacgagcgacttcgagcccggcggcctagagccagctcaagttcaggtgcagcgaggcatgacgtatcggaacaccccgatcagcgcgagaagcgcagcccgatcatgcgccacggaagttgcctattctaataggcttttgctgctagtcgagacgaccttggagcaggaagcttggagacgggtaccaggcccgccgtccgaaggtctcattttggcgggggagccagctcgtcggtgagcttatctaccagatcgtaatcggctggatcggagccgagctcggatacacccttcgcaagttcggctttgagcaacttcgggaagtcgtcgtcgtaggtcgcaattttagtgcggatcgcggctctccacttatcgccacgatcccatgcctccatgaaggcggaggcaagatcagcgtgctgccgatttgcaatcatcgcctcagtgatcgatcgggcctgaagccgatccttcgaactctttgcggttgcgtcgcgatcctccctgcggcgagaaccgatgatgagcttgtggatggcatagcgttcgggcgatggaatgaggactgacacgcccgcaccatgcagcagcacggcgcggatgggctggtatatcaggtaatcgaggaagcagagcggaagtgcggccgccccacccagcgccggcattgggactggtttgccggcctggtcatcggaccacaggttcggcgtcaggaattccaccttgaagttgtctctcgacacgaattgcgtggaaaccctgccgtcggcttggctcggaacctcgcggaatgtcggatcgacatgtcgaagcacctccaggattggaggcatggaatccttgatcgcaaccgagatttcgtggaagtgcgcaaagtcggcgtcgccggtctgcatggcgaccgcatccaagcgtcgaccaagcacggccggatagcattggtaggcaacggtgccgacgagcacacctctcatgcggaagaagcccgccttcgccagttcttccaccacttggccagccatcggcagaggacgcggcagataggcctcgcgcgtcagcgtggaaacgagacggcgacggcctttaagatcggccttcagatccttgaacgcttcaaccctcttggtgatttcggggtcatccaccggaccgacatagcggcgatcctgggcacctccttcaggtttgggcatgtcgaagtaccagtattttttgcccttgacctcaacggccacgaaccgaccgttggcggagaattcggacgtgaagctctcatccaggctccgctggacgagctccgaatagagcgtctggtaggagatatcgaggcgttggttcggcgccatagaagaccccccgttatactattttcgcgaaaacagtatatcttctggcacccaaggagaacgaggatatactaaaattgctaaaatagtataacttttatattttcaattatttatatggtagacgccaaccttcttgcgaatagcccgccgggggaaagtgagcttccgccggcgaaatccaacctctagcgtccaatccgggcttgacgccgatcgatcaggatatgccctccacgccgacctgaccggtgaccaattgcccgcgcgctcgctccagcaccggccgccacggcacccgcacgaattcatgggatcgctcgatcagggcgaaccgtccgctgttgagcgtcagcatgcgccggtagagccttcgatcttgtcgccggcctcggcaccgacatgatcaaggccggtgcgcgcggaaatatccgccgcggtccgcgccagctcgcgagcctcgagcgtatcgagcatgttccgcgcaaaaggcatttagccgccttcctctctcgcgcgaggccctgctcgatcagccaccgccgccttgctcgtagtgcggtctcgacgtccgcgccgaagccggtcagaccgagctgatcgagctccttccccacgagctttgcgatccagccaggttgcaggcgtcaaccaggatagcaccgatcttgttcaattggcctgcaacctgatcccctaaacgtcactacagacagcctccttcgatggaggctttcgtggttgcgacaatcgcagcggatacaatggcgagcaggctcgtccagtggcccgggtatggtcccgaatgccgccggcctgcgagctgttgggcctcatcccagagcagtatcagcgagcgaggagcggtctggccgcccaaatggctgcccctgctccaatttaagcccggcacgcttaatcccccgctcagctacgccgcgcagctcgcgggggcggcccgtggctaattcacgcattgccaaggtccggttgcaaccgcgacaggccgcgatcttgccggtgccgccggcgatcggcgcgagcacgaccgcgcaagttcgtgtcggttctgcccggctgcggccatcggaccccgagttttggaccgtgatcaatgagatcgcggatcccgcccccatcgcgcccgccgagctcgacgccatcgagcgcttcttttcggccgtgctcgatgacgtcttcgcttcttccggcagagatcttccgcgaagtcgggaaaatccagatggcagtgaagacgtctccttaacccaacgagaggactacgacgatgactgaccaagatcttcccctcgatcccacctctggcccgctcatggacgctgagcgctttgccgagttcgctatcgaggccgcgctctggctggtgcgggaatcgatggatgccatcgccaaaaagacggacttcgatccggacccggcgaactgcttccgggtgctgggccggctgcccgccatccgtgagctgaaggatctgacggaagagcagcgtcacgacctgttcgtggaaggcttccgtcgggttcacaacggcgcccaggaagcgttcgagctgctgctcactcagtccaaggagctcttgtgggaggccttccggaagcggtggaatgtggtcgccaacgaggtcccgctcccctgatcttaaccgtgcaggggagccaggcgattatcacttcccctgatttccctgcatggatagactcttttcttctgtatcgcgtgaggaagctgccgatggcccgcaagaaccttcaagtgtcggaaatccccgacaaggccgccgggccgcggccgcgcaatgtcctgatctacattcgggtctcgactgaaaagcagtccaataatcagctcagcctgaactcgcaggaggagcacctgatcgcgcgttgcaagcgcgacggcgaccatatcgccggcatcttccgtgaagagggcgagaccgccactaacatgaagcgtccggccttcgagcagatgatcgcacgcgcgacggacggtacgcgcactgtcgacgccatcatggtgtactcgttttcgcgagccttccggaaccaggtcgaacaagagctcacggttcaaaccctgcgcaagcacaaggtcgaactgatctcgcacgccgagcccttggcgaatgatgacacgggcgacatgttcaggaagttcattggaatcgtcaacgaataccaatccaaggagacggcccgttccaccatgagaacaatgaaggccaatgcgcagctcggctactccaacggcggcatcattccttttggctacaaatccgtcgatgcagaaatcatcggcaacaagcagaagaagaaactcgccatcgagccggtcgaagcggaaactgtgatccgcgcctttgatctggccaagaacggtgatggcaatagcggcccgctggggacaaagaagatcgcggagtggctgaacgctcgtggctatcgctcgcgcaatggctcgctgttcgggaccggcaccgtccacgaaatgctcacgcgccgcgcctacaccggcgtgcggaatttcaacgagtttgatcggaagggcgacggcgagcgcaaggcgcagtccgagatcgtcgaatacgaaattccggtcatcatcgatccagcgacgttcgaggcggttcaggccctgctggtgtcgcgccgtccgaggtctcgcgggccgcggctcgcttcggcgccgtctttactcggcggccttgtccgttgcgactgcgccaagtcctgtgccctgacgaccgccaccggcacctcgcggaccggcgttatctacagctattacaaatgcatccagtccatcaaaaaggggcagcataagcacgccgacggcgcttcctgcagcaaccgcaagattccgcgccctgtcatcgagaagctcgtggtggaggccttgctggatcaactcctgcagcccgaacgcgtcaccgccatcctgaccacccttaaggcccgccgcgatgaccggcaggcctccgccgaccgccgtctggcagatctcgcccgtcaggctgccgacgccgaagagcgcctctcccgtctctatgcctcgatcgaagccggcatcatcgacggctcagacccgacgctgaaggaacgcgttgccgccttgaagacgaccagggaccgggccctggaggccctcgactacgccaagaaatccagcacagtgccgatcgagattgatcctgtggccgtcgaccgcttcacgcgcttgatgcgcgagctgctcgtgtcaggcgatgtggcggcccgaaaggcctacctcagcgccatcgtggatgccatcgtggtcagcgatcgtaccatccgcatcatcggctcaaacgacaacatcagggccactctcggcccgagcggcgaacctaggaccccggttcgtaaatctgttcaggaatggtgcccctggccggaatcgaaccagcactccttgcggaactcgattttgagtcgagcgcgtctaccagttccgccacaggggccctcggtcggcccatgagggagcgtcgcgaagcgggcggactatagccatggaccaagcggggtcaacccgcgccaaagtgatgccggacgttctcgacagccgcggggaccggggctagaggctgggagcgcgagagatgcgagagaggctgccgtgacgacccagagtgccgcaatacctgcattcaagccggccagcgccggtcccgcgctgaccgcctcgctgcttgtcacgctgatcgccgcagccgcgctcgcaggtgcctggttcttccagctcgtcttggagatactgccctgcccactctgcctggagcagcgctatgcctattacctcgcgattccgctcggtgcgctcacggtgctggcggcgaggagcggcgcgccgcgaccgctgctgctgggggggctcgcgattttggccctggcgacgctcgccaatgcagggctgggcgcctatcattccggcgtcgaatgggggttctggaaggggccgaccgactgctccggtcccgtcgtcaatctcggcagcgcggctgatctgctctcgaagctcgacaccgtgaaggtggtgcgctgcgacgaggtgcagtggcgcttcctgggtctctcgctcgccggctacaacgtgctgatctcgctgctgatggctgcgatcgccgcctggggatttgtgcgcacggcgaagcggtaggactcaatcgtccacgtcgtcctgcgtgcgtccgaacagatgcacgatgcccggcgttgcgatcgtcacgaacacgaagcgcgacaggtgatgggcgccgacgaaaatcgggtcgatgtgcagcgtcagcgccaaagccagcatcgcatccatcgcgccaggcgcgaaggcgacgacgacgtcggagagcttcacctgcgtggtcaacgccacgatgccgacgaagatggcggagacgacgatggccacggcgaacgagcccagtgccgcgccgaggtggccggcgagcgtcttgacccgcattcgcgcgaaacggctgccgatcagggcgccgatcccgatcagcgccacgccgcgcacccagtccggcaggccgccctcgacccatccggcaccatgcagcacgctggaggcgatcatcgcgccgaacatccagctcgccggaaatttgatcagccgcaagacgagcgctgcggccagcgacgcggcggccagttcgagcaggtcgagcggcgacgcgatggtcgtcgtcagcaatggtgaggcagagggcgcgacgtccgcaatcgccagcaccatcggcagcgcggcggtcaggatgatgacgcgcatggtctgcaccaccgcgatgcccggcaggtcggcgccgcgctcgaccgccaggatggtgatctgcgacagcgcgccggggctgccggccaggaaagccgaggtgcggtcccagccatggatgcgctggaggtaatagctcgagccgaacgtcgagcagaaagtggcgagcgcaagcagcccgatggtgaggggataggcgccgacctgctgcagcagatggcgcgagacgaccgagcccagcgagatgccgagcagcaccagcacggtctgggtcaggatcggcggcagcgtcagctggcggccggcgattgcagccatcccgaccgcgatcatcgaacccgagatcaggccgcccggaaggttggcggcgagaaacaccaggccgccggcggtgccgatgacgagcgtctccagcgtgctcaggatcacggcacggctcggccatccgaacgtcagcgaggcggtgatttgcttcacgccaccttatcgcctatcggcgggaggcgcacaattgcaggctcgtcatgccgcaatgcgcgagcctctcacaggtgctcgcgaaggatccggtcttacttcttgtctgccgcaggagcggctggagcgacagtgcgggccttcgcctccttcttgcactcgcggcggaatttcttgcgctccttgcccttcagtcccttggtgtccgcctgcttggagcattcgagcgactcggccgagcgctccatcgccgtcttcttctcggtggtgacagcggcatcggttttggcagcgggcgcggccgtctgcgcagacgcggcgccggtgatcagcaaggaggcgagagcgatgacggcgaggcgaaaggaaaagatcatgtggtgcactcttttcgcgagaatgcgaggggcggggaacgtcggcttgggttgctgaacgcggcatgaatggttgagtagcgggagtcactatattttgccgacgcagctcatcgcatccttgtcgaaagcggacgacacgctaggatagaaatgttcgttttacttccgtcggggaagatcaagcaggagacccaggtatgaccattcagacgaaattgttgtgcgcgattgcagcgtcgggtgtcgcgacattgctggccggcgcgccagcgcaggcgctgaccgcgcaggagtgcagcgcgaaataccaggccgccaagaaggacggctcgctcgggaccatgaagtggaatgatttccgcaaggcccagtgcggggcagacgcaacgtctgccgcggctactccggctgctcctgcggagccgaagcaggcaaagaaggatggggagcctgccgccgcgccgacgctgccggctggccctgcgatctatccgaacgcggtcgatccgaaatatgccaaggagacccccggcaaggcgcgtctgcacacctgcgtcgaccagtacaatgccaacaaggccaacaacggcaatggcggcttgaagtggatccagaagggcggcggctattacagcgaatgcaccaagaagctgaagggcgcggcctgagctcctatctgacacatgatggccggagccacgctccggccatttcgtttgatttttgctgcacggttttccagatcgtgctcagtcgagcagcttctcggccgatctcgccaccagctgcgaccgcctgcgcggaccgtgctcgacgaacaataggctctggccgaagatgaagcagtagaacaggaaggcctgcgcctcggcctgctcggctgcaaggccggttgcgcaatagagctcggccacgtgcttgagccgagctgcgtccacgctcgccaccgcggccgcagcgttctcgtccgagcgagcccattgccggatcgcaagctcgattgccatcccttccggattgagccgctcggagtaaagctggatgatcgcgcttagccgctcgcggggcgcttgcccgtcgagacttgtctgctgcgcgattgcggcgacgcgcccctcgcgccagacctccagcatggcgttgagcagcgcggcgcggtcggcgaagcgtcggtagaagccgcccttggtgacgccgaggttcttggcgagcacctcgacccgcacgccttcaactcctgaacgggcgagctcggcaaatccggcctcgacccagacatcacccttgccgtccctcatgaggaagcctcgccgatcttgatacggtgccgtattgctagcgcgacaaggcgttgatacgctaccgtatcaacgaaaagctggagggattgcgatggaggagatggccgcgttcgagccgaaaaaccctgagtgcctcaccgccgcgacggcgatgtttgccgcccaaccggcgatgcgcacgctgggcctgtcgatcgtggatctgtcgccgggtcgggtcgaactggcgatgccctatgcaaccgccttcacccagcagaacggctttgtccatgccggcatcatcaccgcaggcctggacaatgcctgcggcgtcgccgcctttaccttgatgccgcgcgaggccgacatcctcaccgtcgagttcaagacgacgctgctcgcgccggcccggggcgagcgcttcgtcttcagggccgaagtcatcaagcccggccgcacgctgaccttctgcgaagccaaggcctttgcccagcatgacggcaaaaccaagctgattgcggccatgaccgggaccctgatggcgatcatgcctcgcccggcagcttagttgagccgggtccgattcgcgtggcaatcgcgtccgcggcattctatatgaccggtaacaattcctggtccccaatcgtacttgcgacaggggaaccgacgcgggacgagatatggctggatctgggaaagagcgcctcatgccgacgcggcgcgccgccttgacgctgatcggagcaggcagcttggcggcgggcggcatcacgttggcgcgcgccgcgagcgacgatgaggtgctgaccgaagccaaggtgttgcgcgatccggacacgcccgtcgccggcaatcccaacggaaacgtcaccattgtcgaatggtccgattacaattgtccctattgccgcaagctcgagcccgaactgcgtcaggtcgtccaggacgatggcaaggtgcggctcgtgatgaaggattggccgatcctcgggccggtctcggtcacggccgcgcggaccgcgctcgcggcgaaattccaggacaagtaccatcaggcccacgacgccatgatgggcgtcagctcgcgcctgaccgaggcgcgcatcaacgagctgctggcggctgccggtgtcgacatggaccggttgaagcgggatcttgccggtcacgccaaggacatcgacgccatcctcaagcgcaacaacgagcaggccgaagccttcggcttccgcggcaccccgtcgttcatcgtcggcaagtatcgcgtgcccggtgtgctcaccatggcccagttcgagcaggtcatcgccgacgcgcgcaaggccaagatgaactgacgcgcaaggcgtccgggtgtgcaaaaaagacgccgccgcggaactcgcgacggcgccttcttcaggtgatcggtcggtattatttcgacgagatccggacccagtccttgtgcgcgcggtcacgcagcgcgtcaaagtcggccttcgcaacatcccagttcacgatggtgcgattggtggtcgccacctcgccgttggcgaccgacgacgtctgcatggagtcatagacgtagacgccgcccgcaagcagcagcgcgcccaaaatcattccgaaaaaagtctgcatggcgaacctccggtgaccggcaacaacgtcggcccggagtgatggttccgcggcagtacggcgcaggtaaggacggatcgttcacgtcctattcagccaggccatcagctccgcgttgatctcgcgcggataggtgtggctgagatcaccgatctcgcgataggtgacatccgcgcccgcggcggagagcgtcgcctgcgtctggcgtgcggtctgcaccggaaacatccagtcgagcttgccgtgagtgatgaagaccggcaggccttgcaggcgcgttgcgtccgccatctccgccagcagcggatggaaggtcgccgcaaccggcgcgaggtgagtgaagggcgaagcgctttcgagcccgctcacgtaacagaaagtgccgccatcgctcatgccggtgagcagcatgcgcgtgggatcgatgctccagcgtccacgtaccgtctcgaggacgcgcatgaggttcggcgtgtcggtgtcgtcgcccatcagcgcccaggtcgggccggtcgctgtcggcgccacgaggatcgcgccaaggctgcgcgcgtcgcgcagccagctccacagaaagccgcgcccgttgccgctgccgccatgcagcgccatcaccagcggcatggcgcgatcgggcacgtaatattcggggacatagaccgagaagccgccgcggctgccgggctcattgtgatcgtggaagatgccggtgtgctcgcccgcgccgacttccaggcgcgacagcacatcatggttctcccgattggcgtcgttcagaaagaagctgctcaccggcggaaactgcaccgccagcggatagagcgcctcctgcgcgcgcgggacatggcgaagcgcgcgaaagacggcgacgagatcgccattgccacgctcgacctcgcgaattccggcaaaggcggcgagcgtctcgttgcaggcggcgtcgagccgctcgcggatgccggcgaattgctccggccagtcgccgatcgccgcacgggccgctcgcagcgcctcgtccggtgtgccgattgcgttcatcacggaggcgaaagccggcgggtgcaaatgccgctggaggaagccgagcgcttccagcgcattgagcagcggcggcagcacggccacgatgtcgtccaccacggcctcggtcatcgcccgcttcctcaagcctcgtgatcagtgcagcttcggcgccttcaggagcttgaagcggtcggtcgaggtcaccgcgacgtcgaaggtgacgccctcgtggtgaacggtcagcggcacgtcgacgccggcggggccgagcgcccacatcttcctgtagaaggcgctctggctcgtgactttctcgccgtccacggcgaggatgacatcgccggtcttgagctcggcgcgggcggccgggccgttggcggagatcccgatcaccaccacgcggttgtcgatctcggtcgagaagagcccgagccagggccgcgccggcttgttgacgcggccgaatttgcgcaagtcctccaggatgggcttcaacagatcgatcggcacgatcatgttcacgtgctcggccttgccgtcgcgttcgcgctccagctggagggagccgatgccgatcaactcgccgcgctcgttgagcaacgcggtgccgccccagttcggatgcgcgggataggtgaagatggcttcatccagcagatattcccaataaccggcgaattcctgcttggccacgatctggctggcgaccgagcgtgtgcggccgccggcgccgccgaccacgacgcggtcgccgatccgggtttcggccgagttgccgagcggcaaggggtcgacgtcgagccggccgagcgcctgcaccagcccgaaaccggtctcggaatcgaagccgagcacatggccttccaccacgcgtccgtcggcgcggtgcagccagaccgactctgcctcagtgatgagataaccgatcgtgagcaccagcccgtcgtcgatcacgacgccgttgccggcgcgctcggtgcccagcgtttcggcgctgaaggcgtccggcgggatgatggcgtgcaggccgacgacggatgcgagcgcgcggtcgagatcgaaaccatagtcgctcgcgcgcggctggttcgccggcggcactctccattctgtcagagcgggcatggagtcctcctggctgagagcatcgctccggaagggctggtggaacgaggcacgaagcaagcataatttaggccgggcgatcccgtcttgaaagcctcgttccaaactattcgtgagaacgccgggtgaaatctttgaaatgtgcgcaaccggttcgtgcgctcggcgagcaggccgcgcctatccgacatggcccgcatggctggtgtccggggaggtgctaggcgccgtgcagtgaagctgctaacgcttgccgcttcgtttggccgagacatcgcggacgacaagcatggacaaccgcagcgacatctggcgtggcatcgatacgatcaaggggcgtttcatcgatctcagcgacagggtctggggcatgcccgaggtctgctacaccgaggcgcggtccgccgccgagcatcttgccgagctgcgccatcagggcttccggatcaccgagaacgtcgccggcattccaactgcgctgatgggggagtggggcgagggcggtccggtcatcgccttcatgggtgaatacgacgcgctgccgggcctcagccaggaggcgggtgtcgccgagcatcgcccggtcgagaccggcggtcacggtcacggctgcggtcacaatctgctcggttccgccgcgctgctcgctgcaaccgcggtgaaggactggctggccgagaacaaggtgcccggccgcgtgcgctattacggctgccccgcggaagaaggcggcgcggcaaaagccttcatggtgcgctccggcgcgttcgagggcgcggacatcgccatcacctggcatccgcacagcttctgggaggtcgcggtcacgccgtcgctcgccaatacgcgcgccgacttcatctttaccggccgcacgtcgcatgccgcggcctcaccgcatctcggccgctcggcgctcgatgcggtcgagctgatgaatgtcggcgtgaactacatgcgcgagcacatgccgagcgacgcgcgcgtgcactatgcactgctcgacaccggcggcatcgcgccgaacgtggtgcaggcccatgcgcgcgtgcgatattcgatccgcgcccgcgatcttcccggcatgaacgaactggtcgagcgcgtgtccaagatcgcgcagggcgcggcgctgatgacagagaccaaggtcgagatgaagatcatctccgcggtctccaatatcctgccgaacgcgccgctggaacgggcgctgcaccaggtgatggaagagctcggaccgccgcattttgacgacgcggacaagaggtttgctggccagatccgcgcaacgctgagcgacaaggatatcgactctgtctattacgcgatcggcatggagccgacggaccgcccgctggccgactttctggtgccgctcgatgccaagcgcaacccgctggtcggctcgaccgatgtcggcgacgtgagctgggtggtgccgacggtgcaggtgcatgcaccgaccgttgccatcgggacgcccttccacacctggcaggtggtggcgcagggcaagagtccgcatgcccacaaggcgatggtgcaggcggcgaaggctatggcgggtctcggcatcagggcactgacggaaccggagctgatcaaggcggccaaggcagatcttcagaagcggacggccaagacgccttacgtctgtccgttgccggatcacgtcgccccgccgctcgacatgtccaagatctagatccaagatctggatccagacccccagaattccgagttcatgttcgcctgatcgggcgaacaaattttccgcactgcagcgcgcgatccgggacgttttgatgccggattgccgaacggatgggctgcggaatgcaagttttgcccaacagacagccagaagaccgtttgcacacacacggtcccagttgacgtgcgccccattcggtgtgccatctactgccagccaaatgggctgccgtgcttctcggcggctgtcatcactatgggaaccagacgggggacaaccatgctggataaagaactgcgttcgatgatcggccaggtgaaggatgggcggatggatcgccgcgccttcatccagcgcatggccgctgtcggtcttaccgcaccattggccaaccagattctcgcgctcggcggtgtcgccatggcgcagagtcctgctgtctataagccgaccaagcgcgggggcggcggccctctcaagctgttgtggtggcaggggccgacgctgctgaatccgcatttcgcgaccggcaccaaggaccaggacgggtcgcggctgttctacgagccgctcgcaagctgggacgccgacggcaatctcaatccgattctggccgcagagattccctcggttgcaaacggtggtctcgccgccgatgccaaatcggtggtttggaaaatcaagccgggtgtcaaatggcacgacggcaaaccgctcaccgccgacgatttcgtgttcacatggcaatatgccagcgatcccgcaacggccgccgtcagcatcagcacctacggtcagatcacggtcgagaaggtgagcgatctttcgattcgcatcctgttcaagactccgacgccgttctgggcaaatgccttcgtcggcgcatatggctgcgttctcccgaagcatctgttcgcggactacaagggctcgaagtcccgtgaggcgccgaacaatctggcccccgtgggcaccggcccctacaaattcgtggagttcaagccgggcgatgtggtccgcgggcagctcaatcccgactaccatatgcccaaccggccgcatttcgacacgatcgaaatgaagggcggcggtgatgcagtctccgctgcgcgcgcggtgatccagaccggcgaattcgatttcgcctggaacatgcaggtcgaggacgacgtcctgttgcgcctcgagaagggcggcaagggcaagactgtctacgccaccggcggcgacatcgagttcattgcgatcaacttcaccgacccgcacaccgaggtcgatggcgaacggtcgtcgatgaagaccaagcacccgatcctctcggatccgaatgtgcggaaggcacttgccttgctggtcgaccgcgagtccgtcaagaaggcgatctacggtcgtgcaggccgcaccaccgccaactacctcaacggtcccgagaaattcgtttccaagaacacctcgtgggagttcaacatcgagaaggcctcgaagatgctcgacgatgctggatggaaggtcggatcggacggcatccgcgagaaagacggaaagaagttcaaacttctataccagacatcgaccaacggtccgcgccagaagacccaggcgatcgtcaagcaggcctgccagaaggccggcatcgatgtggagctgaagtcggtcgttgcctcggtgttcttctcgtcggacgttgccaatcccgacacctaccccaaattctatgccgacatcgaggagttccagatcccgatgacgcagccggatccggcgttgcacatgcgccgctacatctccgccaacgtggccaccaaggagaacaaatggcaggggcagaatttcccgcgatacgtcaacaaagactatgatgccgccattgcggcggccgagaccgaaaccgatccggtcaagcgcgccgcgctctacatcaagtgcaacgacctgctttggcaggacacggtgttcattccggtgatgcatcgccttaaggtggaagccgcggccaacaccctgaggccagcgctgagcggctgggcgaacgagactgacaacatccaggactggtaccgggaggcttgatcgcaggctagacgggggtcctccctatgagtcagtacgtcctgcgtcgcctcttgatcgccattccgagcctgctggccatctcgcttgtgctgttcgtcgtgctcgcgctcgcccccggcgatccgttctcggaattggcgaccaatccgaacgttccgcccgaagtgcaggccgcacttcgggccaagttcgggctcgacgatccgatctaccttcgttacctgcactggctcaacgccatgctgcacggcgactggggtttctccttcgtcagccggatggacgtcgacacgttgatcctccaacgccttccggccacgctctacgtgatcggttcggcgcagatcctggcgctcctgatcgcgattcccgtcggcgtctatgccgccaccaagccgtattcgctgttcgaccagatcgcgaatacgctcgccttcgtcggcttctcgctgccgaccttcttcaccggcattctgttcatcctgatcttctcggtcacgctggactggctgcctttcgtctataccaccgacatcaaggcgaccggcattcattgggtgctagagatgatccggcaggcgatcatgccggtggcggtgctcggcctgttccaggcggcgtcgatgacgcgcttcgtacgttcggcgatgctcgacgtgatccggctcgactatgtcaccacggcccgtgccaagggccttggtcaggccaccgtcatcgtcaagcatgtgatgcgcaacgccatgatcccggtcgtcacgctcatcgcgttgcagatgcccgcggtgttcggcggcgccatcgtcaccgagcagatcttccgcatcccaggcatcggctcgcttctgatcacctccatcctttccaacgacacaccggtggtgatggccgtcaccttcgtcttcgcgtgcctcgtcgtgctgttcaatctcatcgcggacgtcctctatggcttgcttgaccctcgcatctccctccgctgagcggcgggtctactcgccctggcgcgagacgtggcgacgctacagccgccacaagcttgccgttgtcagcgctttcctgctcctggttcttgtcctggcggtggtgttcggtccgttcgtttggcgggtcaagatcgatgagatcgacattgtggcgggtctgcaggggccgtcgctggcccatccgttcggtactgacgacctcgggcaggacatcctcgcccgcatgatctatggcgggcgcatctcgctcgcggtcggtctggccgcgatgctggtctcggtctttatcggcgtgctgatcggcgcgctggccggtatgtcgcgcggcgcgctcggacacggcctgatgtggctgacggatctgttcctgtcgctgccgcaattgccgctgctcttgctgctgatctatctcttccgcgacgggctgaagcaggtgttcgggcccgaaggcggcatcttcatcctgatcgtgctggtgatcggggggctccgctggatgccggtcgcgcgcctcgtgcgcgcgcagttcctgtcgatccgcgaaaaggaattcgtggaggctgcacgtgcgctcggtgcaagtccgctgcggcaggtgataaagcacattctgcccaatgcgcttggtccggtgatcatcgcgggcaccatcgacgtcgccgccgccatcatcgcggaatcgacgctgtcgttcctcggactcggctttccgccggataccccgacctggggccgactgctgtacgatgccaaggatttcctcgatatcggcccgcattgggcgttgtttccgggcggcgcgatcttcatcgcggtggtcgccatcaacttcatcggcgacggcctgcgtgacgcgctcgatgcgcggcgggtgatctgatggcgccgctgctcgagatcaagggcctcaagacccacttctccaccgacgacggcatcctccaggccgtcgacggcgtcgacatcaccatcaacaagggggagacgctctgcgtcgtcggcgagtccggctgcggcaagaccgtcaccgcaatgtcgatcctgaagctgatcgcgatgccgccgggccggatcgcggcgggccagatcatcttcgagggccgcgatctcgttccgctgacgagcaatcagctcgatgagatcagggccaaggagatcggcttcatcttccaggagccgatgacctcgctcannnnnnnnnnatggcgctcgcctgcaagccgaagctgatcatcgccgacgagccgaccaccgctctcgacgtcaccatccaggcgcagatcctcgacctgctccaggacatgaaggaccgcttcggcatggcggtgatgctgatcacccatgccatgggcgtcgtcgcggagacggcgcagcgcgtggtcgtgatgtatgccggcaagggggtggaggaggcgctcgtcgacgacctcttcggcgacccccgccatccctatacgcaaggcttgatccgctcgatcccgcgcatcgacctcgacgccgagcacaagacgcggctcgaggcgatcggcggctcggtgccgatcctgatcaatccgccggtcggctgtcgcttcgcgccgcgctgcaagttcgccatgaacgtctgcaccgagagggagccgctgttgcgcgagattgcgcccggccatcgcatggcctgtcacttgggagataccggcctcggaggcgcagcatgagcgaaccgttgctgcgcgtcagcggcctcaagaaacattttcccgtgctcggcggcctgctgtcgcggcaggtcggcaccgtctatgcggtcgacggcgtgtcgttctcggtcaaccggggcgagacgctcggcctcgtcggcgagtccggctgcggcaaatcgacgacggggcgctgcgtgctgcgcctgatcgagccgacggacggcgaggtcaccttcgacggccaggacgtgcgcaagctcggcggcaacgatctgcgcgcgatgcggcggaacatgcagctggtattccaggacccgttcgcctcgctcaatcnnnnnnnnnnatgacggtcggcgcgatcctcggcgaggccttcaccatccacaatctggcgacctccgccaaggagcgtgaggagcgcgtcgcgggcctgctggtcaaggtcgggctcaaggccgagcacatgcggcgctatccgcatgaattctccggcggccagcgccagcgcatcgtgatcgcgcgcgcgctcgcggtcgagccgaagctgatcgtctgcgatgagccggtgtccgcgctcgacgtatcgatccaggcccaggtcatcaacctcctggaggatcttcaggccgaactgaacctcacctatctcttcgtcgcgcacgacctctcggtggtcgagcacatctccgaccgcgtcgccgtgatgtatctcggccgtatcgtcgagctggcgaaagcgagcgacctctaccgcactccgcagcatccctacaccagggcgctgctgtctgcggtgccggtgcccgacccaaagctcaagcgcgaacgcatccgtctcaagggcgacgtgccgagtccgatgaagccgccgtcaggctgtcacttccacacccgctgcccgatcgctcagccgcgctgcgccgaggnnnnnnnnnncccggtgctcaccatcggcgagcagatcgccgagagcctgcgccgccacgaggcggtgacaagaaaacaggccctggaacgcaccatcgagatgctgaagctggtgcagatcccgaacgcggaaggccgcgtgcacaattatccgcaccagttctccggcggcatgcgccagcgcgtgatgatcgcg

SEQ ID NO: 284 - DNA, 120204 bp, Bradyrhizobium colbertium
  misc_feature (63584)..(63593): n is a, c, g, or t
  misc_feature (104864)..(104873): n is a, c, g, or t
  misc_feature (106950)..(106959): n is a, c, g, or t
aagagccttttgctcggctcagcggcgggtctgatcgccgtgggcggagcgcaggcagccgatctccccgtgaaggccaaggcggtcgaatacgtgaagatctgctcgctgtacggtgcgggcttctactacatcccgggcactgacacctgcatcaagctgggtggttatctccgcgctgaagtcgcgctgggcaccaacagcgtctacaatggcgcgttcaacggcgctgctggcgctcacaaccgcctcagcaactactacacgatgcgggctcgtcaggatctcaacatcgatacccgcaccgcgaccgaatacggcgtggttcgcacgttcttcgatgcgaccttctcgtggacgaccggcggatacaccggtggcggtacgaccgcatacgactcggctccggcgggtacctcgggcaacggctcggtggccggtggttcgctcggcgtgtactacgccttcatccagttcgctggcttcacgatgggtaaggcggtctcccagttctcagctccctggaccaactatcccggtaacaacttcgacggtctcgtcggcggcggcggcacggttaccggcgtcaaccagttcacctacaccgctgacttcggtcagggcatcacggcatcgttctcggcgcaggatcaggtccagtactatcaggctggtatcaacaacctcgctgttccgggcaccttcggctacggcaccaacaacaccgccggctcgcgctcgccggacctcgtcgccatggttcgcgtggaccaggcttggggtctgttccaggcgtcggttgcggcgcatgagaaccatgcgggctactacggagcgaccgaacccaccggtcaccccggcgacaagtggggttgggcggctcagctggctttgtcgatcaagaacatcccgacgggtgcgggtgacacgatcaacatccagggcgtctataccgacggtgcgacccgctacaacatccaggacctcgccggtggcaccggtgcctggacgagctatggcagcaccggcctggccggcgcatatcagagcatcggcatcggtttcgcacctgacgcggtgcacgtgaccggtggcggcctggagctggtccagacctggggtatgcgcggtgcgtacacccacaactgggatccgtactggaacacggctctctacggtgcgtacgctggagttcgctacactggcgcagcgaagaccgcgatgtgcggcgtgggcggcaccgtgtcggttgcactcggcattgcttcggctgcctgtaaccccgactacaacatcgctcagctgggtctcatcacccgctggacgccggtcaagaacctgaccttctcggccgacttcaactggacccatctggaccagaagtacgcagccggaacggtcaccgctgctggcgccagtgcggcgttggctaagcccgtcgcggcttacgagctcaaggatcaggactcgttcaccctgctcctccgcgctcagcgcaactggtaagtttggtctaacgacctgacagagagccccggcgggaaaccgccggggcttttccttttggccctgggcgcctgtgttctcgtcgggccgagagcgcgaccgcgcaccccttctcgatggttcggtgtggcccgatgcaggctgtcgtggagaggggatccgtgcaagtcctgtcgaccgagatgcatcgagcagggatgcagcgttgccggcccggccatgccagcgcctcatggatcgcgagctgcagccgccgccttcattgtcgcgcggcgggtctcggccgaaatgctgattgaaccgtggccgccgcgccgctcgagagacccgtcgagcaggcgtaagcagaaggtcgccgaccgctggacaggtttcgccggttcagctcacgaccagtcgggcgcttgccgcccttgctccggggctgcgaagtgaaagagggaaccgctactattccaggctgaccgcgccgcggcgcagatcggcctcgatctgcaggcgcgtgcccccgccgaagcgggcgcggtagacctgaaggttttccatgatccgctgcacgtagttgcgcgtctcggagaacggaatcagctcgacccagtcgaccgcgtccaccttcgggttgcgcggatcgccgtaacgctcgacccacttcttcacgctgccgcggccggcattataggcggcgaaggtcatgatataggagccgcgatagtcctcgagcagcccgccgagctcggccgagccgagcgtggcgttgtagaccgaatcgttcttcagccgccccaggtcgtatgtcgcgccgtggcgtttgcacacgtagcgggcggcgtccggggtcacctgcatcagtccataggcctgcgccggcgaaaccacacgcggattgaacgcgctctcctgccgcgcgatcgcgtagatgatgctgcgctcgacctcggggccgatcggcgtgaactgcggaatgccgttgacgggataggcgtagaagtcgaatggcaggccgcgattgagcgcagccttgccgagcagcagcatgccgcgcgcgtcgctgtagcgctgggcgagctcgccgaggccggcgagcgcctccgggtcgccattctcccccatgtcggcgagcatgggcaccgccagctcgcgctcgtcgagctcatagagcaactgcgcagcgcgcacgatctccagccgctcggcgccgcgcccgcgcggctggctgttgagctcgatctgcggcaggccgagcttggcgcgggcgagctggccgtaatagctggtcgactgctcggcggctctcgcataggcgttgcgcgcctcttgatgacggcccattgcttccgcggcgcggccctgccaatagccggcgcgcgccagcgcggtcggattgacgctgccgaccccgatccgcgcaaagtgctgggcggcggtcgcgggatcgttgaggaagcgcagcgcgatccagcccgcggtgaactcctgctccgtcttgtagatgtcgcgcgagggcagtgccgcatcgcgcgcgatcaggtacgcgctgcggaattcctcggtgtcgatcatcttgcgcgccagaaggcgccgctcgatccaccattcgtcgagattgcggaggcggcccggatccttcggcgcggacagcatcagctgggcggcttcagtgaacttctcttcgcggcgcaggagctggatcttgctgaagatgtagccggtgtcattgtgcagctcacgcggcaccgcgtcgagcagcgcccgcgcgttcggcgctttcttgacggcggcgatgcgggcccttgcaagcgccacatagcctgccccgaggcgctttgcggcgcggagcgccgcctcggtctcgctgccgtagagcagggtgtccatccgcgctttctgatcgcccggcgtgagcagggcgccgaactggtcgagcgcattgttctcggtgtcctccgacatcggatcgctgcgccaggcatcgcgcaccagccgctcggcattggcgcggtcgccacgtaacagcatcgccttggcgagcatgaagcggcccttggcggagatcggggactcgttctcgaaccacgaccatgcgaccgaagcgtcgcgcctgtcgtcccacatcgcagcctcgaggcgccggcgcaggaaggtttgcgacggccagctcggattggcggagaggaaggcccgatagcgttccaccgtcgcgccattgtcgtcgctgcgcaggatgatccattccgcgagcttccgcgcaaccggatccgcgatcgaggcggcatggttggtggcgtcggcggccttgcgcttgcgcacgagctcgatgacgttctccagcgtgtccttgtcggcttgcgacgtcgacgaggtcgctgcgaccgcggccggcatggccggcttgcgcggtgctgcgtgctggcgggtcgcaggggccagcacgggagccgcgagcggtttggcaaccgccgccggggcggtcggtctgatggtcgccgtcgaagccggagcggccgcggctttgggggctgaactgctggcagctggatgcgtctttggcgcggccgcaggcttgggcgctgctggtttcgatgccgccgcgggattggcagcggccgcgggtttggtggctgccgcgggcgtaagcgctgccgcgggcttggacttgcccttcgccgcttccctgcctgcgttcttggtggcgtccttggccgcccctttactcgcgcccttggccgtatccttcggcgtttccttgccggttcccttggacgagtccttcccagccggcttcacggagttcttgctggcctccgcggtcgtgtcattggacttggccaaggcagcgcaaccgaccgacagccctgccatcagggagacgatcaggccgaggtatcgccatgcggcgcgagggagggagatcacggcgtttcgtcgccccgaatcagtcaagtggcccaagaccaagatctagctgtatttgattgaatatgcggacaaaataccaacagccgcttacctcgggccgatttgcaccatcaccgcggcaaaatcgcggcctaaacggtgcgtcacagggcagcggcccttttaccggcgggacagacccgatatgaatggggcttgctcaagagatcgccgcgtacggaggaagtccatggcagccaagacgaagttccgggggtcgttcaccgccttggttacgccgttcaagaacggctcactggacgaggcggcgttccgctctctggtcaactggcagatttcggaggggaccaatggcctcgtcccggtcggtaccaccggcgagagcccgacgctcagccatgacgagcacaagaaggtcgtggaatggtgcatcgctgaagccaagggccgcgtgcccgtgatcgcgggcgccggctccaactcgacccaggaggcgatcgaactgtcgcagcacgccgagaaggcgggcgcggatgccgtgttgatcgtcacgccctactacaacaagccgacccaggaagggatgtaccagcacttcaaggcgatcaacgacgcgatcggcattccgatcatcatctacaacatccccccgcgctcggtgatcgacatgtcggtcgataccatgaagcggctttgggaattaaagaacatcgccggcgtcaaggacgccaccgccagcatggtccgcgtgtcgcagcagcgtgcggccatgggcgaggacttcaaccagctctcgggcgaggacgccaccatcatcggctacatggcccatggcggccatggctgcatctcggtgacctcgaacgtcgcgccgcgcctgtgctccgaattccacgcagcctggcagaagggcgacaccaaggctgcgcttgcgatccacgacaagctgatgccgctgcacaacaacctcttcatcgagagcaatccggcgccggtcaagtacgcgatgtcgctgctcggcaagctggaggagacgctgcggctgccgatggtaccggtgtccgagccgacccgcgttgccgtgcgcagcgcgatggtgcacgcggggctgatcaactgagaggctggcttttccggggggcgtctcatgagcgcggtcgaggaaaagggtaggcggatgctcaaggagttccgagagttcgccatgaagggcaacgtcgtcgacctggcggtcggcgtcatcatcggcgcggccttcggtgccatcgtcaactcgctggtcggcgacgtcatcatgccgatcatcggcgccgtgaccggcggcctcgacttctcgaactatttcacccccttgtcgaaggcggtcaccgccaccaacttagctgatgccaaaaagcaaggcgccgtgctggcttgggggagcttcctcacgctgacgctcaacttcgtcattgtcgccttcgtgctgttcctggtgatccgtgccgtgaacacgctgaagcgcaacgaagaggcggcacccgccgctcccccgaagccgaccgccgaggtcgagcttctgaccgagatccgcgatctcctcaagaagtgacgcgcgcgcttcatcctgactgttaggatccgcgcgcatctcaatcaggtttgtccgtgatggccgataagaacgaacgtccaatcaaggtcatggcggaaaatcgcaaggcccgcttcaactatgccatcgaggacacgatcgaggcgggcattgcgctgaccggcaccgaggtgaagtcgatccgcaacggcaagagcacgatcgcggagtcctatgccgattccaagaacggcgagatctggctgatcaatgcgaccattcccgaatatcttcaggggaaccggttcaaccacgagcccaagcggccgcgcaaactgctgctccaccgccgacagatcaacaagttgatgggcgcggtcgaccgcgagggcatgacgctgatcccgctcaagctttatttcaacgagcgcgggcgtgccaagctgcagctggcggttgcaaaaggcaagaagctgcacgacaagcgcgagtccgagaagaagcgcgactggagccgggagaagggacggctgatgcgggcgaggggatgagccgatgaatcaacggaacctgctcgaagttgattggagccagattcccgcgccctccgacgacggcggcgccgcgcatctgaagggtatgccgctgccgccgatcgacctgctcgcgaccgacgacacatcggtcagcctatcggcgctgcgcggccgcaccgtcgtgttcgcctatccccgcaccggcgagccgggcaagatcgcgctggtcgacgattgggacatgatcccaggggcgcgcggttgcacgccgcagacgtgcgcatttcgcgatctctacgccgagctgaaagccgccggtgccgcacacgtgttcggcctctcgacccagagcaaccaatatcagaccgagatggcctcgcgcctgcatctgccctttccggtgctgtcggacgagaagctggcgctcacgcgcgccttgaacctgccgaccatggaggttgcaggcctgacgctgatcaagcgcctggcgctgatcatcgacgacgccaggatcacgcatgtcttctatccggtgtttccgcccgaccggaacgccgcggacgtgctggactggctgagggccaatccagccgacggcatcaaagcctaatcgaggtccgccttcaccttcgcgaacacgcgccggaacatgtccggcgtcagcacgccggtgttcgtgttgtagcgcgagcaatgatagctgtcatagagcctgagcccgccggcctgatgcaccgcgccgtggccgaacggggcctgcgagcccttcaggttcagcggcttgagcacgctgtcgtgcgcgatccgcccgagcgcgatgatcgcgcgaaggttcggcatcgacgcgagattcgccacaagaaaccggcggcaggtgttgatctcgatcggcagcggcttgttctgcggcggcacgcaatgcaccgcattggcgatccggcaatcgaccagcttcaggccgtcatctggacgcgcccgataggtaccccttgcaaagccgtattcgagcagcgtcgcgtagagcaggtcgccggcatagtcgccggtgaacggccgtccggtgcgattggcgccctgcatccccggcgcgaggccgacgatcaaaagacgcgccttgatgtcgccgaagggggcaaccggtgcattgtgccaggatggctcgcgcgcgcggttcgcctcgcgaaaggcgagcaggcgcggacagagcgggcagtcacggtcgggaacgacctcgagaggctggggggctgaccgtgccgcctcactcctcgaagtcgtcatcgcccctcggcgccatcgtggtcgcgcgctggaggaattgcggggcatggtggcgttcgccacgctcgccgcggtcacgcggggcggggcgctcggacgggtcgcggccgagcttggattgcagctcgacaaggtcggtgaagacgtcggcctgacgccgcagctcgtcggcgatcatcggaggctggctggcgatggttgagaccacggtgacgcgcacgccgcggcgctgcacggcctcgacaagggagcggaagtcgccgtcaccggagaacagcaccatctggtcgatatgctcggcgagctccatggcatccacagcgagttcgatgtccatgttgcctttgaccttgcgccggccggaagcgtcgatgaattccttggtcgccttggtaacgacggtgtagccgttgtagtccagccagtcgatcaaggggcggatggaggagtattcctggtcctcgatgatcgcggtgtagtagaacgcccgcaacaacgtcccgcgactctgaaactccttcaacaggcgcttgtaatcgatgtcgaagcccagagttttcgcggttgcgtagagattggccccatcgatgaagagcgcgatcttgttggtcgaagaaggtgacattcagtttgctcgcgtagtagccgtgattgatcgttttttgttggcgcggcaacagcaagccgcgcagttctagagtgctgcaaaaatccgtcgaaaccgcacgtccggagaagtcggggcaatcaaggtatagttatggcggacctgcatagacttggggccgccctcaatggcagccccgaatatcacccgtcccagccccaatgtggggttagcagagccgtttggcgaggccaaatcacaaattggccttgcgaaaccctcccggcccctataactagccccaatcatccacatatttcgtcccacccacaacggagcgacagtccatggctcgcgtcaccgtagaagattgtatcgacaaggtcgacaaccggtttgacttggtcctgctggccgcccaccgcgcccgcatgatctcatccggttcacaactaacggttgaccgcgataacgacaagaaccctgttgtgtctttgcgcgaaattgccgagacgacgatctcgccggaggacctccgcgaggagctggtgcactcgctgcagaagttcgtcgaggtggatgagccggagccggatgcggtgccgctgatcggttccgcgggtgccagcgtcgatgcggacgataccgaagtcgccgtggagcgcatgaccgaagaggagctcctgaagggtctggaaggccttgcgcctcccgaggagcagcccgaggaagacgagtaattcctccgtcgcgtccatcgatttgttgtgatctgatcaaaggcccgaaccctcgttcgggcctttgcttttgttgacgttttcgtggttaccatagcttgtcggttggcgctccgttcctgtcactgaattgatcggacacgcgggcgatcggagctaggatgtgtgcaacgggtcggggcacggtccgttgaaggcaggatgggatggtatatcggcgccgcagatccacgcagatgcaggccgcaaccgaatcggttgcagtggccccgactgcgccggtcgcgcgcccggccaggccccgcgcgcgcatgatgcgtcaatatgacctcgtcgagcgcgtcagatcctacaatcccaacaccgacgaagacctgctgaatcgggcctatgtctacgccatgaaggcgcacggctcgcagacccgggcctcgggcgatccttatttctcgcacccgctcgaagtggcggcgattctcaccgacatgaagctcgacgacgccaccatcgtggccgcgctgcttcacgacacgatcgaggacaccgaggcgacgagggccgagatcgatcagattttcgggccggagatcggcgcactcgtggagggactgaccaagctgaagcgcctcgagctggtctcgcgcgaggccaagcaggccgagaacctgcggaaattgttgctggccattgccgacgatgtccgtgtcctcctggtgaagcttgccgaccgcctgcacaacatgcgcacgctggatttcgtgccgacggaatcgcgccggcgcatcgccgaggagacgctcgacatctacgcgccgctggccgggcgcatgggcatgcaggaaatgcgcgaggagctggaggatctgtccttccgcactctcgatcccgaagcctattcggtcgtgatgcagcggctcgacgcgctcgccgagcgcaaccgcaacctgatcggcgagatcgaggatcaactctccaacaatctgcgccacaggggcttgggggcgcgggtctatggccgccgcaagaagccgttctcgatctggaccaagatggagcgcaagtcggtcggcttcgagcaattgtcggacatcttcggcttccgcctcgtcgtcaacgacgtcgaggcctgctatcgcgcgctcgggatcgtccacaccacctggccggtcgtgccggggcgcttcaaggactacatctcgacgccgaagcagaacgactatcgctcgatccacaccaccgtgatcggccccggcaaccagcgcgtcgagctccagatccgcaccgaggcgatggaccagatcgccgagcgcggcatcgccgcgcacgtgttctacaaggaaggcgtgggctcgccgaccgaatacctcaagcgcgagtcgaacgcgttcgcctggctgcgccacacaatcggcatcctctccgagagcgccaatccggaggaattcctcgaacacaccaagctcgagctgttccacgaccaggtgttctgcttcacccccaagggcaagctgatcgcgctgccgcgccacgccaacgtgatcgacttcgcctatgcggtgcataccgacgtcggcaacagcgccgtgggctgcaagatcaacggcaagttcgcaccgctgtcctccgagctccagaacggcgacgaagtcgaggtgctgacctcggaggcgcaatccgcgccgccgtcggcctgggagacgctcgcggtcaccggcaaggcccgcgccgcgatccgccgcgccacgcgcaccgcagtgcgcgatcaatatgtcggcctcggccggcgcatcgtcgagcgcctgttcgaacgcgccaagatcgaatatgccgacgataagctcaaaggcgcgctgccgcggctcgcgcgcacctcgatcgaggacgtcatggcggcggtgggccgcggtgagatcaaggcgtcgcacgtcgcacgtgcgatgtacccggactacaaggaggagcgcatcgcgcgctacggggtcaagaagggccttgcggccaagctcaaggagaaatcctcggagccgcgcagcccggttgcgatcccgatccgcggtatcaattccgaccttccggtgaagttcgcgccgaacggcggcgccgtgccaggggatcgcatcgtcggcatcgtcacgccgggcgagggcatcacgatctatccgatccaggcgcccgcgctgaaggatttcgaggaggagccggagcgctggctcgacgtccgctgggacatcgaagactccgcgccgcagcgctttccggcccgcatcagggtggagaacgtcaatgagcccggcgcgctggcgcagatcgcgaccgtgatcgccgagcacgacggcaacatcgacaacatcagcatgcagcgccgctcgcctgactttacggagacgacgatcgatctcgaagtctacgatctgaagcatctgagcgcgatcctggcccagctgcgcgcaaaggctgtcgttgcccgcgtcgaacgtgttaatggatgatgctcgtcgttgccgggcttgacctgatgcgcaggtcgatcccgcgcatgacgagttgggaaatgtcacttcgtgagtcctgaaatgcccgcagctccgctccgcctcggtgtcaatgtcgaccatgtcgcgaccctccgtaacgcgcgcggcggccgcaatccggatccggtgcgcgccgcgttgctggcgatcgaggccggcgccgacggcatcaccgcgcacctgcgcgaagatcgccggcacatccgcgacgaggacatggcccggctgaaggccgagatctcggggccactcaatttcgagatggctgcgaccgaggacatgttgcgcatatcactcgccaccaagccgcacgcggtgtgcctggtgccggagcgacgccaggaggtgacgaccgagggcgggctggatgtggtcggccagcacaacgcgctcgcaccctatatcgcgcggctgaccgatgcgggcatccgggtctcgctgttcatcgcggccgatcccgcccagatcgagatggcggcacggctgcgcgcgcccgtgatcgagatccataccggcgcctggtgcgacgccgtcgccgagagccgcacggacaaggccgaggccgaatggcggcggatcgtcgccggtgcgagactggcgaagtccgccgggctcgaggtccatgccgggcacgggctggactatgccacggcggagacgatcgcggcgctgcctgagatcatggagctcaatatcggccactacatgatgggcgaggcgctcttcgtgggtctggcagagaccgtgcgcagcatgcgggcggcgatggaccgcggccggagccgggcatgatcatcggcatcggctccgatctgatcgacatcacccgcgtggccggggtgatcgagcgccacggcgagcgcttcctcgaccgcatcttcaccgcggccgagcgggccaaggcggagcggcgcgccaagaacgagaagatggtggtggcgacctacgccaagcgcttcgccgccaaggaggcctgctccaaggcgctcggtaccggcatcaggcgcggtgtctggtggcgcgacatgggggtggtcaacctgcccggcgggcggccgaccatgcaactgaccggcggcgctctggcccggcttcaggccctgacgccggaggggttcgaggcgcggatcgacctttcgatcaccgacgactggccgctggcgcaggccttcgtcatcatttccgccgtgccgctggcaaagccctgacgtcatccgttcgattttataattcatatgtaaaatcaacgccttattcagttttgatgcgatccttgattgcgtggcctgcgacaaccgtctaaaagtccgcggacgcaaatcagcctgggcgaattcggctttacgccggaattggccctcactatcagaatcaggacaatctccatgggccgcgaagcaaagggctgttcgcgccaggagggcgctctgtgaccgccggccggaattgagagagcaatgagcgtgacttcaggaacgaaaactgagagcggcgtcggtgaaacaatccgggtcgtgattcacgctctcctgatcgcgctggtgatccgcaccttcctgtttcagcctttcaacatcccatccggctcgatgaaggcgacattgctggtcggcgactatctgttcgtctcgaaatattcctacggctacagccactattcgatcccgttctcgccgaacctgttctcgggccggatctggggctcggatcccaaccgcggcgacatcgtggtgtttcgcctgcccaaggacgattccaccgattacatcaagcgcgtgatcggtcttcccggcgaccgcatccagatgcgggacggtctgctctacatcaacgacgcgcccgtcgagcggcagcgaatgagcgaatatgtcggggaagacccttgcggttcggaaggcggcggcatctcccgggtgaagcgctggaaggagacgctgccgaacggggtgtcctacgagacgctggactgtgccgacaacggctacatggacaacaccaacgtctataacgtgccgccgggccacttcttcatgatgggcgacaaccgcgacaactccaccgacagccgcttcctcggccaggtcggctacgtgccgcaggagaatctgatcggccgcgcccagatgatcttcttctccatcgccgaaggcgagcatgcctggatgttctggcgctggccctgggccgtgcgctggaatcgcttcttcaaaatcgtccgatgaaagatgaagccaaggacatcgtgagccaaccggtcgaggcgcaagctggccccgagggggaagctgcgaccaggacggctgcaaacaagacgcccgcgaagaagaagcgggcgcggagcagcaaggccaagagcacggatgcgagcgcattgctcgaggcgcgcatcggccacagcttcactgacccgaacctgttgatgcaggcgatcacgcatgtctcggcgctgaagtccggacgcaagcgcggcgacagctatcagcggctggaattcctcggcgaccacgtgctggggcttgtcgtctccgacatgctctatcatgcattcccgaacgccgacgagggcgagctgtccaagcgccttgccgagctcgtgcgcaaggaaagctgcgccgaagtcgccaagtcgctcggtctgctcgacgacatcaagctcggctcggtcggctccagcgccgacgcgcgcctgcgcaagtccatcctcggcgacatctgcgaggccgtgatcggcgccatcttcctcgacggcggtcatgcggcggcagccgaattcgtcaggcgcaactggaccgagcgcatgcacaagccgcgtcgtcccttgcgagaccccaagaccgtcctccaggaatgggcgcaaggcaaagggctgccgacgccggtctatcgcgaggtcgagcgcaccggcccgcatcacgatccgcagttccgcgtcgctgtcgatctgccgggactggccccggccgaaggcatcggcggcagcaagcgggcggcagagaaggtggcggcttcagtcatgatcgaacgcgaaggcgttggcggcagcaatgacggctgaagcaagcggcgaggcccccaccgcgacgcgctgcggcttcgttgcgctgatcggcgcgccgaacgtcggcaagtccacgctcgtcaatgcgctggtcggagccaaggtcacgatcgtctcgcgcaaggtgcagaccacgcgcgcgctgatccgcggcatcgtcatcgagaacaatgcacagatcatcctggtcgacacgcctggcatcttcctgcccaagcgccggctcgaccgcgccatggtctccaccgcctggagcggggcgcacgacgccgatctcgtctgcgtgctgctcgacgccaagaccgggatcgacgaggaggccgaggcgatcctcgccaaggcgtccagcgtcaatcacgagaagatcctcgtcatcaacaaggtggacctggtccagcgcgagaagctgctggccctggcgcaagccgccaatgagcgcatgaagttcgtgcggaccttcatgatctcggcgatctcgggcgacggcgtcgacgacatccgcaagacgctcgcggaaatggtgccgccgggcccgttcctctaccccgaggaccagatgtcggacgcgccgatgcggcagctggcggccgaaatcacgcgcgagaagatctatcagaagctgcaccaggagttgccctaccagtccacggtcgagaccgacaagtgggaggagcgcaaggacaagtcggtgcgcatcgagcagacgatcttcgtcgagcgcgagagccagcgcaagatcgtgctcggcaagggtggcgccaccatcaagtcgatcggcgcggattctcggaaggaattgatgcagatcctggacgtcccggtgcatctgttcctgttcgtcaaggtgcgcgagaactggggcgacgaccccgatcgctatcgcgagatgggcctggacttcccgagggaataaccgagaaaagacagatcaccgatgagcgtgcccagcaatgtccggcgcttcgaagcgctgctctatgcatctttgatgctggatgccctgtcggtcgcggtgcatgaccgcacgcccaacgccggaatgaccgagcagatgatcatgaccgagactctgcttgccggtggcatgatcctgctgctggtctatttcgtccgtctggctgcgcatgggcgcaagaactggccacgctgggtgctcacggcagcgcttgtgctgtcggtgatctcgctcggtcagatcatcggcgaaaagggcctggcactggacagcgcgatcgagatcgtctcctgcgcgctgacgacgatgggcctctatttctccttcaccggcgacgcgcagggctggttcaacgcctagcgttcaccccggggatgtttcgccctggaatgacggggagggcactgcacccctcatagaaatccgctaagcttccctcatggaatggaccgacgaagggatcgtgctgggcgtgcggcggcatggcgagagcagcgccatcgtcgagctcttgacgcgcgggcacggccggcatctcggcctggtccgcggcggcgccagttcgcggatgcggccgctgctgcaacccgggaacagcgtcagcgcggtgtggcgggcgcggctcgacgagcacctcggcacctacaccattgaagggctgaagctgcgcgcggcgaacctgctgacaacctcgcacggtgtctacggcatcacccatctcgcctcgattgcgcgcctccttccggagcgcgatccacacgaggagatcttcgcgctgctcgaacattcgctcgacgatttcgacgacatcggcggcgccgccgtgcacgtcatccatttcgagctggcgatgcttgccgagctcggcttcggcctggcgctggagaattgtgcggtgaccggcgaaaccacggacctgatctatgtctcgccgaaatccggcggtgcggtgtcgcgcggcgcgggcgagccgtggcgcgaccggctgttgcgcctgcccccattcctgcgtcagggcgaagctgcgagcgatctcaccgagcaggatctccaggacggctttcggctcaccggcctgttcctgctgcgccacgtgctggagccgcggggacagggccattccgatgcgcgcgccggcttcatcaatgccctgatccggcagcaggcaagggcatcgctgccggcaccctagactgtccgtctgggctcttcccggcgaattccagcgtccagccgcgggaagctcgcttgcagggctgattcgcgtcttgcccgatttgcgccgagggtttaaccggacggcatgggaaaacgaatcgttccgccggaggaaccggccgaaattcacgaggtgccgctgcgtgaagcgctggaagagcgctatctcgcctatgcgctctccaccatcatgcatcgcgcgctgccggatgcgcgcgatggcctgaagccggtgcaccggcgcatcctctacggcatgcgcctgctgaggctcgacccgggcacggcgttcaaaaagtcagccaagatcgtcggcgacgtgatgggctcgttccatccgcacggcgaccaggcgatctacgacgccatggtgcgcctcgcgcaggatttctcctcgcgctaccccctggtggacggccagggcaatttcggcaacatcgacggcgacaatcccgccgcctaccgttacaccgaagcgcgcatgaccgacgtcgcgcggcttctgctcgacggcatcgatgaggacggtgtcgagttccgcgccaattatgacggccagtcgaaagaacccgtcgtgctgcccggcggcttcccgaacctgctcgccaacggcgcacagggcatcgcggtcggcatggccacctcgatcccgccgcacaacgccgcagagctttgcgatgccgcgctgcatctgatcgagaagcccgacgcgaaatccaaggcgttgctgaaatgggtcaagggaccggacttcccgaccggcggcatcatcgtcgattccaagcaggcgatcgcggaggcctatacgacggggcgcggctcgttccgcgtccgcgcgcgatggcagcaggaagagggtgcgcgcggcacctgggtggtcgtcgtcaccgagatcccattcctggtgcagaagtcgcggatggtcgagaagatcgccgaactgctcgaccagaagaagctgccgctggttggtgaagtccgcgacgaatccgccgaggacgtccgcctcgtcatcgagcccaagtccaagaacgtcgatcccgcgctgatgatggaatcgctgttccggctgaccgagctcgagaacaagatcccgctgaatctcaacgtcctgatcaaggggcgcatccccaaggtggtcggcctcgcggaagccttgcgcgaatggctggatcatctgcgcgacgtcctgatccgccgcaccaactaccgcaagggcgagatcgagcaccggctcgaaatcctcggtggtctgctgatcgcctatctcaacatcgacgaggtgatccggatcatccgcaacgaggacgagccgaagccggccttgatcaaggcgttcaagctcaccgagttgcaggccgactccatccttaacatgcggctgcgcaatctgcgcaagctcgaggaaatggagatccgcaccgaggacaaggatctgcggaaggagctgaagggcatccaggccctgctggcctccgagcccgagcagtggaagaaggtcagcgagcaggtcggcaaggtccgagagatgttcggaccgaagacgccgctcggcaagcgccgcaccacatttgcagatgcgcccgagcacgatctcgccgcgatcgaggaggccttcgtcgaacgcgagccggtgacggtcgtcgtctccgacaagggctggatccgcaccatgaaggggcatgtcgaggatctctcgggccttgccttcaagcaggacgacaggctcggctttgccttctttgccgagaccacttcgaagctgctgctgtttgccaccaacggcaagttctactcgctcgacgtcgcaaagctcccgggcggccgtggccatggcgagccgatccgcctgttcatcgacctcgagcaggaggccgcgcccgtcgcgctgttcgtccacaagggcggacgcaagttcctggtcgcgagccatgagggccagggcttcgtcgtcaacgaggacgattgcgtcggcaccaccaagaagggcaagcaggtcctcaacgtcgacatgccgaacgaggcgcgtgcgatcaccgaggtgaccggcgacaccgtcgcggtgatcggcgagaatcgcaagatgctggtcttcccgctcgaccaggtgccggagatggcccgcggccgcggcgtgcgcctgcagaagtacaaggacggcggcctttcggatgttgcggtattcgattccaagacgggcctgacctggaaggattcggcgggccgtgaattctcggcgaccatgaaggaactcgccgagtggcagggcacccgcgccgatgccggccgcctgccgccgaagggttttccgaagtcgaacaagttcggtcgggggatcgggtaggtggtcgcgtgtcccggacgcgctgcagcttgcaacgctgccgtgcagagccgggacccacgccatgcggactgccaggagaatggagcccggcccagcagggcaactttccgcgttgcgctcgcaatgacgagaagtggcagccgcgcgcttccatccgcatcgtgcaaacgcgtggctgatagtcttgagcgcatacgtgctgcggccgtatgggcacgaacattgctttttgctggcgaccgtaaccgtgtcgcgagaaggcaagaagaaaccgatgttcagactcaagtccctcatcccggcgctgctcgctttggcgctggcggcgcctgcgcatgcggcgggcaatctcgtcgccgtgctggaagcggagatcgtgacgctcgatccgcatttctccacggcctatatttcgcgcacgtttggctacatggtgttcgacacgctgtttgcgaaggactccaagggcgacgtcaggccgcaaatggtgcaggactggaaggtctcgcccgatggactgacctacagtttcacgctgcgcgacggcctgaagtggcatgatggccagccggtcacatcagccgattgcgtggcctcgctgcgtcggtggggcacccgcagcgcgctcggtcgccgcatctttgcgatcaccgtgtcgctggagccgatcgatgccaagaccttcgtgctgacgctgaaggagccatccgggctcgtcatcgacgcgctcggcaatcccgtcagccccgtcgcgttcatgatgcccgagcgcatcgccaagacaccgggcgaccaacgcatcaccgagatcatcggctccggcccgttcgtctacagcaaggccgatcaccgcaccggcgaccgcatgatcctgaagaaattcgccgactatgtgccgcgtccagagccggccgacttcctcgccggcggcaagcgcgtgaacgtcgatagcctggagatccgcgtcattcccgatggtgcaaccgcagcctctgcgctccaggccggcgaagtcgatttcatgcaatacgcgccgttcgatctgttgccgcaattggagaagaactcgcgcgtgaagctgctcaatttcaccggcggcaacatgtttgcgggcgcctaccgcctcaacgccgcgtcgaaaccgttcgacgaccccgagatccggcgcgtgctgtggaagctggtcgaccagcgcgaagtgcttgatgcgctcgggctcgatgccaaatatgccacgccatgcgcgacattcttcacctgcggcacgacctatgagagcaaagcgggcaccgaggccgcggcgaagccgtcgatcgatgcggcgaaggctgcgctgaaggccaccaaatatgccggcgagcccgtcgtcgtcatgcaggccaatgatctcgaagccccgcgcgtctcggcacaggtgctggccgagcgcttgaaggccgccggcttcaatgtcgatctgcaggtaatggactgggcgagcgtgctggcgcggcgtgccaagaaggagggctggagcgtctatggcgttcacgccggcggttttgatctcggctccccgttgacgaacgtcatggtcgccttcaactgcgcagacttcaccggctggcaatgcgatgcgcgcatcacgccattgctggaagccttcgccaaggcgcccgccgaggaggaccgcaagaagatcgcggccgagatccaggccgtcatgtacgaacaggctcccggaatcccgtggggccagttcgcgcagcccgccgcctatcgcgcgaccttgcgcggtctgataccgtccgccatcccggtgttctggaacgttgagaagtaacgcgatgtacgatgtcattgttgtcggcggcggttccgccggcgccgccgtggccgcaaggctctccgaagatcccgcacgccgcgtgctgctgctcgaagccggcctcgactggcgcgccgacgaagcgccctgggaggtgaggacgccaaatcccatcccgatcatccacaagcgcgagtatcaagagaaatggcagtggcccgatctgctgacgcgccgcgtggccgggcaggagccgcgcttctactggcgcggcaagggcctcggcggctcgtcgatgatgaacggccagatcgccatccgcggcgttgccgatgccttcgacgaatgggccgccaatggctgcaccggctggtcggccaaggaggtgatgccgctgttctcggtgatcgaggacgatctggagttcggtgacgccgcgggccacggccgcggcgggccgttgccagtgtatcgcgcgcccaccgagaaatggggcccgatcgaccgcggcttgcgcgacgcggcgctggcgagcggctatccctggtgtgccgacgtcaacggcccggacggcgagggcgtggcctgctatcccatcaacagccgcgacggccgccgcatcaccaccaatgagggctatctcgagcccgcgcgcggccgcgccaatctggagatccgcgggcatgcgctggtcgagcgcgtgctgatcagcgacggaagggcgaccggcgtccgcgtccgcatcgaggggcagggtaccagcgacatcagcgcgcgccagatcgtgctgtgcgccggcgccatccacagcccggcgatcctgctgcgctccggcatcggacccgccggggaattgaaggcgatggggatcgcggtcgcgcgcgatctgccggtcggcaagcatttcttcgaccatccgctgtttcgcgccacgatccagctccgggaggagcttcgtcccaccgatcccgacacgcgccacaccaattgctgtgtgacctattcgtcgggcctcgccgatggcggcaagcgcgacatgatcctgatcgcgttcaaccatcgcggcattggcaacgccggcgcgatcggcgcgggcctgttcaacgcttattcgcgcggcacgctcaagctggcctcgaccgatccttcgatcgatcctgtcgtcgaggagaacatgctggccgacccccgcgacatgctccgcatgatcgatgcggtgagacgcctcgctgtgatcacctcgcaaccggcgctgtcaggcatcgccgaatggatccggctcgccgacacggacctcacgctgccgcaggccgcggcactgccggatcacgagctcgatgcggtgctgagacgtgagaccggcgacatacagcatgccgcaggcagctgccgcatgagcggcgttggtgatgccgacggcgtggtcaatcctgatgggacggtgaaaggcctcagcggcctgcgtgtcgccgacgcctcgatcatgccgtcggactgccgtgccaacacgcacttcacgacggtggtgattggggaagcgatcgctcggatgatgatgcgatagctcgcatcccaaacgccagcgttctgcgcggcccaggaggcctagcgttcgacagcgaggccgaacagcggccgaagctgcgttcccaggatgttgccgacgaaagccgcgaccagccagcaccagccgtgcagactgccggaagcgattccgctgaaataggcgccgatgttgcagccataggcgaggcgcgcgccgtatccgagcagcaggccgccgacgacggcagcgagcagcgagcggggcgagatacgccaggtggggctgaacttgccggcgagacccgcggccagcaacgctcccaggatgataccgaaatccatgacggaggtgatgtcggcgaagatgctttggttgagcgaggcggcgcgcgcgccttgccagtacggccatgacgcggcgtcgatgccaaggcccatcaggatcttcgatccccaaagggcgaaagctgaggtgatgccccatggccgcccggcgaggtacaacgtggcgaaattgccgatcgcgagcaggaccgcgccccacaggaggggccacggcccttggagaaagcggcgtgctccgcgcagtttcgtccgcgctcccggctccagctctccatgccgccggagctcggccctgacggtgaacagatggattgcggccattgcggcccagcagagcagcagtgccgggagccacccgagctggtcgatcagcgataccgagccgacgttcggcagctcgctccaccacggcaaatgcattgcaccgatcgtcgaaccggcgatgaaggccgccaacgtcaccagcatgcgcgtgttgccgccaccggccgtgtacagcgttccggaggcgcagccgccgccgagctgcattccaaggccgaacaggaacgctccgctcaacatgcccaccccgaccgcgccgagctcgccacggacggcgttgccgaacagcgagccgtgcgccagcgctggaaagaacagggctgtcgccagcgcaagcatgaccatttgtgcgcgcagtcccgctcctctgcgtgagacgatgaagacgcgccaggccgaggtgaacccgaacagcgcatgatagagcgtcaggccaaggccgccgccgaggagaaacaacaatccctgctgccaggagatcgtgcccgacagcgccatcgctcccccgaagagaattgccgctgcaatggcggcgatcgggagattggcgcggtgccgatcattgtcgggagcgaggagccgggcatcgatggaaagatcggtcatgctctattcccaggcctgtcttgctggcaaaggagagctaaccttggcagacaggcgccgttccaatctgctcacgatgagatatctgcacccgagacggacgaaggccacattgatcctgccccaaaaggcggctgcaagctggcgcagcggcctttcaggtcgtcgagagatatccggcgttcagatcatctgaccgcccgatacttcgatccgttgccccgtaacccaccgattgtcttcgctcaacaggctcgcgaccatcggaccgatatcgtcggggacgccgacgcggcccagcgccgtcatgcctgcaaactgcttgttcacgtccggattgtcacgcaccagaccgccaccaaagtcggtttcgatcgcacccggcgcaacgctgttgacgcggatgccgcgcggtccgagttccttggccatgcagaccgccatcatgtcggcggcggctttcgcgatggtatagacggcgaagcccgggtaggtgacacgcgtcaggccactgccgatggtcacgatcgagccaccgtcggccatcaatggcaagagagcctgcgtcaggaagaatacgcctttgacgtgcaggttcatctgctgatcgaactgagccacggttgtctcgccgagcgtagcgaaaaggccgtcgccggcattgtgcacgaggtagtcgaaggtctcgcgcccgaatgtctccttcagcgtctggctcagtgctcgcgcgaaatcgggaaatttggcgacattggcactgtccaactggaaggccacggcccggcgtcccagcgctttgatctcggaaacggcgctctccgcgagatctgcgcggctccggtatgtgatgatgacatcgctccccttgcgcgcgatgttgaccgccatgttgcgaccaagtccgcggctcgcgccggtgacgattgcgattttagccatgtgatgtctccttcctgacaccgcgaaggtggcacagaccgttgcacctcggttgccggatccttgagtcttcttgcctattcctccaaatggcagtccgcgggcctcacatccggccggcacaagggggcggtcgattccacaaacgcccaaagttgtagcagcccagcaatggccggttgctggagctctcggttggtataaattcgcggaatgacgaccttgctcgacgttgttcgccgctacgcgcatttgcattccgatcaaaacggtgccgccaagaccccgatcccgggcctcacggccattcgagctacgacgcagggtcagctccagcacgcaatcaacaggccgctcgttgcgctcgtcctgcagggtcgcaaacgcgtgacgatgggatcgcataccttcgatttcggggcgggggagtcgctcttgatctcggccgatgtgccgacggtaagccagataacccgcgccagcgcaaaggctccctatttttccctgatcgtcgagctcgagccggcggtgatcgcgaatctgatcgtggagatgaatctggctcccgagcagcgaggcgcccctgtgagcgtcgatccgactgagtcggaggttgccgatgccgcgctgcgactgatgcggctgctcgatcgcccgtcttctctgccggttctgcaatcccagttcgtccgcgaaatccattactggctgctggcggggcggcacggcgcgtcgatacgagctctgggggtggccgacagccacgcgcaacgcatcgcgcgcgctgtcgcaatcattcgatccgaatacgcaaggccgttgcgcatcgagcgcctggcggacgcggctgccatgagtccttcctcgtttcaccagcacttccgcgcgatcacatcgctcagtcccctgcaatttcagaagcagctgcggctcatcgaggcgcgcaggatgatgctcgaggagggctccgaggtgagcagcgccgcctttgcagtaggctacgagagcgtcccgcaattcaccagagaatatggacgcatgttcggcctgccgccggccagggatatcaaggccgccctcggtcaaatggacactgcgcctgaggccatgccagtctgcgctcggaacgtacgagcccggacagcgcagtgcgccgctcttccctagatcaccgccgccagcctcagtgccaggcccgccgcgcagcttcccgccagcacggtcagcatgccgagcttgaaccggaagatcgcagtcgccgccgcgaccgcgagcaacagcgccggcaggtcgacgctcctcggcaccggcatgtcgaagtcgagcggacacgcatgcaccggcacggtttcgcggaacagcgtgtgcagtgcgaaccagatcgagaggttgaggatcacgccgaccacggccgcagtgatcgcactgagcgcgccggcgagcccggtgttgccgcgcaggcgctcgatatagggcgcgccgaggaagatccacagaaagcagggcgtgaaggtgacccaggtcgcgagcaggccgccgagcgtggccgccagcattggtgacaagccgctcggatcgcgataggcagccatgaagccgacgaactgcaacaccatgatcagcggccccggcgtggtctcggccatgccgaggccatcgagcatctcgtgcggcttcagccagtgataatgctcgaccgcctgctgggcgacataggccagcacggcataggccccgccgaaagtgacgagcgccatcttcgagaagaacagcgcgatctggctgaagacgttgccttgaccgaaggccaggagcagtccgatcaccggcaccagccagagcgccagccacaacgcgctgagccggatcgcgcgcgctgtgtcgggcttgacgtggtcgggcatggcctcgccgagcatgctgtcgaccgcggcgctgctgtcgccatggccgtgaccggccggggcgaattcagagcggccgctgcgcgcgccgacatagccgatgatacctgccgcgatgatgatgatcgggaaggggactgcgaagaagaagatcgcgatgaaggccgcggccgcgagcgcgaccatgatacggttcttcagcgcgcgcttgccgacacgcacgacggcctcgacgacgatggcgagcacggcagccttgagcccgaagaacagtgcctcgacgaagctgacattgccgaatgccgcatagatgtagctgaggcccatgatggcgacgacgccgggcaggatgaacagcccgcccgccatcagcccgccggcggtgcgatgcatcagccagccgacataggtcgcaagctgctgcgcctcgggccccggcagcagcatgcagtagttcagcgcatgcaggaaacggccctcggagatccacctcttctcctcgaccaggatgcgatgcatcaccgcgatctggcccgcgggcccgccgaagctcaaggacgcgacacgcagccagactcgaaaggcctccccgaagctgacgccgtgaccggcgtcagcctccgcttgaacgttgcggatatccattacgccttcaccttgttggtgggccagttgtgggtctcggcggtggcgtcgcggcaccagcggaagaaggcatcgtagagcagcatgccggcctcgagctgatcgaggtcgtcgtcatacatgcgcgacagcccgagcgaggccgccagcaggccgggcgcctccggcgcgagatccggccgcgcggtgtcggcgccgcgcaccagcgttgcgagccggagcaggggcgggaaggcgatcccgaactcctcgatcatgacgtcgaaggtgcagagctcgccacggtggctccagaacacgttctcgatgtcgaagggtgctgcattgaaccgctcgccgacgccgacgacctccgacggtgccacatacaggaacaccgcgtcgggatcgacgaagcggcggatcagccaggggcaggcgatgcgatcgaccttaggccgcgcccgcgtcacccagacggtgcgccccctggcatcgcgtggcggcagcttgcggacatcgaccagcggcagcctggccgccttccagccctcgaagccgccctccagcgtttcggcttgcacgccgagctggcgcagccaggctgcggtgccctgcgcgagcttctctccgcgcaggcaggatacgacggcacggcgcccggcgaacgcgccgccccagtccgtcacattgtcgtggccgaacttgatggagccggggatcagcctccggtcggcagcaaaatcctcctcggtgcgcacatcgatcagcgcaggcgcgttcgccgtgccgatcagccgtgccagtttgtcggatgagatggtggtgaatgtagacatgatgcgtcctcgcaagaaacgaacgggacgcgatgcttgggcctgtcgcctcgtggggagatcgctcaaatccccatgacgccgattacagcgaaactaagaagcactgtcaatccgcgggacgattggaccttagaaaattgcggcccgccgtctatattgcacgccgacagagctgaatcttcgggagaattcgatgcattcccactccatcgaacaatggacccacgaccacgccttcctcggcgagaagcacgaagacaacgagcgccgcacctggctggtggtcgtcctgacgctggtcatgatggtcggcgagatcgttgccggctcggtgttcggctcgatggcgcttctcgccgacggctggcacatggggacgcacgcggcggcgctgggcattgcggccttcgcctatcgcttcgcgcggcggcacctggggaatgcgcatttcaccttcgggaccgggaagttcggggatcttgccgcctttgccagtgccgtcatcctcggccttgttgcggtggagatcgcctatgagagcgtgctgcggctgatcacgccggtgccgatcgtctacggcgaggccatggccgtggctgccctcggcttgtgcgtcaatctcgtcagcgcctggttgctgcgcgacggccatgatcatcaccatcacggtcacgaccatggccatgcgcatgatgaccacgacgatcgtgaccgcgatcatcggggccatcatcaccacgacaacaaccttcgcgcggcctatgtccatgtcatgacggatgccgcaacttctgtgctggcgatcgccgcgctcgccgtcgccatgtattcgggctgggtctgggccgatccggcggtcggcctgatcggaagcgccgtaatcgcgagctgggcgttcggcctgatcaagtcgtcgggtgcggtgctgctcgacgcgcgcgccgacgagaagctggagcgggtgatccgggcccgcatggaagtcggcgacgatcgggtgacagacctccatctgtggcaggtcggccccggccattgtgccgtgctgctctcggtggtgtctgacaagccgaacgagccgtccgtctacaagcgccggctcgcggggttgaagggcctcagccatgtcacggtcgaggtcgagacctgcccgcattaacgggccgtcacagatcgctggcgtgtgcgagacgccccaaggtcaatccgggcgcgggcccgtgcggatcaggaacagcgctgcaagcgccgagaggctgagcgcggaggacacgatcagcaccttggcgcccatgagatcgatcagcaggccgaaggcgagcggcgctaccgcctgcgccattcgcgccggggcaccgatgatgccgaggcgatagccgaaatccttcgggccgaagatcgacagcggcagcgtgccgcgcgcgatcgtcagaatgccgttgcccgagccgtggaacagcgcaaaggcgcttgccgcagcgccgccgaagattgccacgatcacggctccgatcgggtgggtgaggctggcgagccgcgtcgaccaaagcgggtggaagcggctgagaaagccggcctccagcatgcgcgcaccgacctgcgcagggccgatcagtgcgccggccgcgatcgcctctgccggcgtggctcccgtcgtctccaggatgcgcgggaagtgcgcggccatcgcgccggtcacggtccagaccgccgcaaagacgaaagccagcaggagcatggtgcggtcgagcggcacatgcggcttctcggccgtggccgccgcctgtttcgcgcccttgatcaccggcaacatgaagaagttgagcggcagtccgatcaggacgttggcggcggcccaggcaaagcaggtttcgcgccagccgatatgggacaggccccaggcggtgagcggccagccgaccgtggaggcaaagcccgccatcagcgtgatgccggtgatgggcccgcgcgcctcggtgccgtagatgcgccccagagcggcgaaggcggcgtcgtagagacccatcgccatgccgatgccgagcacgagccaggcgatcgccatcaccgccaccgactgtgacagaccgagcaggacaagtccggcggccatgatcaggttcgaggccgagagcacctgcctgccaccgaagagatcgatctgccgtccgatgcgcgggccgagcatcgccgagagcaccagcgcggtcgagaatgcgccgaaaatccagttggaggagatgccgagttcgtgcgccattggatcggcgagaagcgccggcagataatagctggaagcccaggccagggtctgcgtggtgccgagcgccaggatgatcggaagccgacgctggctcatgtccttgtgcttttggtctttgtcatctcgtgcatttgcggcttgccgcgagagtgcgtcaacagcgtctgcggcatattcgccctgctgcgggcgggagacttgcgagcgtgcggacatccgccttccgctcgtcacgaatgcacgccataatggcgcatgcaactgacttcgcgccttgcgctgatgaactggctggccggccaggggctcacgggcctgcctgaaagcgagctgctccgcggcttctgcgagcgttgctgcgccgaggggctggaactgtcgcgtgggctcgtcgtcatcgacacgctgcatccaatctatgagggccgcggcttccgctggagcgaccggtccagcaacgagagcgatgcgttcgaatacggctcgaccgccgacggggacgcggccaagaactggcgccgctccgtgttcttccacatgctcgagaacggccacgacgagatggtgatcgatctcgcggaggcgccgtcgctcgatttttcgcagatcggcgaactcgccgacaagggccacaagcactatctcgccttcgtgcatcgcttcggcgagaatggtgcgctcggcctgatggattgcctctattcctgctggaccacccgccgcgagggcggcttctccggattggaactggaggcgctgcgcgatctcgtgccggtgctcggcctcgccatcaagtcggcgcagcaagtcgatatcgtgcgtaccctcggcagggtctatctcgggcgcgatgcctccgagcaggtcttgcgcgggcgcatctcgcgcggcgtcaccgagcgcatcaacgccgtgctctggtattcggacttgcgcggctcgaccgggatcagcgagagcatcggcccagacgagatcattccgttcctcaacgactacgcgcaggcggtgatcgacgcgatccacgacgcgggtggggacgtgctgaagctgatcggcgacggcgtgctcgcgatgttctggggcgaggatatggcggatgcgcggcgagcagcactgcgggccgagcacctgttccgcaagaacctcgccgcactgaatgagcggcgcgcggcggagggccgtccgatcacgtcggcctatatcggccttcatgtcggcgaggtcttttacggcaacatcggaagcgaggaccggcttgatttcaccgtggtcggcccgaccgtgaacgaggtcagccgcatcgcctcgatgagccgctcggtggaccgggagctgctggcctcatccgagttctacaagggtctcgatgcagccggccgccgctatctcgtctcgaccggccgctacgcgctgcgcggcatcggccgcgcgcaggatctctatacgctggatccggaggtcgatgcgaacgagccggtgatggggagctacgagcgttacctggcgggttaggacaggctgcccacacatactccgtcatggcgaggagctcttgcggcgaagcaatccagacctcctccgcgggaagcccggattgatcgcttcgctcgcactgacggtcaaactagcaccgcaccgccgcttcgtccccgaccatgtccggctgccgatcgagcgacactgccggcgacagcaggatcaccagcgcctgcacgccgaacacggcggcggcgagatagaggcaggcttccgcgctccagagcccgccgacgccggcgcccagcgccgagccgagcggacgggcgccgtagctcatgatgttgatggcggagacgcggccgagcaggcgcgacggcgtcacggactggcgcagcgtggtggtcgagatcacccacaggatcggaccgacgccgagcaggaagaagctgaaggccgcgagccagggcgaggggagcggcaccgtcagcgccatcaccaacgccgcgacgaagccggttaccggtccgaggccgacgacggtgccgaaggagaggcgccgcatcacacgcgtggcaaccagcgcgccgatcaccatgccgacgccgtacatggtcagcacggtgccgacgcccaaagccgtgaggccgagatggcgtacagcgtagggcacgaatacggcgatctgcaggaaccagccggtgttgaagatgaactgggtgatgaacaccggccgcagcagcgggtggcgaaacacgaacgccgcgccctcgcggatgtcctgtaagggatggcgccgcggcgcaggcgcgcgggccggctcgtagatgccggagaggagcacgacggcaatcgccgacagcgccgcagcgaaaccgaaggccgggctcgcgccccaccatcccaccagtgcgccgccgagtgcggggccgctggcgaaggcgatggtgcgcgcgagctcgatgcgagcattggccgccggcaggaggtccgagctcaccagcgaaggcaccagcgccggcgcggctacgctgtagacaacggtgccgcacacggcagcgaagccgagcagcgcgagcagcgggagattgagcgcgccgagcgcgagcagcagcactatggccgcaagggccgccgcccgcagcgcctcggctgccgccatcagcgcgcggcgggagatacggtcggcgagcaggccggccggaatggcgaagataacgaagggcagggtcagtgcggtctgcaacaggccggtccggccttccgccacaccgagcgtgagcaccgcgacgatgggggccgcagccaatgcgatctgctcggccgactgcgccgcgaggttggaccaggcgaggcggttgaacgtgtccgggaggcgagctggcattgacatggcgcatatcctgcaaagtcgaatttgttcaatgtgcgctcctgaggaccagcagacccacccgcttcccgacaagccgctacgggccgcctgagaaattgcagcggctagatgcagttgcaaatgagttgcaataagaacaaagttgggtattctggccgcatggatgcccgatcacccgacctgaccgaagccttgagccagcccgccagcggctggcgttctgatgcgcccaccacgaagagccttgccgaggtcaattccacggtctcgatcccggttgccggccactggtcgcggcggctgctggcctttgtcggtcccggctatctcgtctccgtcggctacatggaccccggcaactgggcgacggacctcgccggaggctcgaagttcggctacacgctgctctccgtcatcctgctctcgaacctgatggcgattctgctgcagtcgctggcagcgcggctcggcatcgtcaccgaccgcgaccttgctcaggcctgccgcgcctcctatccgccggcggtgaacttcctgctctggctcgcctgcgaggcggcgatcatcgcctgcgatctcgccgaggtgatcggcaccgcgatcgcgctcaaactgctgttcggcatccccctgatcggcggcgcgctgctcgccgcgctcgacgccttcctgctgctgctcctgatgaaccgcggcttccgttttctcgaggctttcgtcatcgcgctgctcgtggtgatcgcggtctgcttcgcggtccagatcgcagctgcggccccgcctgtcgcggaggttctgcgcggctttgtgccgacgagcgagatcttcaccaactccgacatgctctacatcgcgatcggcatcatcggcgcgaccgtgatgccgcacaacctgtacctgcactcctcgattgtgcagacgcgggcctatgagcgcaacgataccggccggcgcgaagcgatcaaatgggctacgacggactccacgatcgccctgatgcttgcgctgttcatcaacgccgcgatcctcgtggtcgctgccgcgaccttccacaagagcggccattccgacgtggccgagatcggccaggcattcgagctgctctcgccgttgcttggtctcggcattgcctcgacgctgtttgcggtggcgctgcttgcttccggcctgaattcgacggtgacggcgacgctcgccggccagatcgtgatggaaggcttcctcgacctgcgccttccgagctgggcgcgccgcctgctcacgcgcggcatcgccatcatcccggtgatcgtggtcacggcgatctatggcgagcgcggcacggctgatctgcttgtgttcagccaggtcgtgctctcgatgcagctgcccttcgccgtcatcccgctggtccgtttcgtctccgatcgccgcaagatgggcaagttcgcgatcccgatgtcagtcgccgcggtcgcgtggatcgtcgcgagcgtcatcgtgattttgaacgtcaagctgctggcagatacgctgttcgggtgagcgggatcagtggcgatggcggcgacgcggcgcctaggggccgagcggattgacgtcgagatcgacgtctttcacacattgctgcgcggggcagattgcgcgcgggtagccctgatacaagcagtaaacctgccgtcgttcgatgatcgcgcaggcgatcaatcgtaggtttgactcgacaaggatacctccgcatccactggcgcatacggcgtatgatcgtcagtcctgcggctcggacgcaacatctccctgtgcatcgatacgcagccagcccgaaggcgcgaggcgttgctgcggcaggaagcgggccttgtagtccatcttcttggagccctcgatccagtagccgagatagacgtaaggcaggccttggcggcgggcgcgcgcgatgtggtcgaggatcatgaaggtgcccatcgagcggctgacctggctcggctcgaagaaggaatagaccatcgacaggccgtcgctgagcacgtcggtgagcgccaccgcgatcagctcttcaccgcggccggtcaggccactatcggggccgcgcttgcgatattcgatgatgcgggtctcaacgtggctgtcctcgaccatcatggcgtagtcgagcacggtcatgtccgccatgccgccatgtcgatggcgcgcgtccagataggcgcggaacaccgaatattgctcggacgtgggaaccgcgctgcgctgctcgccgatgatgtcggcattgcgcgtcatgaccttgcggaagttgcgcgaaggccggaactcattggcgatgacgcggaccgagacgcaggcgcggcactggtcgcaggccggccggtaggcgatcgactggctgcggcggaagccgccatgggtgaggaggtcgttgaggtcgccggcgcggtcccctaccaggtgcgtaaacaccttgcgctcatgccggcccggcaaatacgggcagggggagggcgccgtgaggtaaaactggggcgtgtcgcgcgagtgctgggtcaagggacgtcgtgggcctccgaaacgggcatcagcatcgcgctccagaggcccccggtcaatcgattagctcaccaggtccgcgccgtctgaggcgcgggcacgcgaacggaattgttgatcaccaccgttcccagcaagaagtcgtgcagcaggcgacggcggccgttgaacaggccgaccagcaccacgaagggcgtcaggaacgagaccgtcacccagaacagcacggcgtgggtggcgccgagcacgaaatagccgggtgcgccgtaccaggtgcgcaattccaggtccatcaggcgcattccgaccgtcgcggacgagggtccgccgatgctggcgccgtagtagacgatcgcccagacaacggaggccggccacgcgatccagaacagggcccagccgatcccgagcgtgaccacgccgaacaatgcgatgaagatgtagccgaggatcaccggcacggagatcacgcccatgtcgataaaaaaggcgaagacccgccgtgtcgcgacgccacgaaacagttccggatgcaggtcagggtcgtaggcatgcggctgcaccccgccgtcattgcgccaagcgcctgaattgcccggatcatacgacatcgtccgtcctccaacgggaaagcccccgaggcaggacatgggcacaagccatcccgatgccaagggcgccctggcattaacaagccgaaatattccggcgattcgggggcggttctctcgccaccgtcattccggggcggtccgcaggaccgaactcggaaatctagagattttcgggtgcgcaattgcgcaccatcgttcgatcctatcgcatcgccccagaatgatcggcgttgcccggcgcggttcgcgctgcggcagcctacgtttgcgcccgcagcttctccgccgctttcggcgcaaaatagctcagcacgccgtcggcgccagcgcgcttgaaggcgagcaggctttccatcatcgcccgttcgccgtcgagccagccgttgttggcggcggctgcgatcatcgcgtattcgccggagacctgataggcgaaggtcggcatcgtgaaggtgtccttcacgcggcggaccacgtcgagatagggcatgccgggcttcaccatcaccatgtcggcgccctcggcgatgtcgagctcgacctcgcgcagcgcttcgtccgtgttggcgctgtccatctggtaggtgcgcttgtcgccggtgagggtcttggcggagccgatggcgtcacggaacgggccgtagaaggcggaggcgtatttcgcggcataggccatgatctgcacgtcgagcagaccggcgcgatccagtccctggcggatcgcggcgacgcggccgtccatcatatcggagggcgcaatgatgtcgcagccggcttcagcctgcaccagcgcctgacgtaccagcacggcgacggtctcgtcgttcaggatcttgccgtcggaaatcagcccgtcatggccatggctggtgaagggatcgagcgcgacgtcgcagagaatgccgatctccggaaactccttcttgatcgcccgcaccgcctggcagaccaggttatccgggttggtggcttccgagcctgcctcgtcgcgcagggaagggtcagtgtacggaaacagcgcgaggcagggaatggtcagcttcatggcgcgctcggcctcgcgcacggcctggtcgacgctgagccggtcgacgcccggcatggaggcgacctgctcgcgcttgttgtgaccgtcgatcaggaacagcggccagatcagatcgtcggtggtgaggacgttctcgcgcaccatgcgtctggcccactcggccttgcggttgcggcgcggacggaccgtcagatcgagggcatgaggaactgccgtgctgtcccggcgcgacacttcccgcagttcgatcggacgtccgtatttgatcgccatcattcttcctccggctggaattattcttataccagctcgcacggttcccgtcaccgcggcttgacctgccgcaaaggatggcagccgattgattttgccgggcgaagcagccagaaggggccatgtccgagatctccacccgcgacgcggcccgcgacagcgcccatgccagggacgcccgagacaatgccagagagagcgcactctcggtggcggcgatctcgtcggagcgcgccgagtccgacgacagtgtctggacgcgccggctggtgctgttcctgcgggtgatggcgctgctgtcgatcctgaaaggtctctatcactgggcgcaagtgacgggtttcgtcggcggtgaggacgaagcgttcgagaaccagtcgatggcctggcaggccgccaccgtctacttcgccgtgatcgagctcgtcgcggccgtcggcctctggctggcaacgccttggggcgcggtcgtgtggctgacgaccgtcgtgtcgatggcggtgatcgagttgatgttccccggcatctacggcggcagcctcgtcgtggtcggcgtcgaggtcttcatgcttgccgcctatctcgcgctcgcctggatggccgcgcgcgaacggccgccgtagccggtcacaacggcgcacgcccatcccggacgcgagcgcgcagttgttcgctcttggttgaccgttggttgcctaaaattcgcgataagttttcgttgaccagccgttccgccacagccgttacgcgcccgtttcgaaacggggcggggctgttctggaatgcgacaatcgccgcggacggagggtgaacaggaccttgcgaaggtcaacagaggctttcaaaaagtgcttgtggcacaggcttaatccgcaattcactgtcttaaattcatgatctctttattctcttatttaagccgatcttcaaacgcgccccttaagttgcacctatcaggcgggacacaagtttcgtcgaataagtgtcgataaaaacgacaacaggggaagtgtcatgatgaaagccgtcgcaactgcggcagataccgcagagcgcgtctccggccagcagggttcggtgcaggcgctctatctggaagctttgactctggtggagcggctgcatcgccggctcctcgacgtgatcaaggatgagttcgatcgccgcggccgtgcggacatcaattcggtgcaggctctcctgctctacaacatcggcgacaaggagctgactgcgggcgagctgcgcacgcgcggttactatctcgggtccaacgtctcctacaacctgaagaagctcgtcgaactcggcttcctcgatcatcagcgttcgcgcgttgatcgccgttcggtgcgcatccgcctgactccgcaaggtcaggaagtccgccgcatcgtcgatgcgctctaccagaagcacgtcaagacggtggagcaggtcggtggcatctccggcgacgagtttgcgaccctcaacaagtcgctgcaccgcctcgagcggttctggaccgaccagatcctctatcgcctctgagtttctaaatggatcagggccaagccggcccctgacaagaccggcagccctcccgaacgtgcctgacttccccaagcgcgccggcccggagttgctccggaccggtgcgccgttcgcgcgtttgcagaagcgccgcgcagcgcggtcgttttcctccgcccggctcgggtctcagcgcaagcgctcctcccagtggcgaaacagggcgacctcatcgtcggccacaacgaccgggtctgacaggccgccgaggcgcgcacgccgcggactgaatccgaattgcttgcgaaaggcccggctgaaatgcgcagcgctcggaaaaccgtattcgcgcgcaacgtcgccgattgcgaggccttcgccggcattgaggcgggcgtggatcgtctccagccgccgctttcgaacataggccgtgacgccgcctgcattggcgaaggcacgatagagattggatttcgaggttgccagagcccggctcatggccgcgatgtcgagccggtcggacgaaaggttctggtcgatataggcttccgcgcgctcgcgcagcgtggccaccgggctgcgggacgcgggctcgctgcctggcggccgtgcgcccagcaccgtcgccagcagcccgacaaaggccgccgacaggctggcggcgtcctggacggtcatctcctcgagttgttgcacgaacgacaacaggaagtcggcgacgaggcggccccatgcaccgtcgatgatgacgccgtgggtggagggatcatatcccgctcgctcgaaggcgcgtcgcgctatggtgcaggtgatgcaatccagcgccgtcccctcggtcaccagggtccggcgcgtatcgaaggcggccagctcgccttgtcgcatcgtgcgcggggagggctcgtcctcggtggtgaaggtcaccgctccggccttgacgaaaacgacctggatcatgtcgatgccatcggcccgcgccatctccgcggttcgcaccatcctgaccgggccgaaacgggaatgcgtcacgaccatgtcgccgagagtccaggcatccacgacggcctcgaaggggccgtcggccgggccggctcgggtgatctggtgcgtggcgatgcccgagcgccaaatgtcgaatctctcggtctcggggaaattgctggtgtcgaaatgcagcaccggaatgggggtggacatgatctttctgcgaagtcccaaacgctttcgaagctggttataaaacggcgcctcgcctgtgccgaagactattttgacttcccggaccaagagagttgaccgttgaactcaaaatcaatctggcgcgcttcgtagaccccgaatccattgtacgatgaggtgccggcaatttattgatcgcaagtgatttgacgctcaaggcccatgcaatgcccacttccgacttgtcgcgcgtagcttcccgtctgtcgtcgcgtgcgttcgggatccgtagcgcgctgccggccggcttcggatcgcgcggctggatatctccggttcgctgcctcgccatggtcgccgcagcttctgccgccatgacgctgctctcggcgccggctcaggcgacctgcacgcccgttgctgccaacgatgcctcggcgacctgcaccggggtcaccacggatcagaatggaacgaacggttacggctccggcgcgatcgacaatctcagcgtcaccgtcgtccagggggcgtccgtgaccgggacgagctacggcatcaggttcaacaccggaacggtcgtgaactcgggcacgatcactgggatcaacgaccgcggtatcttcggcgcgaccagcgcgaacgtgaccaatttcgggacgatcagcggctatctcggggtggatacgggtggaaacggcgtcgtgacgaattttggagccatctccggcaccacgagcgatggcgtccgcggcactaccatcaccgtcgtgaattccgggacgatcacggcggcctatgacggcgtctttgccatcggcacgagcacggtcgtcaattcgggcagcatcaccggaaactcgcacggcgtctatgcccttgccgatatcagcgtcgacaattccggctcgattgcctcggtgggcggcgccatctatgcgccgaacggcagcgcaaccgtggtcaattcaggcaccatcgcgatgaccgatacattcggcagcgtcatgtatgcgctgacgaacctgacgctgatcaattcggggatcgtcacttcgacgtcggtgggaccttcttccagcggcacgatcgacgtgacgaattcagggtccattctcaacaatggattcggcccggccatttccggcacggttgcgaaggtgacgaattccggcatcatcatcgccgttgatggcgcggcggtcagcgcctcgaacgtcaccgtcaccaattccgggttgatccgcggctattgggagggcattggttcccagtacgccacagtcaccaattctggcacgatcatcggtgagcattcggcaggcgtgcaggcctcgttcgatgtgatcgtcacgaattcgggcgcgatcacagggagcggcgcgggcattcgcaccttcaacggcagcatcaacacggtcaacttcgggacgatcacgggcaaagggccttccggcatcggcattttgtccgggacgacgggcaccgtggtcaattccggcacgatcatcggcgagggcgggacggcgatccagttcggcgcgacgacgccagcgcaatccgacagcctgaccgtgctgcccggcgcacgcttcggcggcgtggtcgatttcaccgggggcgccgacactgtcactttcggtctcggaagctggatcctgaacaccgccaattttgacaagacgctctcgaccgtgaccaccgccggcaatccttacgtcgtcacgtcgaaccagatcatcgtcgccgacctctccagcttcggcgcgcagaaccgcgcgatcatggacatcaccggatggatcggctcggtcctgcctgatgcgcccgtgttcgcgacgggtgcggccaccgccagtgcgtttgccgcacccgaaccggcggcgtcgccgttcgatgcattcgccagttttccctcgggcgccctgggatatgccccgacgcctgcgttcaagggggcaagcacaaattacggcgacgggaatgtggtctgggccaaggcctttggcggccagcgcctgcaggacaacagcggcgcgttgatcggtgggaccacgaccggctatggcggcgcggtcggctacgagcggctgatcagttccgacctcaggttagggatgctcgcgggcggcagcagcaacaagacgaatctgtatttcaacgccggaagcaccagcaccgacgccgtgttcggcggcgcctatggccgcaagacctggggcggcacattcctggatctctccgtgatcggcggaagcctcgacaattccagcgtgcgcaacatcggcggcggtctcgcctttgcgacggcaacggcgtcctatggcggctggttcgtcaatccggcgctgatgttcgggcgccgcctgggtgtagatgggcgcggcttcacggtcacgccggcggtgaaggtgcgctacgtggccgcgcattttggcggctatgccgagacgggcgcgggcgctgccaacttgagcgccgccggacgcgactttcaggcctgggaggagcgggccgagatcacgttcgccaacaccaggacgctggccaacggaaaccgggtcacgacccgagttgctgcgggggcgcttgcccagcagcgcagcgcgggtggtctgctcgatgtcgttttgctggggcagaacttcatcgtagcgacccccgagcgcagcagcgtggcaggcgggtacagcagcgcaggggtcgactggcaaatgggccgcctgaccttgtttgccgccggagaggccacctacaccaacgatgtgtcgcgcacctactcgggcaaggccggcgcgcgggtgagctggtagtcgatcggctcgcccgatccgggacaaggaaccgacgctttcgcactgcgaaaaaattggctcggggcggggaaccagatccttgcctcgtcgttgttccttccaaccggagggtgcgatgttggtcgagcgcgggctgcaggcgatgaacgtggaactcgtaagcgaggcctacgcgatcgctgcgaactaccttcgccggtccggggcgattcccgattctctcgtcaccgacgaacgcctgctcgggattgtcgtcaagctgatccagcacggcgaattcaacaagatcaggctcgccaacaaggcgatcacttggttcgagacgcagtccgaggcccgcgcggttgcctgatcaaaactcccagaacagcgacgaaccagagggtgccatggaagccgccatcgaccgcatcatgcagacctacgacctgctcgccaaccgcactgcggcggccagcgtggaggcgcgggccaaggtcacgaactacctcaacatcctgatggaggccggcgaaacggacacccacaggttgacagtgtgcggcctgacatacttgcgccagctcgacggcagtgtggacccggttaaggcgggttatacggggctgtaaagagaggccagccggcttagtgcctgccgaaaggcgaggcccaaacgcttgcacttccgtttcagacgagcggttccataggaccgctccgcagcgaaagtcctccaatcccaccatatcttgcataaatatcaggcccgacccgcaaatgcttggccgggggcgggcaatgtggtagatcgcgctcgccgcttccgatcgccacaccagacccgtccgttgcccgccaagaggctgcggcggtggagatattcgcaagatgaccgcacccaagaccgcctccgcgcccgattcgtttttctccgcctcgctggagcaggcggaccctgagatcgccgccgccatcaggggcgaactcggccgtcagcgccacgaggtcgaactgatcgcctccgagaacatcgtcagccgggccgtgctggaagcgcagggttcggtgatgaccaacaaatatgcggaaggttatccgggcgcgcgctattacggcggttgtgagtgggtcgacgtcgccgaaaaccttgcgattgatcgtgccaagaagctgttcggcgcgaacttcgccaacgtgcagccgaactccggcagccagatgaaccaggcggtgttcctggcgctgctgcagcccggcgacaccttcatgggtctcgatctcgcggccggcggtcatctcacccacggctcgcccgtcaacatgagcggcaagtggttcaaggccgcacactacaccgtgcgccgcgaggaccagatcatcgacatggatgcggtggccaagcaggccgagcaggtgaagccgaagctgatcatcgccggcggctcggcctattcgcgtgcctgggatttcaagcgcttccgcgagatcgcggacagcgtcggcgcgtatctgctggtcgacatggcgcatttcgccgggctcgtcgccggcggcgtccatgcttcgcccgtgccgtacgcgcacgtcaccaccaccacgacgcacaagtcgctgcgcggtccgcgcggcggcctcatgctgtggaatgacgaaaccctgaccaagaagctcaactctgccatcttcccgggcctgcagggcggcccactcatgcacgtgatcgccgccaaggcggtggctttcggcgaagccctccgaccggacttcaaggtctatgccaagaacgtcgtcgagaacgccaaagcattggccgagaccctgaagggccacggcctcgatatcgtctcgggcggcacagacaatcacctgatgctggtcgatttgcggccgaagggcctgaagggcaatgtctcggagaaggcgctggtccgcgcggccatcacctgcaacaagaacggcattccgttcgatccggaatctcccttcgtcacgtcgggcattcggctcggcacgccggccgcgaccagccgcgggttcggggtagccgaattccagcaggtcggcggcatgatcgccgaggtcctcaacgcgatcgcgcagtcttccgacggcaaggcgccgctggtggaagccgcgatcaaggagcgggtcaaggcgctcaccgaccgcttcccgatctaccagtagcgcagggtccaacggatgcgctgcccgaactgcaacagtctcgatacgcaggtgaaggactcgcgtccgaccgaggactcgtccgtgatccgcaggcggcgcgtgtgcgtcgcctgcaacttccgcttcaccaccttcgaacgcgtgcagctgcgcgagctcacggtgatcaagcgcaacggccgtcgcgtgccgttcgaccgcgacaagctgatgcgctcggttcagatctcgctgcgcaagcggcaggtcgagccggagcgggtggaaaagatggtctccaccatcgtacgcgaactcgagaccgggggcgaggccgagatctcgtcggaggtgatcggtgagaccgtgatggagcatctgcgcacgctcgatgacgtcgcctatgtgcggtttgcgtccgtctaccgcaattttcgcgaggccaaggatttcgccgacgtgctcggcgagctctccggcgaggaggaagcgcggctcgccgcgatccgcaaatgatcttccgcatcctggaagatcagttcgcgcagaaggcccgcgaggccaaggacgccgatcgcagattcatggagctggcactctcgctgggtaagcgcgggcagggacggacctggcccaatccggccgtgggcgccgtcattgtcaaggacggcgtcatcgtcggccgcggctggacgcagcccggaggacggccgcatggcgagcccgaggcgcttcggcgcgcgggcgagtcggcgcgcggcgccacgctctacgtcaccctggagccgtgctcgcatttcggcaagtcgccgccttgcgccgatgcggtgatcgcagcgggcatcaagcgggtggtggcggcgatcgaggatcccaatcccgaggtcgcaggccaggggcatgcgcgtctgcgcgccgccggcatcaatgtggatgtgggtctttgcgcggcggaggctgccttcgaccatgccggccatttccgtcgcatccgggacaagcgtccgcatgtgatcctcaagctcgcggtttcgcccgacggcaagatcggcgctgctggcggcaagccggtcgcgatcacgggcgaggcggcacgcgaccgcgtgcatctcctccgcgcgcagagcgatgcgatcctggtcggtatcggcaccgtgctggcggacgatccgctcctcaactgccgcctgccgggcatggcggcgcgctcaccggtgcgggtggtgctcgatcagagcctgcgcattccggcgtcgagccggctcgttcgtaccgcgcgcgaaacgccgctttgggtgatcggttcagaactcgccgaagctgcggccgcaacgcgcctcggcgcggcaggcgcgcagatcatgcgcatgccgtccggcagcgcatcgggacttggcctgccggccgtgctgaatgcgctggcggagaaaggcatcacccgtctgatggtcgagggcggcagccgcgttgcgtcgtcattcattgcggccgatctcgtcgacgagatctggctgttccgcggcgcggaagaggtaggccctggcggcgtggatgcgctcgatgcattgcccctgtcgaaaatcacgcagtcgcaggcctacaaggttcatgctagcgagacattcggcaaggatattctcaccatctatgagcgcgcgtaatgttcaccggcattgtcaccgatatcggcgagatcatccgcttcacgccaacggcgcaggggcagctgcatcgattgcgcattgcctgccgctatgaccggaccaccatcgcggacggcgcctcgatcgcctgtaacggcgtctgcctgacggtggttgcctccggcgttgccgacggcaggacgtggttcgacgtcgatgcggctgccgagacgctggcgctgaccacggcaaagcactggaaggtcggtacaaagctcaacctcgagcgcgcgctgaagatcggcgatgagctcggcgggcatatcgttgccggccacgcggacggcatcgcgaccatcgtgagccggcaggacctgcccgatatggcgcggttcgagctctcgaccacgcgcgagctggcgcggttcatcgccaccaagggctcgatcacgcttgatggcgtgtccctgacgatcaatacggttgcagacgtgacgttttcggtgctgatcatcccgcacacactgacggtcacgacgatcggcgcctggaaggcgggggacgaggtcaatatcgaggtcgacctgatggcccgttacgcggcgcggctgacggaaatgaagtgacgggcgcatgaagttcgtcatgcgcgggcttgacccgcgcatccatcctcttaagaggggcttgcccgatggattgccgggtcaggcccggcaatgacagaataggttgaccatggcagacgcgcggcgcgcacccctgaaggaccagaccgacatttccggcgcccgcgcgctgatcgtcgaggcgcggttctacgacgatctccaggatgcactgctggacggcgcggtggccgagctgaaggcggccggcctgacccatgacgtgatcacggttcccggtgcgcttgaaatcccggctgcaatcgccatcgcggtcgatgccgctgcagcgagcggcagggcctatgatgcagtgatcgcgctcggctgcgtgatccgcggcgacaccattcacttcgagatcgtctcgcaggaatcctcgcgggccctgatggatcttgccgtggcgcgaaaactgccgctcggcaacggcatcctcacggtcaataccgaggcgcaggcctgggcgcgggcgcgcgccagcgaactgaacaagggcggcgatgccgcgcgtgccgccctggcgatgctgcgcatcaaacgccgcctggcgcaggcctgaacatggccgacaacagcaagaagccggcaggcactcaggagaagaaggcgaaccggcgcggtgcggcgcggctcgccgccgtgcaggcgctgtaccagatggatatcgccggtgccggcatcaacgacatctttgccgagttcgagagccactggctcggcaacgaggtcgagggcgacacttacctcccggcggaagctgcgttcttccgcgacgtcgtttccggcgtcgtgcgcgaccagaagaagcttgatccgctgatcgacgaggcgctgtcgaagggctggcccttgaagcggatcgaagccatcctgcgcgccgtgctgcgtgcgggagcctatgaactccagaatcgcaaggacgtaccggcccgcgtcgtcgtgtccgaatatgtcgacgtcgccaatgccttcgtcgaccgcgaggagaccggcatggtgaacgccgtgctggaccagattggccgccagttccgcggtgacgagtttgggcgggggtaggtcagacattccgccgtcatcgcccggtcctggtgcgcatagcacaccggccgggcgatgacagcggaggacaagggctgacatcgatgaccactccacaaagtccctccgccgaggactccctcatcgcgcgctatttcaagccgatcgcgaccgaccccggcgcgctcgggctggtcgatgacgccgcagtcctgtcctcatcgggcgaggacatcgtcgtcaccaccgacgccgtcgtcgagggcgtgcattatctcgccgacgatccgcctgaaaccatcgcccgcaaggcgctacgggtgaacctgtccgatcttgccgccaaaggcgcgcggcctgcaggtttcgtcctgacgctggcgctgcgcagccaagaggatgcctggctccgtccctttgcggacgcgctgggcgaggacgcgaggaacttcgtctgtcctctgctcggcggcgacacggtatcgacgccgggcccgcagatgatctcgatcaccgccttcggccgcgtaccgcggggacggatggttggtcgcaccggtgccaggccgggagaccgcatcctggtgacgggaacgatcggcgacgccgcgctcggcctcgacgtgctcaagagcggcgccgctgccgcggtgctcacgtctgatgccgctgcaagggaagctctggtctcacgctatcgggtaccgcagccgcggaatttgctggcgcaggccgtgctcgatttcgcgaccgcagcgatggacgtctctgacggcctcgcgggcgatctcacgaaactctgcgcagcatccggagtctcggcttcggtggacgtggcaagcgtgccgctctcggctgcagcggtcggcctgctcgcccgcaacatcatttgcgtcgagacgctgcttgcggggggcgacgactacgaggtgctgtgcaccgttccgtcggcgcaaagcgatgcgttgatcgccgcagggcgggccgtcggggttgccgtgactgcgatcggcacgatcattgaggggcacgagcggccgcgcttcctggacgagcagggccaggaactgtccttggcgcgtctatcctacagccacttctaggaattgctccaaaccggcatcttggttctcggcgcttggtgctaaatacctgccgagatcggcgttttccgccttatacggcgttgcaccctcaatttgattttggcaaggttgcgaccgattggggccgccccttttgggcaaggggcggccttgttcgaaatcaaggcgccgcgtcgcacgacggacaacaaaaggcgccgggggtacatcaaggatctgaggcataaatcaaatgacagcattatggttgatagtgctctgcggagtgctttccgttgcctacgcggtttgggcgacgtcttcggtgttgagcgcggatgcggggtcgccgcgcatgcaggagatcgcaggagccgtgcgcgaaggcgcacaggcgtacctgcggcgccagtacaccacgatcggtctcgtcggcatcgtcatcttcgtgctgcttgcctatttcctcgggctctatgtcgcgattggcttcgccatcggcgcgatcctgtccggcgccgccggcttcatcggcatgaacgtctcggtccgcgccaatgtgcgcacggcccaggccgccacgacgtcgcttgccggcggcctcgagcttgcattcaaggcgggtgccatcaccgggcttctggtggcgggtctggcgctgctcggtgtgaccatctatttcgccttcctggtccattggctgaagcttgcgcccgacagccgtctcgtcgtcgacgcgctggtggccctcggcttcggcgcctcgctcatctcgatcttcgcccgtctcggcggcggcatcttcaccaagggtgctgacgtcggcggcgacctcgtcggcaaggtcgaagccggtattcccgaggatgatccgcgcaacccggccaccatcgccgacaacgtcggcgacaacgttggcgactgcgccggcatggccgccgacctgttcgagacctatgcggtgaccgcggtcgccaccatggtgctcgcggcgatcttcttcgccaagaccccgatcctcgccagcatgatgacgctgccgctcgcgatcggcggcatctgcatcatcacctcgatcatcggcactttcttcgtcaagctcgggccgagccagtcgatcatgggggcgctctacaaggggctgatcgcaaccggcatcctgtcgctgatcggtatcgcgctggtgatctattatctgatcggcttcggcaagctcgagggcgtcgattacaccggcatggcgctgttcgaatgcggcgtcgtcggcctcatcgtcaccgcgctgatcatctggatcaccgaatactacacgggtacggactatcgtccggtgaagtcgatcgcccaggcctcggtgaccggccacggcaccaacgtgatccagggcctcgccatctcgatggaagcgaccgcgctgcctgcgatcgtcatcatcgccggcatcctggtgacctacagcctcgccgggctgttcggcatcgcgatcgcgaccgccaccatgctggcgctggccggcatgatcgtcgccctcgacgccttcggtcccgtcaccgacaacgccggcggcattgccgagatggcgggactgcccaaggaggtgcgcaaatcgaccgacgcactcgatgcggtcggcaacaccaccaaggccgtgaccaagggttacgcgatcggatccgccggcctcggtgctctcgtgctgttcgcggcctacaacgaggacctcaagtacttcgttgccggctccgcgcagcatccgtacttcgccggcgtcaatccggacttctcgctcaacaacccctacgtcgtggtgggcctgctgttcggcggcctcttgccgtatctgttcggcgcaatgggtatgacggccgtgggccgcgcagccagcgcgatcgtcgaggaggttcggcgtcagttccgcgaaaagccgggcatcatgcagggcaccgacaagcctgactacggcaaggcggtcgacctgctcaccaaggcggcgatcaaggagatgatcatcccctcgctgcttccggtgttgtcgccgatcgtcgtctatttcgtgatctacgcgatcgcgggcggcggcgcggccggcaagtcggcggcgttctcggcggtgggcgcgatgctgctcggcgtgatcgtcacgggcctgttcgtcgcgatctcgatgacctcgggcggcggcgcctgggacaacgccaagaagtacatcgaggatggccatttcggcggcaagggctctgatgcgcacaagtcggccgtcacgggcgacaccgtcggcgatccctacaaggacactgcgggccccgcggtgaatccgatgatcaagatcaccaacatcgtggccttgctgctgttggcgatcctggcgcactgagcagggtcgaagaaaagagaaaaccccgcggcgcgagccgcggggtttttgtttgtcgggttgtatgctcccacctcgtcattgcgaggagctctgcgacgatgcaatccagtgtctttccgtggaggcagtctggattgcttcgctgcgctcgcaatgacgaaggatgcggtagcgttccgttgaacgctactgcacgtccatctgcagcccttccttctggatgatgccggcgaacttcttcgtctcggcgtccaagaaggcggcgaattgctgcggcgtgccgtaatcggcgcgggcgcccatggcggcgatctgcttcttgacgtcgtcgcgttccagcatcgccttgacctggagattgagcgcgttgagcacttcgggcgaaacgcccttcggcaggaacaccgagaaccacgacgagacgtcgaagttcgccagctcgggcgcgctctcgcgcatggtcggcaggtctttcgcaagctcgctgcgctcgggcgtcgtgacgcagagaccgttcagcgtgccattctgcacctgcggcaggctcggatacagattgtcgaacaggatctgaatgtcgccggcgagggctgcctggagcgccggtccggcaccgcggaacgggatgtgcgtcatcttcagcccggtgagctgcaggaaccaggcgccggtgaggtgagggctctggccgacgcctgatgaggcgtagctgagcttgtccggattggccttcaagtaggcaatcagctccgggatcgacttgatgccggtcttgggatgtgccgagacgatattcgggatccggatcatgttcgagaccggctggagctggtccggcttgtagctgaggttcttgaagatactgtaggcaatcgcgttcggaccggggttgccgatcaggatggtgtgaccgtcgggcttggcgcgcacggcctcggccgtgccgatcgtgccgccaccaccggagcggttttccacgaccgcggactggccccaagccgtctgcagatgcgcggccagaagccgacccatcacgtcggtcgagccgccggccgccgccggcacgatgagacgcacgttttcggtaggcttccagtcggcaaggctcgatcgcggcagtatcgctgcggctgcaaggcctgcagcaccggtgagcacgcgacggcgggacaacaaagtgttctgacgtttcttgggcacgaatccactccctgcttcttgctgccgggaccgtagggaacagcacgtgcgaccgcaagtcgcgcgcgagcgcaagcgctgcgcggagagcggcaggacgccgcaggcctgcgttatttaccttgcggtggaattaggccggctgttgagcctcttttcggacgcgcacccttttgcgaagcgctagtcgcttcgcccgcaagcctcgaccgactcagttgaagctgagcagcttgaacagcggcgtaaggtagctcatctcctggcccgacgtgggcgtggtgcggctgatgaagtcaaagatcttgccgtcctggagaccgtagttcgcaagccggcgcacgcgccggttcttgtcgaaatagatcgcgatgacgcgttggtcgacgaccttctggttcatgaaggcaacagggcgctccgaccgctgcgagatgtagtaaaaaacttcgccgtcaagggtcgcgacggtggagggagtgcccatcacgatcagcacctgatcctggctcgcgccgatcgggatctgctcgagcgcgccgggcggcaggatgtaacccttctggaattgctcaccggtgcagccggcaagcgcgacgccaacgagagccgcagccgcgaatatgcgcaggccgcgcgagcatgcatggaggccgtgccgcttgttcgcgcgcaggctggtctggttcattgtcgtcatagcggaactgattccgtccccttgcgtcgcgcgaggcgctgaagtaccgggcggaggctctgaatgcaacacgcgcgcgcccgcttgcggaaaccacaatgctttggccgttcaatcacttcaggaaaccccggctaaccccgccgggcaccattgaagccatctatggcatgatcgtgacgcaggcgcgagaacccatattttaccgggacttgggcgtgcccgatacggttaacgggcgtttcgacctgttgctgctgcatctgtggttgctgctgcgtcgcctgcgcacagcccagggcggcaccgagctgtctcaggcgctattcgaccgcttctgtgaggacatggacgacaacctgcgcgagatgggggtgggcgaccagactgtgccgaagcggatgcgggcctttggcgaggccttctacggccgcgtccaagcctacgatacagccatggaaagcggcggcgaggcgctggcatcggcgatctgcaagaatatcttgaatgggaccggcatggatcgggcgcacaggctctcggcctatgcccaagccacggaagccgatctcggccggaccgacgaggccgcgctgctgcgcgcaagcttcaaattccctccggcgcttccagaggatgtcacgccatgagccgaccgaatgccggatccccgcccgatccctggcgatcgcccgtcatcgttgcgcagatccctgacgggggcctgcatcgtgagcttgtggcatcagctgccgagcggcaggccatggccgagctcgcgggcctccgcgagatactgtcggcccatgccagtttcgatgtggtgccgaaaagcggtgggcgggtccaggtcacggggctggtccgcggccgaatcggccagacctgcgtcgtctcgctggagccgatcgagagcgagatcgaggaggaggtcgacctgatgttcgcccctgaggcggaggcgcgccgcttggccgacctaatcgaggaggggcaggacgaccggcaggcgccggaggtcgccgatcctcccgagccgattacgggcggcatcatcgacctcggccgactcgccaccgacgccctgttcctgacgatcgatccctatccgcgcaaggaaggggccgtgttcgaggcggaggtcagcgcccccgatccggaggaccatcccttcgcggcgctgaaggcgctccaggacaagaagaagggcaaatagccaagcatttccgcgccgggcggcttggggtggagcatgagccgtttgccgcgatggtttgaaggacggcactatccgattgattgtgatgggtttctcgcccgttcatgcgcccgctcccggatcggcccaaaaggctgggggcaagaggttgtttcgggggtacaaaacgctattgtcgcggcccggtccgggtgcggcgtggcgcttggccgatcgccaactccgtggcgaccccatttcgcggccccgctagctccagaccgcaccagaccaggtttccaggacttacatgccaagcaaggttcgcatcgcgctggacgccatggggggcgatgtcggccctgccgtggtcgttcccggcgccgccatctcgcttggcaggcatcccgatatcgagttcctgctggtcggaaaccgcgccaagatcgagcccgagctcgacaggcacccgaagctgaaagccgcctccaaggttatccataccgacgtcgccatcagcatggaggacaagccgagccaggcgttgcggcgcggccgcaagacctcctcgatgtggctcgcgatcgatgcggtcaagaagggcgaggcggatgtcgcgatttccgccggcaataccggcgcgctgatggcgatggcccgcttccacctgcggacgctgccgggcatcgaccggccggccatctccgcgatctggccgaccaagcgcggggcgtccgtcgtgctcgacctcggcgccacgctcggcggcgatgcccaccacctggtgtcgatggcggtgatgggggcggccaaggcgagcgtgctgttcaacaagaagcggcccacggtcggtctgctcaatatcggcgccgaggaaatcaaggggcacgaggagatccgcgaagccagcgaaatcctgcgcgcgaggaacctgccggagctcgactatatcggcttcgtcgagggcgacggcatcggcaagggcctcgccgacgtcatcgtcaccgagggcttcagcggtaacatcgcgctcaaggccgccgagggaaccgcgcggcagatggcggaattgctccgtaatgagatgcagcggagctggctatccaagctcggctatctcttcgcccgcagcgccttccaagccctgcgcgacaagatggaccccaacaagtccaatggcggcgtgctgctgggactgaggggggtggtggtcaagagccacggcggaaccaacgccgaaggctttgcctatgcgatcgatgttggctatgagatggctcactacgatctcctgaacaagatcaatcagatgctcaaccgcgagggcggtgcactcagttcggtgcaggccgcgcaggaggctgtttcgtgactcaaattcgttcggtcgtgctcggctgcggctcctatctgccggagcaggtggtgaccaacgcccaattggcggcgcgcatcgacacctccgacgagtggatcgtgcaacgcaccggcattcgcgagcggcacatcgcggccgagggcgagttcacctcgcatctggcgctcaaggcggcgcaggccgcgctcagcgatgccggccttgacgcgcagtcgatcgagctgatcgtgctggcgacctcgacgcccgacaacacgttccctgcaacggcggtcgccgtgcagcacggcctcggcatcaatcacggcgcggccttcgacctacaggccgtgtgctcgggcttcgtgtttgcgctcgccaccgccgacaacttcctccgcaccggcgcctacaagcgcgcgctggtgatcggcgccgagacgttctcgcgcatcctcgactggaatgatcgtggcacctgcgtcctgttcggcgacggcgccggagccgtggtgctggaggcgcaggagcagccgggcgatcccgcgaccgaccgcggcgtcgtcaccacgcacttgcgctccgacggccgccacaagtcaaagctgttcgtcgatggcgggccgtcctcgacccagaccgtcggtcatctgcgcatggagggccgcgaggtcttcaagcatgcggtcggcatgatcaccgatgtgatcgtcgacgccttcgaggcgaccgggctgaatgccgacagcatcgactggttcgtgccgcaccaggccaacaagcgaatcatcgacgcctccgcgcacaagctgcacatcgcaccggagaaggtggtgctgaccgtggaccgccacggcaacacgtcggcggcctcgatcccgctggcgctatcggtggcgcgcaaggacgggcgcatcaagaagggcgacatggttctgctggaggccatgggcggcggcttcacctggggctccgccctcgtgcgctggtagcaacagtcgataaaattttgccggatttggccgcgattatcgatgcgtctgcattgatgagcgctgttgaccgtcgtatcgtaacctcataatttcagacaacaattgttcgccgtgatgtggggcagggcgatgaccgagaccagcaaaaccgtaacgcgagttgatctgtgcgaagccgtctaccagaaggtgggcctttcgcgcacggaatcgtccgccttcgtggaactcgtgctgaaggagatcaccgactgcctggagaagggcgagacggtgaaactgtcctcgttcggctccttcatggtgcgcaagaagggccagcggatcggccgcaacccgaagaccggcaccgaggtgccgatctcgccgcgccgtgtcatggtgttcaagccgtcggcgattctgaaacagcggatcaacaaccagcaccgcaccaacggcgacgccagcaaggctaaagaagaggcgtaaccccctttcggaaaggactggcctttggacaaggcgccggatgcgttccgaaccatcagcgaggtagcgcaggaactcgacattccgcagcatgtgctgcggttctgggagacccgcttctcgcagatcaagccgatgaagcgcagcggcgggcgccgctattaccgtcccgacgacgtcgacctgctcaagggcatccgccggctgctctacggcgagggctacaccattcgcggcgtgcagcggatcctgaaggagcacggcgtcaaatcggtgcagggcctcgccgacagcgccgccgcggtctcgttcggcgccatcgaggatgccattggcgcgagcctgatggagcccgacgacgaggcgccgatcaaggggattaccgacaccgacgatgacgatttccagggggacgaagaagaaggcatcgacttccgcttctcggagatcgacgacgaggagatcctcaccaccttccgcaagggcggcgccaccgctgcggccgccggccccagcgcgctggaccgggagcggctgggccgcgcgctcgccgatctcgtcgcctgccgcgagatgctggatcaggcgctgaaggacgggtagggcgcttttcgccggcttttgcgggcaagttccggaagcttcgggaaggcaacaccaaaatggcatcgctcgccttgcgcaaagcggcgatcctagctaatggaacggcattcggagcgtggcgcagcccggttagcgcactagtctgggagactaggggtcggaggttcaaatcctctcgctccgaccatttttctcaaagcatctgtcgggtggatggacgatcggcgtggggcgtgctcccgcccgagccggatgcgtgcgcgatcagcagcgccagcgcttcggcggtcagccaccaaaccgaaacaaaccccatgcaccgtagatatgtcattcgtcggatgatgttttccgaatcgtcgcaactggtcgcgcagaacgggagcattgtcagggtgcgcctcaccgaatgacggttgatcccgacgccttcccatcgctgtcggcttaacgtccggggctggctggtcatgttgtcgtatcacggcaatgtcctgtcatacggatcatgcaagcttgtcgacacgcaattcgtgaggtgcgtcggcagtccggcgtgcgcaatttgaattgtacgacactcgcgggctctgcattgccggttggcgtgccggtcgagctgaatctaatgtgtgaccagccgcacgattacgcggtgatgccgtcgccggacggacggcgcgcgcgggtgattgcaagcggtagcggcatgggagagatgcgtgagcgttgtcacggagcgcgtcgtctcttcacgactgacgctgtgtggctcggaggcggcctccggggcgtttcctcttctccgtcgttgacggatcggtagttttgcgggccgtcaggcgtggcccttgatctcgtagtgacccggcacgcatttgtagcgctcgagacgccagttggcgcgatagatcggatgctcgcccatccatttcgcgagcggggcctgtgctccgaccgcacactgcatcatcgaaatctcgggcgtcatgttgctgtcggtcacgatttcctcgacgcaactgcctgaactggctgcaccgagccggcagagtacggcaacgacggtcacgaacattcttgtcacctcatcggttgtttctgaccacgacgaggatgcaagcggagtgccagagcgcgtgacacgcaaataagcaaataacacgctggcctggcccactcgccccggcgtccggagtccatttgacgattcggatcgtaaatatttgccaataaaccgaagccggagaactacggaacgtgccgcgggcgtggttgcctcgcatgcgcggaccgcgtggtgattgccagagcggtcgataatccgctgcccgaaataacaggcgccgaatggtcttcgatccgcttttacctgcggatgcggcgctgctacatttgcgatggcgccacagcgcgggcagcccgaaagaaacacaccgacaacgggagggaccgaagtcccatgaaggattttgctggaaagatcgcggtcatcaccggcggcggcacgggaatggggcgcgagctcgcgcgtcagctcgtggccgaaggctgcaacgtcgcgatgtgcgacgtctcggaggctgcgatggccgagaccaaacggctctgtgaggccgagaagctgccgcagggcctgcgcgtcacgacgcatgtcgccgatgtcgcgatagaggaccacctgaagcgttttcgcgacgaactcgccgagcagcagcagacggacagggttcatctgctgttcaacaatgccggcatcggtggcggcggcagccttttcaccaatacgcgcgagcagtgggagcgaaccttcaacatctgctggggcggcgtctatctcggcgtgcgcacctttctgccgatgctggtcgccgcggacgaggcccacatcgtcaacaccgcgagcgtcaacggcttctgggcttcgatcggcatgaaccaggcgcacaccgcctatagctcggccaagttcgcggtaaagggattcaccgaagcgctgatcaacgaccttcgcctgcacgcgccccacgtcaagtgctcggtggtgatgcccggtcacatcggcacctcgatcgtctcgaactcgcgcaaggtgcagagcgccgacggctcggagcggcttaatgccgacgaggtggcgttgactcgcaaacgcatggtcgcggccggcgtgccggatgccgacaagatgtcggacgaggacatccaggcggtattcgccgagcgcgcccgcagcttcctggaggatgcgccgacgacggccgcggaggccgcgaagatcattctcgatggggtcaaggccgagcgctggcgcattctcgtcggcgaggacgccaagcgcctcgacgagcgcgtgcgcgccacgccggagcaggcctacgaccgcgccttctatgaaagctttactcaggaggtcggctggcggcttggttgagaccgccttcgggcgagcgcgaatatgggtatgatgagcgtcatggcaagagatgcgaccgcaattttgcgtgccacctcctgccaatgttctttcgccgatgttcgcccactctatgacccatcggtatgtcacgcatgcgacatgccgtgttcaagcgatggtgatctgaaacgccgctcatcgggcgcacggccgcttggtcggctaactgaaatggtttagtccatcagggtagcgcgatgatagagcgtagctcccgacgatgcccgcatgcctctccgacgactggaccttctgcccggaacgagaggacgtttccgctgagttcacgcggctgctcacggcggcccaggagggcggcgccacgatcgcagagtgcctgatgatcgcccggcagctgaagcgcggcgacgaccggtcctggcaccgcgaatggaagaagctggcgcaaaccaaccggcagcgtgccgagacggcgtttgcggagggccatctggcgagcgcgcagcgcaactggctgcgcgcgatgaactactatggtgccgcggcgatgccgctcgaccccgcggatgagcgccgctgggttgctgtgctggcgatgcaggaatgcgctcgccgttatctcgccgcgcgcagcccggccggcgaagtggtgaccataccctggctcgaggggcattcgttgcagggctacttccttcctgcgccctcggcagacgggtcggctccgaccgtcatctgcatcggcgagcccggccaccgcaaggaagagtttctgttcaagctcgtgccgcatgcccgcgagcgcggcttctcgatgctggcgctcgatctcttcggcgaccagcgcgacgactatctcgatgcgctgttgcagcgccgggatctcgagagcgcgatccccggggtcatggactatctggagacgcgtgctgacgtcgacttcgcgcgcatcgggatcatcgccgatggctggggctcatccttcgtggcacgcgcggtgttgcaggagccgcggctggccgccgccgtctgcgacggcggcctgtgggacctgcacgagcgggccttttttgccagtcgcttcgcggtgagcgacgtcagcatcgtcccggtgccccatgcgccgctgatggcttccagcgccgactgcccggtgctgatcaccccgagcgaggacggttggttgaaggctgatcgggcgcgtcagatcgtccagagcgcccggctcggaagtgcggacgtcatgctgaaggtgttcactgcggccgagaccggcgcggcgcaggcccatgcggacaatccgagcctggccaacgaatacatcttcgactggctcgaatcgcggctcggcgccgccaggcgcatctagcggcccgcgtcagaagcgcaggggtcaaaagtccaggctcaggcggacgcaggccttttcgagacgggtcttcagcgtcgcgagcttggccgtgaattcggtaagctcggcctcgtcgaattcctggaagacgaattcccggatggtcttgtactgctcgtggaggctcgccaggtgcttctgcgtcttctctgtcagggacagcctgaccaccctggcgtcggtcggcgacgggcgacggcgcagcaggcccttcttttcgagcagcttggactgggtggtcacgaaagacgggtcgacgtggaggagcttggagacgacgttgaccgggatgccctcgtccttgtcgaggtcggagatggccatcaggattagccattgcggcccgctgatgccgagcgttcgggcccagaactgacgcagctcctcaagatacatgttgatcgaagatatttcccaagtgaagcgcctgatgatgtccagattgccgatggtgcgcaggcgcgctccttcttttctcgtcgcggacacagcggcgctcccgtgatctggcttcttgccgtcttgagacaatagttcacgcaactctgccctgatgcaagtgcagagccgacaaattgttacaaaactgccaaatatgatgcactcaggcgacgaggtcaggctcgttgttgccgccgtaccacagccatccgtaaatcagaaacatgattttataaactattttgattagcaaatgcgcgcatgcatagtgcgcgccgacggtgggggattctcgaccgttccgttgcaggtggatcgctcaagtccctcgcgttcaagcgggtgtcggaaggcgcgaagcggctgagcgggttttgagaggcggggtttggggggctgacggcccgcctcgccgtgaatgacaacttggaggtttgatatgaaattggtgaagagccttttgctcggctcagcggcgggnnnnnnnnnngcccgtcaaggcgaaggcggtcgagtacgtcaagatctgctcgctgtacggtgccggcttctactacatcccgggcaccgacacctgcgtcaagctgggcggttacctgcgcgctgaagtcgcgctcaactccggcggccactacaacggtcagttcagcggcgtggcgggcgcacacaaccgtctgaccaactactactccatgcggtctcgcgcggacctcaacatcgacacgcgcaccgcgaccgagtacggcgtcgtccgtacttatttcgatgcggtgttcacctggacctcgggcagctacagcggtaccggcactggattgaccggcggctcgaccgcctatgattcggctccgtccggaacgagcggttcgggctccgtcgccggcggcgcactcggcgtctactacgccttcatccagttcgcaggctttacgatgggtaaggcggtgtcgcagttcgatgcgccgtggacgaactatccgggcaacaacttcgaccagctggtcggcggcggtggcaccgttaccggcgtgaaccagttcacttacactgcggactttggccagggcatcacggcctcgatttcggcacaggatcagaccgcctactaccagaccaacatctggaacacttcgggagcgacggctgccggaatcctcggtggcgcgtacggtctcaatgacatcggcggttcgcgttcacctgatatcgtcggtatggtgcgcgtcgatcaggcttggggtctgttccaggcttcggtggcggcccacaacaaccacgccggatattatggcggcaacgaaacgaccggcgggccgtccgacaaatgggggggggccgctgcactggctctgtcgatcaagaacatcccgaccggcgcaggtgacgtggtcaacatccagggcgtctacaccgagggtgccagccgctacaacttccagagccttgcggcgaccagctactcgatgttcagcggcagcggcaacggcgcttaccagagcgtcggtttcgctggcgtttcagatgcagtcttcggagccggcaccggccttgaactcacgaagacgtacggtatgcgcggcgcattcacgcacaactggaatccgtactggaacacggcgctttacggtgcgtacggtgccgtccgttacggcagcaccgccaaggggctgatctgtggcagtgcaggcatggcggctttggctctgaccggtacctgcaatccggactttgacattgcccaggttggcgtgatcacccgctggactccggtcaagaacctgactttctcgggcgacttcaactggagccggatcgaccagaagtactcgggcacggtcgcctacggcgggaacgcagccactgccaagccggcggctgtctacgagctgaaggatcaggacagcttcacgctgctgctccgcgctcagcgcaactggtaagagcctaagatgcgaccaggccccggcggaaaaccgccggggcttttcgcgaagcgcgggcgctggggaaacgttggcctgtgcagacgacgaagacgagccatgcgctttgatcgtcttcgaattatttacttacctgagttactaagctatatagctctcagccaaatacgaaagttgcggctcttagcttcacgctaagcctccaaaacctccggtgatgccccgccggaggttttttcgtttggtgtggtgcttcagccgcgcatcatcatgcgggcgcgcgcatgcggccggtaggcgaggcggctatgacccgcgcagtagggctggccgtcgggagcgctgttgccgcagaagcagaaatcgtcttcgcccggcgtcgagatcggccatcggcagcggttctcggacaactccagcagcgagcagcgattggcctcgtcgatcggacctgcaaccgcggctgcgtcggtctcgccatagatcgtcgcgagcatctcatattgcagccgcgggaccgcccgcggtgcacgctgcggcccgaagcctctgtcctggaccttgcggtcgtcggccgtccggccgcgtgtcagattcagccgggacagcttcccgattacggcgttgcggctgaccccgatgtcggcggcgatctcgcggcaggagaggccggcctcgaagtgccgtttcagaagctcgattcgttcgtcggtccaggtcggtgagagagcaggcatgtgtaacggtcccaggttggagatatcggccatccgcctgattgagatccgtccgcctcacgtccggcgcgcgcttacgtcctgccattgtcgcggatcgacaaaagcccgtccttgatggcgagacggatgccttcctcgatcaatgtccgtgcgacgccgggaacgctggtgccgtgggtgccctgtctcaccagcttctccaggtaggcgatggtcgagagcgccaaggtcacgggaatgcggtcagtctcggctttttcggtggccatggcccgaacgctagcctcttactcgggtacataaaagtaacgattaagactctatttaggttcgggggtggaagtcaaatccaggccgggttggttcattagcgcattggaatcgcacgaaaaatcgggcacgacgcaacgcgtcgcgcggggcggcaggcgcgggtcggtgtcggcaggtcagggaagggccaggcggctcagccgtgcacgatcgccttttcgatcatgcagtggatacccttggcgccgttgacggtctgggtcaccctgagatcggcggccaggctgcacagcatgtaggcatcctcgcgcgacagattccgcctctcgccgagcagcgcgatcatgtcacgcagcgcgcgcaccacgcactggtcgagatcgggatccatcgccatggtcatgtagtgcgtcgctgtctcggcgcggggatagtcgagcttcaggtccttgcggagcgtcaggcggaagcggccctgcagcgcggtctcgatcgcagtaacgcagacttcgccgtcgccctgcacgccatgaccgtcgccgcaggaaaacatcgcgcctggcacaaagaccggcaggtacagcgtcgcacccgcacccagctccttgttgtcgagattgccgcccatcgcacgcgggatcagcgaggagatgcggccccaggctggcggcggcgaaacgcccattacgccgaagaacggcttgagcggcaggtccagcccccacggcatgcggccgaccatccgcgtccggtcgagcgggatgttgaggatgcgcgtctcgtggaaatcgtcgggcagggtgccggccagcggcttgatcatgttccagccccagtcctgccggatctggacctcgaggatctcgaccgcgagcacgtcgccgggctcggcaccctcgaccgcgatcgggccggtgaggatgtgaccgggcagcatccgctcgttcttcgcatgaacctcgtgcatctcgggtggaatgtgaaacttgctctggtcgggcagcatgtccggaccgccgctgatggtgtcgaccgtcacctcgtcgccgctcttgacggtgaggacgggcctgagcgcagcttcgaagaagccccaatggcaggtttcggggctcgaatgcaggtgatgatgggtcatttgccgcgtccggttggtttcatcggccgcgggcttgacccggcgatcgatcctctttcaagaagatttctgaagatggcagggccggtcaagcccgcaccggcaggccgtgtgaattaggccaggtgatttgagcgaggctccactgtttttcgtcctttccaagaccttgggcaccgcgctgctaccgatcaacctgctggtcgagcttggcatcctgtccgtcgtgctgatggcgacgcgctttgccacgctcggccgccggcttgccgtgaccacgctggtgctgttggcgctcgctgcgttctcgccgctcggcaatctcctgatctacccgctggagtcacgctttccgtcgtgggacccgtcgcgaggcgcgcccgacggcatcatcgtgctcggcggctcggtcgacaccgacctctcggcggcgcaccgcacgccggtcgtcgcgcacgcggccgatcgcctgtttgcgccggccgagctcgcccgccgctatcccaacgcacgaatcgtcttcaccgggggcacagcgaacctggtttcgaccgaggcgagggaggccgactattccgcgcccatccttgagaatctcggcatcgcgaaggaacgcctgatcctcgagcgcgactcccgcaacacctgggagaatgcgatcttcaccaggaaactggtatcgccaatgccgggcgagcgctggcttctggtgacgtcggccttccacatgccgcgctcgatggggatcttccgcaaggccggctttgacgtcgaggcgtatccggtggactggcggatggggggacgcgacgacctgctctcgttcacaaacatgggcacggacggtcttcgtcgaaccgatgtcgccgtccgcgagtggatcggcctcgtggcttaccgtttgatgggaaggaccggcgagttgcttccgggaccgggcaaggactagaacgaagccgtcaagacaagaacacacggcgcgcggtcgccggccgggaggaagccatgcaacagcagagcgcagacagcatcgatcttgccggcctcgtcgccgatctcaacagcctgctgcggctgaagacgaacgtgatcgggatgaagctgtttgcaacggtcgcagagatggaggcgatcccgaagatccgccgcccgagcgcaattcacaccaccgaccagatcgtgagcatggccgcgcgcctgggatggaccgtcggcatcaccgcagacgatctcgtcggcgcacagtgccgcgcagtcattggccttgcgccgcaggacgagaagtggctcgccggcgaaaattatgtcggggtctggcacggcacggccgaggacgcgcgcaggcgccaggaggcactggatgtggttccgttcgggcaatatcaggcgctcgccgtcagtccgctggcgggcggccggctggatccgccggacatctgtctcgtctacgcgacgcccgggcagatgatcatcctgatcaacgggctgcaatataccggctacaagaagttcgaatggggcgtggtgggcgagaccgcttgcgccgattcctgggggcgggcgctcaagaccggggagcccagcctgtccttgccatgctatgccgaacggcgctatggcggcgtgccggatgaggagatgctgatggccttgaagccgtcgcatctcgccaaggcgatcgaaggcatgaaggcgctggccaagaacggcctgcgctatccgatcccgccctatggcattcaaagcgacgtccgcgccggcatgggcgtgagttacgcgaagaagtaaaggccgattatgagctctgcgaaattcgacatcgtcgtctatggcgcgaccggcttcaccggccagctcgtcgcggaatatctggcgacgcattacaaggacgacaaggcgctcaaatgggcgatggcgggccgcagcctcgacaagctgaagtcggtacgtgacgccatcggcgcgcctgccgatacgccgctgctcgtggccgacgcatctgacgctacatcgctcaaggcaatggtggcgcagaccaggtcggtgatcacgacggtcgggccgtaccaattctacggcgaggatctgctcgcggcctgtgtcgctgcgggtgtggattatttcgatctctgcggcgagccggtctggatgcggcagatgatcgacaagtacgaggcggcggccaaggcgagcggcgcgcgcatcgtattctcatgcggctacgattccgtgccgttcgagctcggcacgttcttcgtgcaggaggaggccaagcgcgtgttcggcgcgccggccgcgcgcgtgaagggccgcgtgcgggacatgcgcggcacgctgtccggcggcaccgcggcgagcgcgaaggcgaccttcgatgcggtcgccaaggatctcagcctcgtcgccatcctcaacgatcatttcgcgctgacgccgggattcaccggcccgaagcagcccaagggcaacagggcagcttacgaggaggatctgcaatcctgggccgcaccgttcatgatggcgttgatcaacacccgcaacgtccaccgctccaacatgctgatgggctttccctacggcaaggacttcgtctacgacgagatggtcctgaccggtccgggcgaaaaaggcgaggctaacgccaagcgcgtgatggcggccaatgccgagaagaccggcccgaatgcgcccaagcccggcgaggggccgtcgaaggaagagcgcgagaacggcctgttcgatctgctttacctcgcgatcgcgcccgacggccgccaggtgcgcgcgggcgtcaccggcgaccgcgatcccgggtacggctcaacctccaagatgatctccgaatgcgcgatctgcctcctgcgtgactcaaccgacgttccgggcggcttctggacgccgggagcggcaatgcagcacaagctgatcaaacggctgcaggaccatgcagggctgacgttcaaggtggagaaataggacaggcgtcttcgacggccctgatcttgtaggcctgcgcggcggcgatcatgccccacatcgcgcccagcatcatccagaagtgccgccagtggtccgtgtcgatcacgaagttttcgccgaccgtgccgaggaaggcggcaaacaccgcgagataggcgcgctgccacggcacacggacgaagatgtgcctgaagcccatgatgacggtggtgaagaccagcgcgggatagcacacgccggagagccagccgccggacatgaaggcgttgaggtaggagttgtgggtgtcctcggggaagaagcggtggaattgcagcgggccgatgccgaacggcaggtcgagcgccatctccgcccccaggatgtgccggccgaaccggccgaagcggccctcatcgtagctctggtcgaagctcgcgcgctgcttgaacatttcggcggtggcgtcgaacgacagcagcaccgcaatcaacgccagccccagcacggccgcgacgatcgccatgatgatgatgcgcgagcgctgcgcattggtgcggctggtcagcaccatcaatgccagcatgaagccggaggtcagcaccaagccgccccaggcggcgcgggagaaggcgagcaggatcgcaagcgacatgatgccgaaggcgatgacgttgcggaacgccttgccgaacttgtctgagaccacgctctggagcgcaaacagcgccggcaggatcaggaaggcgccgagcacgttcgggtccttgaacgtgccacgcgcgcgtccgtagagcgtgaggagatcattgccgccggggatcaggtggaagtagcccgcgatcgccaacagcgaggcgaccaaagcgccgaccacgaggccgcggcggagcatgtccagccgcgccgtcgtgtcttccgagatgaccatcgcgaagaacagcacggtcaccgccatgtaccacgaggtcgcgatccaggtcaccaccgcgggcttatcgaatagcgggatcgcgctgatcgtgtagccgacattgagtagaaccagcatcagcaccagcggcatcagaacgagcttcagccgcaggccggtggcgaagaagacgaccgccgccagcagcgttgcgatctcgtagggactcggctcgatgaaaacgatcgcgccggaggcgcccaccagccacaccatcgcgcgctggagagccagcacgccgggcgcagcgcggactgctgtattcatctcgccggctgtcgccgcatacgccatcacacgcccatacgcctacgcaaaactggtacaccacaagcactgctgtcgtcgccggcctgaccgggcgattccagtactccgcggctcgctttggaggaaacggctggcgatgcggcgtactggatgccccgcccagtgcgcatctgcgcacaaggcggggcatgacggaaactcaatacgcgttctcgttcttggtcagcagcgagatcggcgttttcaggagaatgtacaggtcgaacagcaccgaccagttctcgatgtaatataggtcgaactcgacgcgcttctgaatcttctcttcgttgtcgatctcgccgcgccagccgttgatctgggcccaaccggtgatgccgggcttgacacggtggcgggcgaaatagccgtcgacggcttcgtcgaacagacggctctggagcttgccctgcaccgcatgcggacgcgggccgaccagcgagaggttgccggcgaagaccacgttgaagagctgcggcaactcgtcgaggctggtcttgcggatgaagcggccgacgcgcgtgacgcgcggatcgttcttggtcacgaccttggcggcggtcggatccgcctgatgatggtacatcgagcggaatttgtagacgtcgatacgctcgttattgaagccgaaccgcttttggcggaacagcaccgggcctgggctgtcgagcttcaccgccagcgcgacgaggcccatcaccggcagggcggcaagcagcgccaggctgccgacgacgcggtcgaacagccatttcatcaccaggtcccagtcggtgatcggcgcctcgaacacgtcgagcgtcggcacctcgccgagataggaataggagcggggacggaagcgcagcttgttggtgtgcgcggacaggcgaatgtcaaccggcagcacccacagcttcttcagcatctccaggatgcgcgtttccgccgagatcggcagcgcgaacagcacgagatcgacgcgggtgcggcgggcgaattcgacgatgtcgtcgaccttgccgagcttgcgcgcgccggcgcaggtgtcgagcgctcggctgtcgttgcggtcgtcgaacacgccgagcacgtgaatgtcggaatcttcctgcgccttcagcgcttccaccagctgctcgccgttgctatcggagccgacgatgatggtgcggcggtcgagccggccctggcgcgcccagcggcgcaccagcgagcgcagcaccaggcgttcggcgatcagcgccgcgagcccgaggaaatagaacgcggcaagccagagtcgggacacgtcgttgccgaacttggcgaagaacgagatgccgatgaagagcaggaagacgaacgaccaggacgagatcatccgcgtcatctgccggagctgtccgcggaacagctgcacctgatagatgtctgcggcctggaagcagaccacggcggcgacggcgaccgcaataacctgggcgggatagacccagctgaaggcgccggcaagcggcatgacgtaaccgacataaagcgcaatgccgacgaggctcagcagcgcgaagtcggcgagacggacgaagccggcgatcacgatcggtgaataggcgcgggcgaccttctggttcacgacttcgagcgcggcgggtgagagccgccggcggcgttccacgaagggctggtcagcaggcttcgccgcggcgctggtcgcggcgtcgagcatcgagcgtgcgttgagcggttccactggcgtccacgtccattccacggcccgcggcacggccttgagtgcgcgggcaagtatcccctggcacttcgactatcgaacaaatcggaagattttctaaagcggccttaaggatggttaatgattgatgaaggcgtcgcgatagccggcgagcacgccctcgaccatcgcctgctgggagaaatgcatcgagatgcgctcgcgcaacgagagtgcgcgctgcgcggtcgtctgtggatcgtccagcgccgcggcgatcgcctcggccatcgcgtcgggattgctcggcgcgaacagcgcagggctgtcggcaccgaagatttcagggataccgccgatgcgggacgcgatcatgggaatgcccgcggcacccgcctcgatcacgacatagggcatggaatcgccgcgcgagggcacgacgagcaaccgccccttggaaaagccgtagcgcgccttgacgtggccgatgaagcggatcgcattggtgaggccgagcctctcgacctgcgctttcagcgccgctgtctcctcgccgtcgccgccgagcgtcagcgtcaccttcttgccgccttcgtgcagtcgtgcgagggcgtcgaccaacaggtccgcgcccttgatgtgcctgaactcgccgacatagcagaggtcggtggcatcgtcggccgttaccacgggctcgaactcctccggcgtgacaccattgaagacgcaacgcaccacgcccttgggcgtaccgacgatgcgttgatacgtgtcgcgggcaaaggcgctctcgaacaggaacagatccgtcgaatccatcagcgcgcgttccaggcgcgcgtagaactcgcctttgatggtgttcaacggatagtgcagcgagccgccatgcggcgtgtagatgcgaatggtatcgtccgagcgccgccgcatgcggatgaaggcgccggccttggcgccgtggccgtgcatcacgtcgggcttgagcttggcgataaggcgcctcatccgcagccagaccagcaaatcgtccggcgaaggctcgcggcggatcgcgagccgatgcacgccgagcttcaaccgaggcgcgagctcggccagcgccttgtcggcgcgctcgccgcctgtaaggctgtcggcgaggatgccgacatgatggccgcggtcgacctggccattggcgacgtcgagaatatggcggaagattccgccgaccggagcacgcacggcgtgcaggatgcgaagcggccggtctggagaggggggcatgatcaaaaccagctcgacggcgaatgccgaacaattttcgcgagataatcgagtgggattaagcggcctcgtggttaacaaacagtgacgagcgggtgtgctccaggtgccggatggtcgcgattaacccagcggcaaccttaatggagtgtaatcgcgccggttgaggtagagtcgcagcgttgccctgcgggagtgttcgatgcgtttagcgttctggcgtgccggcaaggacaaggcggtgatcgcgcgcgcggtctcgaagtcgaagcccgcagccgcgcccaaaatcgaagccgagatcgaagccgagatcgaagccgacaaggttgaagcgaatcccgcgcccttcgtcgtgaagcaggcgcaggtcgagtccggcgatatcgacctgcatgcgcttggcgcggtcttggcgcgcaagcgcggctggatcgtcgtgccgacggtcgtggcgctcgtcgcatcgctcggcgtcgtcaatctcatcacgccgcgctacaagtccgaagcccgcatcctgatcgacggccgcgagaacgtgttcctgcgcccgaacagcgatcgcgccgaggagcggcaggcactcgacgccgaggccgtcaccagccaggtgcagctcgttctgtcacgcgatctcgcgcgagagatcatcaagaagaataagctcgccgagcgacccgaattcgacccggtgctgcagggcatctcgccgctgaaatcgcttgccgcgctcatcggtatcggtcgcgatccgttcgcgatgacgccggaagaacgcgtgctcgatgcctattacgagcgcctccaggcctacgcggtcgacaagtcgcgcgtgatcgtggtcgaattccagtcggccgatcccgagcttgccgcccgcgtcgcaaattcgatcgccgacggctatctcgtgctgcagcaggccgtgcgccaggagcaggccaagaacgccagccagtggctcgccggcgagatcgagagcctgcgcaagaaggtctccgaggccgaggccaaggttgaggacttccgttcaaagtccagcctgttcgtcgggaccaataacacgacgttgtcgaaccagcagatgggcgaggtcaacacccagctcaacaatgcgcggtcgatgaaggcggacgcggaatccaaggcgcggctgatcaaggaaatgctccagagcggcaagccgatcgaggcatccgaggtcgtgaactccgaattgatgcgccggctgtcggagcagagggtgacgctgcgcgcacaacttgcggagcagtcgtccacgctgctcggcaatcatccgcggatcaaggagctgaaggcgcagcttggcgacctcgacaaccagatccgcgacgaagccgccaagatctcgcgctcgctcgaaaacgacgcccggatcgccagcgggcgggtcgatggtctgaccacgagcctcgagcaactgaagaagcaggcggcatccaccaacggccaggacgtccagctccgcgcgctggagcgtgaggccaaggcgcagcgcgacctgctggaaacctatctcgccaagtaccgcgaagccaacacccgcgaaaccatcgacaccgctccgaccgatggccgcatcatctcgcgcgccatcgtctcgaacacgccggcctatccgaagaagctgccgatcgtgctcattgcgacgatcgcgacgctgctgctgtcgtccggcaccgtcgtcaccggcgagctgctgcgtcagaccgcgccgcggacgttggccgcgattgcgccggcgcgggcgccggtgcggcgggagccatcggtccagccgcccgtcgctgctgccgtcgatgctgccatcgacccgatcgtcgagcctgctttgcccgagcccgcgccgttgcagcccgagattgggagcgacaaggatgtcagcgagttcgacgagatcgaacgtctggccgacaaattgcgcagggcgggtgctgaggccaggaaggtcaccgtgctcggcaccgcgcccggcgcagcgatcactctatcgacattgacacttgcccggcacctttcgcgcgacgcgcgcgtcgtcgtggtcgatctcgcggcgtcctcgccgagccttgccgcggcgtccgtcgatgcttcggctccggggcttgccgagctgatgcagggcgaggcgtcgttcgcgcaaatcatcacccgggacaagctgtcgcggctgcatctggtcatggccggccgtcccggcttcgaccgcagcttgctgcaatccccgcgcgtggcgcttgccatcgacgcgctgctgcgcgcctatgatcacgtgctgatcgatgccggtagtgcctccgatcttccggccgagctgctgacggcgcatgcccgcgccgtcgtggtgccggatgcgtcgatggtaccggacgcgcgcgcgctgatgtgcgagcagctgagggcggtcggcttcagcgacgtgacgatgctgagcaagccggtgcagccgtccgatgcggtggagacgccgcgcgtcgtggcggcgtaggcgagcgcgccagccgtcggtctcctacgcgctgcgtcttacactccctctccagggtcctcgacgggagggcaaggggcagcgcgaaagtggatggagagcgcaaaagagctggtgacggctatccgaacgcctgccgcagccggcgggccaggtcgaacagcatttggttctgcttcaccagccgcttgccgtggctgagtgaggacattgccatcgcggcgagcctgccgcgcgaggtcaggggcacgaagctgtcgaagatgtcctcgtcgtccttgcagaacatccttttgtagtcgtccgagccgatgccgaggtcgagcgagcggtagccgcgctcggcgtagcgatcgatgatgtagcgcatcaggatgaggccggggctgtagcgggcgtgctccgacatcgtgtaggtgttgaacatcatcgagaagcgctggccatcggcgacgccggcgaagatcgcgatcacctcatcgtcgcattcgagcgcgtgaatgtcgatgacgcggccttcgccacgtggcgcaagacaggcgctgcggatgaactgttcgacgccaggctcggcgaagacgttcggcagcttctgctcggccatccgcgccggcttgacgcggaagaaccagtcgagcaggcgggtgacgtcggcatctgatgtggccaggtgatagcgatagccggtgagggcctgtagcttcttttccttgctcttgagacggcggcggaacgaattgctgatccgcgatgccgccgggccgccgggctccatcgtcagcagcgggcagccgttgatcgcgctctgccgcggcagcaacgcaaacgggttcgtccggtcgtgccagcgctgcggctgctgcgtcagcacgagcacgtcgacacgctcgcgcagcgccgcaagcagggcgtcgagatcggcgacgccggcctgcgccgccaattcggcatcccacaggcccatattgaaggtcgtgtgcttgccgcccatgaagcaggccgtgcggacgccatggctctggcgcaggcagagcgggagcagcaggagcggccggtgctcggcgtcgcgggcaatcacgatgaagggtcgcgcgccctcgcgctcgccgaccagtcgttgccaggcgctgagcaggtcgaagcgctgatagggcgtgaagagatggccgggctcctcgaaggcgcgccagacggcctcggcctcggcgagatcgatgacgatatcgacatgagcgatacgtctcgcttttgaccgcgatggcgcttctgccgtccggctttgcatcgccgcagccatggtcattcgcgaaacctgtcgagaaatcgataatacgtatttcggcctgtggccgacctttgcaaagaaaggtcaacaaagggtaatgacagggagagggaacggcggcggcgcgcgcgaagggcgggattttggtatccgacgacagatggctggagcgtctgcgcctcgagctggcctggttcaccggccaagccgtgctgcgcagtcgcggggccggcgccattctgcgctttcagcacgtgcggccgcggcggcggggcgggtttcagccatcgcgcgcgagcgagatcacgccgcaatttctcgatcgcgccattcgcgcgctgaagcggtggaggtacgatttcctcggcatggacgaggtatgccaccgcgccgtgacgctgccggagaaggggcgctttgtggcgctgaccttcgatggcgccagcaaggacctcatcaacttcgcctatcccgtgctggtgcgccacgccgtgcccttcacgatctatgtgccgaccgcgtttccagacggcgtcggcgaggcctggtggtcagggctggagcaggtgatcgcgcgcgagagccgcatcagcctgatgatgggcgagaaggagcagcgtttcaccgtaaccgacaatgccgagaagcaggcgctgttttcgcatctggagagttggctccgctcgctgccgccggcggatctgtcggccgccattgccgatctctgcacgcgctaccgggtcgacctcgcggcgctctcgcgcgcagcgtcgatggattgggaggatctgacgaaattggctgcggatccgctcgtcacgatcggcagcgcgacggtgaattaccccgtcttggcgaacatgaaggacgcagctgcactgcgagagatgatgatggggaaggccgttgcggaagccgctttccgccgcgaagtcacgcatttcgcctttccgttcggcgatcgcgcctcgtttcggcgcagccacgtcgtgatggcggaggaggccggttttgccagtgccgtgacggcgatcccgggtgtcgtggaagcggagggacgcaccaatctgcgcgcgctgccgcggatttcctgggacggccgggtgcggtcgctgcgcatgctgcgtgtcctggcatcgggcgtcgcctttgcgacggtgaagccgacgcggagcgctaggagccagacttgatacggtcgggacgctgcatccagctcacgataggcatcgccggcaagacccagcccagcccgaccacgacgtaatagatcgcctgccgccagccagactcggcgatccacggcatctgcgccagcgccatgccgagcagggcccagacggtggccagcaccaggagcaggatggcgccgaggaactttcgggtgcggatcgtcatggcgggcttgcggctttcgcgtaacttgcactgcggaagcgggggactataaggggcgcgcagtccggttcaagcttggttttcgccccgaatgacgatgatgtccgcaccgtccgaaccgcatcgcgccgtgcgcgcgtggctgatcgccgtggccgggctgatcgcgctgatggtgctggtcggcggcgcgacgcggctcacggagtcgggcctttcgatcgtcgaatggaagccggtgacgggcagtgttccgccgctcaccgagacgcaatggattgaggcgttcgaagcctacaagaaaatccctcaatatcgcgagctcaatgcagggatgagcctctcggagttcaaggagatcttctggtgggaatggagccaccggctgctcggacgtttcatcggtgtcgcttatctcttgccgttcctgtttttcctgtggcgcggcggcctgtccggtgaattgaagcgtcggctgtggctcctgttcgcgctcggtggtcttcagggcgcggtcggctggtggatggtggcctcgggcctgacggaacgcacggaagtgtcgcaatatcggcttgcgacgcatctggtgctggcgctcgtgatcttcgccggcatcgtctggacggtgcggcggctcaacgagcggccacgggccgcagcgcctgcacggctgcgcttcaccagcgcgctgctcctcgtcgtaacgttcgtacagatctatttcggcgcgctggtcgcgggcctgcgcgccgggcgtgcctacaacacctggcccgagatcgacggcgccttcattccctccgccgagcggctgtggttcgagacgccgtggtggcgcaacatgttcgacaacgtgctgacggttcagttcgagcaccgcatgaccgcctacctattgttcgcactggcggcgttgcacgcaatcgacgcggtgcgctcgcgtgcaggcgcggctgcgagcggcgcgttgtggctgtttgcggcggtgaccctgcaggcggtgctcggcatccttacactgctccaccaggttccgatcggtctcgcgctcgcgcatcaggcggtcgcgatcgtggtgctggcgctttccgtgatccaattggagcgtctggcctggcggcaatccgccgaagcgcagccgcgggcggttcccatcggccagcctggctgattgaatcagcaatagccgtagacgccgcacgcatagggcaggcgccagaaatagtcgacctgctttccaccgtaatacgagccctgataatcgtagctccacgggcggccgtaatagcccggcaacgtgtgggagccgggcagcagcggtgtccccggcaggttgcggatgtagctgccgatgccataggcgggcgagatcagcgcatccggatcggtttcgacgtagacctgcggcggatcctgcggcggcatggccgcgcgccgcttcggcgtggccggcaggtcggcagcgagcgcgctcgaaaccgtcagcatcgtcgcaagggcaggcaccatccagcgcagcatcacaggctccgaatcaaaagggcgatccaagctcgatgtatgcgggatgtatggttaatgactgttaaccgggtcggtgcccgaacaaatgtcatcgccagtcattccggggcggtgcaaagcaccgtgcccggaattcagaggtcgttcgcatcacttcgaggttccgggttcgcgcctttcgcgccccggaacgacaacagctacgccgccagcgcctgctccagatcagcgatcaggtcttccttgtcctcgatgccgaccgagagccgcaccacgtcggggccggcgccggatttgatcttggcggcatcgtcgagctggctgtgggtggtcgaggcggggtggatcaccagcgagcgggggtcgccgacattggcgaggtgcgagaacagctgcagcttcgacaccagattgacgccagcgtcatagccgcccttcaggctgaaagtgaacaccgcgcccgcgccccttggagcgtatttgcgtgcgagctggtgatacttgtcgctcggcagacctgcatagttcaccgaggccaccgccggatggccggcaaggaattcggcgacggcctttgcattatcgcaatgtttctgcatgcgcagcggcagcgtctcgatgccggtcaggatcatgaaggcgttgaacggcgaaagcgcggggccgagatcgcgcaagccgagcacgcggcaggcgatcgcgaaggcgaaattgccaaaggtctcctgaagccggataccgtgatattcggggcgcggctccgagagcatcggatatttgccgcccgtggaccagtcgaaggtgccggcatcgacgatgatgccgccgagggagttgccgtggccgcccaggaacttggtcagcgagtgcacgacgatgtcggcgccatgatcgatcggccggatgaggtagggcgaggccagcgtgttgtccacgatcaaaggcacgcctgccttgcgcgccaccgtcgagatcgcctcgatgtcggtgatgctgccggcgggattggcgatggactcgatgaagatcgctttcgtgcgcggcgtcaccgcccgctcaaagcttgaaatgtcatcgggatcggcccacaccacgttccagccaaagctcttgaatgcgtgtgtgaactggttgatcgagccgccatagagctttcgcgcggcgatgaactcgtcacccggctgcagcaattgctgcaacaccacgacttgtgcggcgtggcccgaggccacggcaagcgcagccgtgccgccttcgagcgcggcgacacgttcttccaggacggcattggtcgggttgccgatgcgggtatagatgttgccgaacgcctgcaagccgaagagcgaagcggcgtggtcggcatcgttgaagacgaaggacgtcgtttgatagatcggagttgcgcgcgccccggtggtaggatcgggctgtgcaccggcatgcacggcaagcgttgaaaatcccggaaggcgatcgctcattgagggcgtcctgttcttggtggcctgaaaatcgggcggcatgctgatcggcgccgcgcctgccgtcaaggcggcgcttcacatcggaacgatcttgctacgcattgtcgcgttcgcgaaatgaatccttcgcgattgcgtcagctttgctcgctcttgtttttcgccgcacgatcggatgccgcggtgtcgccgccgccgacgctcattcgattgagggacaggcgcatgccctgggtcggcgccggggggcgcttggagctgagcgtgcgtgaattcacgcccatccaggagatctcggacgacaggcggccatattcgatcttggggcagcggttcatcaccaccttgataccgaccgattccgctttcgccgctgcggcatcgtcgcgcgcgccaagctgcatccagatcaccttcggcagcgggtcgagcgtgagtgcctcttcgaccacaggcatgatgtggctggagttgcgaaaaatgtcgatcatgtcgatggggcggccgaagtcggagagcgaggcgacgaacggctttccaagcaattccttgccgacatggccaggattgaccggaatcatgtcataaccgcgctgcgccagatacttgaaagcgaaatagctcggccgcacattgaccggcgaggcgccgaccatcgcgatcgacttcacgctgttgaggatgccgcggatgtaattgtcgggataggcgtcgtggttcatcgcttgtcttttcttgttgtcactcatcccgccatgtgggcgtgcgcttctcgatgaacgcgccgatgccttcctcggcgtcgcgtgccatcatgttctcggtcatcacctctgccgcatagcgataggcgtctgcaaggctcatctcggcctggcgatagaacgcctccttgccgagcttgatcgtgtaggcggatttgagcgcgaccttctgcgccagcgcgattgccgcatcgcgctcgctgcccacgtcgacgatgcgattgatcagcccgatctcgcgggcgcgtgcggccgggatcggctcgcccgtcagcagcatctccattgcttgcttgcggggcacgttgcgcgacagcgccaccatgggggtcgagcagaacaggccgatgtcgacgccgggcgtcgcaaaagttgctgcgtcggacgcgatcgcgagatcgcagctcgccacgagctggcagccggcagcggtagcgatgccctggacggcagcgaccaccggctttggcaggtgcacgatcgcctgcatcatcgcgctgcaggcattcatcatctcggcaaagaaagcgcggccgcgatcggggtcggcgcggtgcgcggtgagttccttcatgtcgtggccggccgagaaagcaggaccgttggccgcgatcacgacgccgcggatcgccttgtcattgccgatctcgttgagctcggcatgcaggccggcgatcatcgcctcagacaggctgttgcgcgcggccggacggttgagcgtcaggaccgcgatgctgccgatcgtctcgcgcagcaggatctgcggttgtggggagggggcgcgggcgacctggacggacattgacgcgatttccgctaaatgattgcagttggatgacacagctaacttaatgtaacagggcaagtgaagcgagggtgggaagcggcatggcgttagcgaaaatgagcgtggcggagctggagcggttcctccgtgacgaatttccccaggccttcagcggtgacgacatcaccatcgagagcgcggacggccagaccagccttctgcgccagcgctacagcgaacgaatgctgcggccgggcggaaccgtgtcaggcccgacgctgatggcgcttgccgatttcgcgatgtacgtggtgctgctctccgcgatcggaccgatcgggctcgccgtcaccaccaatctcaacatcaatttcctgcggaagggccagccggggcaggacgtgctggccgaggcgcggctgctcaagctcggcaagcgtctggcggtcggcgaagtgaacctgttatccggaacgtcacccgatccgatcgcgcatgtcacctcgacctattccattccaaatgtttgagctttttgcaggtaatatgacaccttaatggcaagctattgatattgcagtcttaatttgcgaccttgaccattgaccattggccatctcttctctagaaaaccgcccagtccggcgcggtgttcgcgccgatgctccccgtccacggaaactctgacatgaaaaccttttcggcaaagccggctgaggtgacgaagaagtgggtgctgatcgacgccaagggtctggtcgtcggccgtctcgccaccatcgtcgccatgcgcctgcgcggcaagcacctcccgacctacaccccgcacgttgattgcggcgacaacgtcatcatcatcaacgcgcagcatgcagtcctcaccggtcgcaagcgcgagcagaagacctactacaagcacaccggttacgtcggccacgtgaaggagcgcaccgcgcgccagatcctcgagggccgtcatcccgagcgcgtgctcgagaaggccgtcgagcgcatgatcccgcgtggtccgctcggtcgcgtgcagatgggtaacctacgtgtctatggcggggccgatcatccgcacgaggcgcagcagcccgagaagatcgacatcgccaagttgaaccgcaagaacacgagggccgcataacatggccgaatccatccaatcgctcgaccagctctcgcagctcaagacggcggccgcgcctgaggcgcccaagcacgagaagaaggtcgacaagttcaaccgcgcctacgccaccggcaagcgcaaggacgcggtcgcacgcgtgtggatcaagccgggcgccggcaaggtcaccgtcaactcgcgcgaggtcgaagtctatttcgcccgtcccgtgctgcgcatgatgatcgagcagccattctcggtagcccagcgttcgggccagtacgacgtgatctgcaccgtcgccggcggcggcctctccggccaggccggcgcggtccgtcacggcatctccaaggcgctcacctatttcgagccggagctgcgcagcgtgctcaagaagggcggcttcctcacccgcgactcgcgcgtggtggagcgcaagaagtacggcaaggccaaggcccgccggtccttccagttctcgaagcgttaatcgctttcgtcggattcgccgcgaaagcggcttcaatgagatgcaaaagggcgctgatttcagcgccctttttgctgttcgtttgtatgcaaattgatggcgtgtttcccgaaaagttgtccccgcgcgaaaacctgaatggaacccgccggacatagcgtcgcctatggaagggcgcgcaaatcggatgtgccgatcgcgtaactgctatgttgtagagggggccgacatgatgtcgctcgatagcatcacgctctatttggtcgcgaccatggttgccgcgctgctcggcgccatgatggtgtttttcggcaggcaggagaacagcccggcgctgagatggtggggcaccgcctatcttctcggtgccgccgccgtcgcgctatggactgcggctggcgacaggctgggcccgcacatttacctggcgctgaacgccgtcggcttcgtcgcctgcggcatggtgtggaacgccgcgcgcgtcttccacggccgcaagccgaactggcccggtctcgtgctcggcgcgctcgcctgggtcgctgctgcgacgctgctcgatccggctgcatccatgctgcgcatgctcgtcggcgccggcatcgtctcggtgtatgcagcgctgaccgccagcgagctctggaccgaacgtcgcaagagcgttcaacgacgctggccggccttggtgatgccggtgatgcatggttgcgtattgatgctgccgatcctgatcggcagcttcctgcgcccgcacgatgcaagcttctcccagagcatctgggtcacagtgttcgcggtcgagcttatcctctatgccgtcggcaccgtgttcgtcatcttcatgctcgtgtccgagcgccccgtgaccgcgcaccggaccgcagcttccaccgatccgctcacgggcatgctcaaccgccgcggcttctcggaagcctgcgcgcgcgtgatcgagcgcgaggccaaggccgggcgtccggtgaccgtgatgatcttcgacatcgaccacttcaagtcgatcaacgaccgcttcggccatcccgccggggacgagatgctgaagctgttctcgaccgtcgtggtcagcagcctgcgcatctcggacctctcgggccgcatcggcggcgaggagttcgcagcgctgttgccctgctcgctggaggagggcgtgctggtcgccgagcgcgtgcgcgaggcgttcgaaaactccggcgtcgttgtcgatgaaggcccggtcgataccaccgtcagcatcggtgtcgccggaggtcccgccggcaccgagctcgaggtgctgcttgcctcggccgataccgcgctctaccaggccaagcgcggcggccgtaaccgcgtcgaggcggcggaggagctgccgctgtcgctggagaactggcgccgccagagcgccgcgcgaaccggtgcatcgcagccacgtccagcaacggcgtgagcaggaccaaggcgccgttgcggcgcctttttcttttctgccgtctgcggtagacacgccgatccaacaacaaagggtgggaaccgatgatcaccgagatcgcgcaaatcgacgtcaagccgggcagcgagaaggactttgaagctgccgtggccaaggccaaggcggccttcggccgctccaagggctttcacggcttcgagctgcacaaatcgatcgagaagccgcagcgctaccggctgatggtgaagtgggcgacgctggagaaccacaccgtcgatttccgcggttcggagaatttcaccgagtggcgcggccttgtcggccagtattttgctgcacctccggaggtcgagcacacagaggtcgttctgacgacctgaccggagtcaggccgcctcggcgagggccggcgcctcataggtcttgaagtggtcgatgataaccttggctatggcgaccagcggcagggccagcgccaggccccagattccgaacacgacgccgagcaggatctggaacgcgaatagcgtggccggcgggatatcgagcgcctgccgctgcatgatcggcgtcagcaggtagctctccatggcatgcacgcccatgaagaggagaaaggccgacaaggcggggatccagcccgaggcaaggcttgccagcaccacgatgacgccgccgatgatggctccgacggtgggtatgaaggcgagcaggcccgcctggattcccaggatgaacgcgccgggaatgccgatgatggcaagcccgatccaggtcacgacaccgaccgctatcatgacgatgaactgcgcggtcagccagcgctccagcgtctccgctatgcggtcgatgacgagggcgacacgcgtgcggtgcctcaccggcgccaggaacagcaggccgtcgtgatagacgcggggctgggccgcgaaggcaaggccgagaaacagcacgatgaagacgttgcccacgccgtgaatggtgccgagcagcagcttgaaggtctggctcacgatcgcgccgccgccggaagccagcgcgccggcactgggcaggggagcgcgcgagggagccgctggcgcggcggtcgcctccgacgaagtcgtggccgaggcatccgaggtggcattgccgaaatcgaagaagctggtgtcgatgccgtgggtctcgaggaaggacctcacattcgcgatctgcgacttgatggtcttgctcagcagcgaggcctgctcggcgatggtcgcgccgccgagataggcgatgccggcaagcaccagggcgagcgcgacacagacgatcgcaagccggacggtgtggggcaggcgaacccggcggccgagcgcattgaccagcgcgttgaggccgaggccgagcagcatgccggtgaagatcaggagcagggtggccgcgaaataccagctgaaagcgagcagcgccgtgaaaagcacgacgccgatgcctccgaccgcaatcgcccaagcctgatctcgggcgaggtcactgcgggtcggggggcgttcatctctgagaatcgtcacgtcgtgtcctttcgcgcaggcctgcgtccggcactctttcgacaaacgcgcttccgatcaagagcggcaacaggccggtttgacgctgccgcgcgaacggtgcagagcggtaaggttgaaaggatgcgagcgcttgggtttcatcagcaaatgggcaggtctgctcgggcttctggctttgctcgtcggcggcgaccagatccggatcaaccggccggaccacaagtttcgcctgacggtcgaagtgacgacgccagacgggatcaagaccgggtcgggcattctcgccgtcgtgcccgatcgcaactacaaccgcagcggccgcaccacgacgcgcggggaggctgtgttcgtcgacctcggccaaggcaagaacctcgtggcattgctggcgcaccagcaaggcgccaagcttgatttcgacgacatcaactatttggcgctccgcgcctacggtgccgcacgcggcagccgcgtgtcgttcaaggacatgagccggcagaccggaatcgtcccggtacagggggagttgatccccgtgctcgtgagcttcggtgatctcaaggaccctgcgagcgcgcgcctcgtcgatggccgccacgcagaggcagtcctgggcgatggctacgcgatccgcggtttctccgccgaggtcgtgcccaatgggttctggccgatcgacatcggtggtgctctcggagagcccgtgacacgcggacttcacgcgaaattgccctggttggccgtgccggatgcccctgcggcggtcgccctgcaggctgctgggttgccggcgatggagccgagcgtagcccgggaggcctttgcgcgaaaatagcattgccgtcccgcgatcccctctgttgaatttgttccgtgcgaggggcatgttttcagaatcttcttacccggaggctcagaacgacagatgagaaagccggtcgtcggcgtgatcgggaatgcccatcgcgtcgaaaatcgatttcaggtccagatggtcggcgagcgaaacctgcgcgctgttgccgaagtctccggcggcttgccgctgatgttcgctggctcccctgatatcaccgatatcccggcgctgctcgacaccgtggacggcatcatcctgaccggggcccgggccaacgtgcatccgacccgtttcaacgtcgacccctgcgagaagcacgagccctacgacatccaccgggacgaggtggcgctggcgctctcggttgcctgtgtcgcccgcagcatccccctgttcggcatctgccgtggcctgcaggagatgaacgtcgccttcggcggctcgctgcatcccgagattcgcgagataccgggccgcatgaaccaccgcatgcccaggctcgagaacggcgagattcatcccgatccgaccgtggtgttcgccgaccgccatgacgtcgacctcacgccagccggcgcgttcgccaaaattctcggctgtgagaagatccgggtcaattcgctgcatggccagggcatcctggagcccggcaaacgcgtgctgatcgagggcatcgccgaggacggcaccatcgaggcgatccgcatcgccgaagctccgacctttgcgctcggcgtgcaatggcatgcggaatacgatccgcagcacaatccggtcaaccgcaagctgttcgaggccttcggcgaggcgctggtcgcgcggcagaaggcggcggcgtagagcagctcgcgagtggggcagctcttgccgcgccatcactgcaggagctcttgcggcgaactcctctaagcttgggccgaggagatggactgtatcggctctccgttcgcacgatcaccattcgcttcggcgaacttccgcggaataaaccaatcagtaggatttggtccgtgctgctttttacggctctgatttgttctttgagaacaaagtggagtcggacggagaacgaaagctggtggatggagggcaagggtctgcaccggtcgcgcacggcatgcagctgacacgagttcatcggtggcgtgacggcgttcgactcaaaacgaaaaggcgcctcctcgcggaagcgccttttgcttgtcggatgaagttcgggccgatcagcccgaatagtacatctcgaactcgaccggatgcggggtcatctcgaagcgcgcgacttcggtcatcttcagctcgatataggcgtcgatgaagtcgtcgtcgaacacgccgccagccttgaggaagccgcggtccttgtcgagattctccagcgcctcgcggagcgagccgcagacggtcgggatctgcttcagctcttccttcggcaggtcgtagaggtccttgtccatcgccggacccggatcgatcttgttcttgatgccgtcgaggccggccatcagcatcgcggcgaagccgagataggggttggccatcggatcggggaagcgcacctccacgcgcttggccttcggcgaagcggtgtaggggatgcggcaggaggccgagcggttgcgcgcggaataggcgagcagcacgggggcctcatagcccgggaccagacgcttgtaggagttggtcgaggggttggtgaaggcgttgattgccttggcgtgcttgatgatgccgccgatgtagtggaggcaggtctccgacaggtccgcatatttgttgccggcgaacaccggcttgccgtccttccagatcgactggtgcacgtgcatgcccgagccgttgtcgccatagatcggcttcggcatgaaggtggcggtcttgccgtagatatgcgcgacctggtggatgcagtacttgtagatctgcatgtggtcggccatcagagtcagcgtgtcgaacttcatgccgagttcgtgctgggcggaagcgacctcgtggtgatgcttctcgaccttgacgcccatcttggccatggcgccgagcatctccgagcgcatgtcctgcaccgagtcctgcggcggaaccgggaaatagccgcccttggtgcggatgcggtgaccgagattgccgccttcatattcggtatcggaatttgtcggcagttccgaggagtcgagccggaaaccggtcttgtacgggtcggccgaatagcgcacgtcgtcgaacacgaagaactcggcttcggggccgacgaacacgctgtcgcccacacccatcgacttcaccatggcttccgccttcttggcgatgccgcgggggtcgcggttatagggctcgccggtggtcggctcgagcacgtcgcaagtgatgaccatggtggtctcggcgaagaacggatcgatcgtcgcggtcaccggatcgggcatcaggcacatgtcggattcgttgatcgccttccagccagcgatcgaggagccgtcgaacatcgtgccttcggcgaagatgtcttcatcgatcatgctgacgtcgaacgtgacgtgctgccacttgccgcgcggatcagtgaagcgcaggtcgacgtacttgacgtcgttgtccttgatcgatttcaggacgtctttggcggtcttcatgcataccccttttggctctgcggatcggtttccagatgagcaaaaatttctctcgcttgggcgagttttgcgcgaccgcacaaatgaaatcaggccgccgaggcagccttatctcttgtcggagtgtcgcaaaatgcgggatagcacccggctcagatagcgtccagcccggattcgccggtccggatacggatcgcctcttcgatgttggacacgaagatcttgccgtcaccgatgcggccggtctgcgccgcgcggcggatcgcgtcgatggcgcgctcgaccagatcgtcgccgatcacgatctcgatttttaccttcggcaggaagtcgacgatgtattctgcgccgcggtagagttcggcgtggcccttctgccggccaaagcctttggcctcggtgacggtgatgccctgaaggccgacttcctgaagcgcttccttcacctcgtcgagcttgaatggcttgatgatggcttcgattttcttcactgcgcgactcccggcctctcgatcaaatagcaacgtcttcgtcaggacgcgcatttctcaacgcacgatcttgtcttctctatgccggcatccctgaccagtccggcgacagcgaccggccacaccctgtaagatcccaatggtgcgaccgaccgagcggcttcctcgaaagcagggtctatgccaagttgcaaatgccctgattatgagaacgttatcagccttttaacgtgcatccctggtggtggtgccgatttgcacaaaataccgaagactacgaaataggcaaacggttcaatatatgtgcagtttgatgttcttgtggcggggccggcatagaagatgcctgttgaagaggcgtttgtactaggaagtggcatggaagttctgaccaacgctgagatgcagcgcgccgaccagctcgccattgcggccggcacgcccggtttcgagctgatgctgagcgcggggcaggcggtcgcggaggccgcccatgcgctggtggaggaggggccgatcctcatcgtggccggccccggcaacaacggcggcgacgggttcgtggcagccgccgagctcgccgctcaggggcgcgaagtctcggtgatctcgatgagcgagcgtgaccagctccagggcgatgcggcgtccgcagcgcgcggctggaagcacccggtgctaccgttcaatccgcaggcgatcggaaggccggcgctgatcgtcgatgcgttgttcggcgctggcctcagccgtcccgtcgaaggcgaggcgcgtgcgatgatcgaggcgatcaacgccaacggcgccccggtgctcgccgtggatctgccgagcggcatcaacggcaccagcgcagccgtgatgggcgcggcagtgaacgccaccgagagcgtcaccttctttcgcaagaagcctgcgcatctgcttctccccggccggatccattgtggccgcgtgcgcgtggccgagatcggcatcgacgcgcaggtgctgaatgagatcgcacctcagaccttcgagaacgatccggatttctggggcgccgcctttcccgtgccgcgcatcgacggccacaaatacgcgcgcggccacgtgctggccgtttccggcgatgcggccgcgaccggcgcggcgcggcttgccgcgcgcggggcactgcgcgcgggcgccggcctcgtgacgctggcgagcccgcgcgatgcactcgccatcaatgcggccgcgctgacggcggtgatggtccgcgccgtcgacagcgcggtcgagtttggcgagctgctcggcgacaagcgttacaacacctgtgtcatcggccccggcgttggcatcggtgagcgcacctgcgacctcgttcacaccgcgcttggcgcgcagcgtcacctggtgctcgatgccgatgcgctgacgagctttgcagcgacccccgagcgcctgttcgaatcgatcaagtcctcgcagaacagtgcggtggtgctgacgccgcacgagggcgagtttccgcgcctgttctccgatctcagcaacaagcatcccggccgctccaagctcgagcgcgtgcgcgccgcagccgagcgctccggcgccgtcgtgctcctgaagggcccggataccaccatcgccgctccggacggtcgcgccaccatcgccgtcaatgcgccgccctggctcgccacggccggcgccggcgacgtgctgtccggcattatcgcagggctcctggcgcagggcgtgcctgccttcgaagctgccagcatcggcgtctggatgcacggcgcagcggcaagcgaggccggaccgggcctgatcgcggaggacctgaccgagacgctgccggccgtgcatcggcgcatctatgacgcgctcggcatcgaatattgagggctagtccaccgcgtaccaccgcaccagccgcggcgcggaccagtcagccatgacggattcgatcagccatcgtccgggggagcttgcggcgaacgcaatgcgctgggtttggccgggctcgatcgcgagcgtgtcgagccagtaaggcttccagccatcgtcaagcttgtcgagcaggcggaaggggtggccgtgcaggtggaagacggtcgtgatcggcgcggggtttttcagcgccagcacgacggttcgtccggccttggcgcggaaggcgggggaagactcggtcgagaagcttgccggccgcgtccaaccggcgtccgctgcaccgagcgcgacatcgaaccgcagggatccccgcaggtcgagcttctcgggaaggtcgtttgaagggagtggctgcggcggccccagacgcgcgcgccggccctggctgccggagacggtgaggctaccgacctggcgcgcctccttgccgtcgtgcagcaggaagggggccgatctggcgacatccacgaaggcgtcggcccgtccgcccgcggcgagcaccagagcaccattccgcgccggaaacggctcggctggctgaccgtcgagggccatgacctgaacctcatggctctccaatttgaccgctataacagaacgttgcgagccgttgatgaagcgcagccggagccgctcgccggccacagctgagagttcgaatgaggatctgccattgacggtgtagagcgatgcggcatccttcggatcctggcccggcggaaccgcggtgccatccggccgcaggcgccattcctcgatcaacaggatctcgtcacgatcaacggcaatggggccagtctcgccggcgacgatcgcaagcgaccgtgccggcagcttcaggccgtcctcgaagaggcggaagtcggctacgagcgtcccagcattgggtattgaaacagttgatgtttcggccgaattgggcgcggcgggggtgtgtcctcgcagcgagtccgatgcggccccgctgttgaggccgtaccagaccggcgcaagcgggacaggaaggtcgttccgaaacaccagctcgcagcgatcgccccgcttgagacggacgtctccgagctggcttgctgcggccagttcccatatcggagtcgccgattggccgggcctgagggccaaggttgatgccctggcctgaagcgcgagccggccggttaccggcggggttgcgccgcccgccgccaagccggccgcggatgctgcgagcccagccagaaccgcacgccggtgagggttcgagaaccgcgttgtcatgaccgatccggaccacgccgcgctggataagtccagccatcatgcctacttgaagtgcgcctccaaccggccatttttttgctgcgaacagtcaggcacatgctataagcccggccgcccgcggcatcgcggccggtcttgatgcaaattaacgcgggcgtggcggaactggtagacgcgctggatttaggttccagtgacgaaagttgtgggggttcgagtccctccgcccgcaccaagcgcttatcgcgtttgcacggattacgagacctgctttctgcggatgatcttccgtcgggagccggtccgatgaaccaccggtggtgaggcgttgcctcgcgccggatcgattaatgacagcgtcccgacgcatgcgtgccgggaccgagcgaaaagaagattggacgccatgcaggtcacagaaaccctctcggaaggcttgaagcacgagttcaagatcagcgttcccgcgtctgatctcgatgccaaggccggcgccaagctcgtcgacctcaaggacaaggtccggatcaacggcttccgtccgggcaaggtgcccgtggcgcacctgaagaaggtctatggccgctccgtgatggccgaaaccatcgaccagaccatccgcgacaccaacacgcagctcttctccgaacgcggcttccgcctcgcgaccgagccgaagatcaccatgccgacggagcagaaggacgtcgaggagttgctgagcggcaagaccgatctgacctacaccgtcgccatcgaggtggtgccggcgatcgcactcgccgacttcaagagcttccaggtcgagaagcctgtcgccgatgtcaccgacgccgatgtcgacgacgcgatcaagcgcatcgccgattccaaccgcacctacgccgccaagggcgagggcgccaaggcggagtcgggcgaccgcgtcaccatcaacttcaagggcagcatcaacggcgaagtcttcgagggtggcaccggcgagggcatccaggtcgtgatcggctccaacaccttcatcccgggcttcgaggagcagctcatcgggatcggcgccaacgagacgcgcacgctgaaggtgtcgttcccgaagaactacatgaacgagaagctggccggccagccggcggagttcgagaccaccgcgaccctgatcgaggcgccgcaggatctggcgatcgacgacgagttcgccaagtcgctcggcctggaatcgctggacaagctgaaggaagccgcgcgcgagcggctgaccgccgagttcgcgactgcgacgcgccagcgggtcaagcgcgcgctgctggaccgcctggacgaggcgcatcgcttcgaggcgccgccttcgctggtcgatgaggagttcaatctgatgtggaactcggtcaaggccgagatggactccgccggcaagacctttgccgacgaggacaccaccgaggacaaggcgaaggaagagtatcgcaagatcgcggaccgccgcgtgcggctcggtctcgtgctctccgagatcggcgagaagaacaagatcaccgtgaccgacgacgaggtcggccgcgccgtgatcgagcgcgcgcgctcgatgcccggccgcgagaaggaggtctgggacttctaccgcaacaatgcccaggcgctggcccagcttcgtgcacccatctacgaggacaaggtcgtcgacttcatcctggagctcgccaacgtgaccgagaagaaggtctcgcgtgaggacctctacaaggacgacgacgcggaaaagaccgcagcctgagggtttgagatagcccgccattaaggatgatcagcgaaggggcccagctggccagatggccggctgggcctctttgtgcgaatcagcttcaactgccctgtcggattaagccttaatgcgctccgcacttgtcaggcgcgaattgggctatatctgtcggtacgccttctacctctaccaagttcctgcatcacaggacgtccatccgcccttccggcagaaccagcacaactggcagccagtcccggcgatgtccgtctccgaaaccctaggtgactcatgcgcgatccggttgaaacctacatgaacctcgtgcccatggtggtcgagcagaccaaccgtggcgagcgcgcctacgacattttctcgcgcctgctgaaagagcgcatcatcttcgtgaccggccccgtcgaggacggcatgtcgacgctgatcgtcgcgcagctcttgttccttgaggcggaaaatccgaagaaggaaatctcgatgtacatcaactcgccgggcggcgtggtgacgtcgggccttgcgatctacgacaccatgcagttcatccgcccaccggtctcgacgctctgcaccggccaagcggcttcgatgggctcgctgctgctcgccgccggcgagaaggacatgcgcttctccctgccgaatgcgcggatcatggtgcatcagccctcgggcgggttccaaggccaggccacggacatcatgctgcacgcccaggaaattctgaatctgaagaagcggctcaacgagatctacgtgaagcacaccggtcaaacctacaagtcgatcgaggatgcgctggaacgagacaagttcctgaccgcgaacgatgccaaggagttcggcttggtcgacagggtgatcgacaagcgcgccgaggagccggcggcgacgaaatccccgtagcactactgggtcgtcacgacgatctctcaggttgccgtggacccgtcagggcggtgttcacgttaggtcgcttgcgcgcgtcgcaaaatgcggttttgcgccccgcggcaacggaaagttccgctttcgtgcttgtttttcgtggcaatccagcaacgccggggtgatttcgatcacttcgcccgtgccaagaccggaaatcacggtattgtcacgggtagccggcgaaccccgattagcgaattcttgatagtcgggtgacagcatggttggctacgactgatcggctatgatcgcgggagaatcgagtgaccgtgattcgcacggtgtagtaagcgtaggtcttttttggtacggaatttgctctacttaagcttcatgccggccatcgtgtcggaatggggcgatcgagcggaacgggatcgaaccgcggacggagacatgaatgagtaaggtcggcacgagcgactccaagaacacgctgtattgctcgttctgcggcaagagccagcacgaagtccgcaaactgatcgcgggtcccacggtcttcatctgcgacgagtgcgtcgagctctgcatggacatcatccgcgaggagaacaagtcctcgctggtcaagtcgcgcgacggcatcccgacgccgaaggaaatctgcaaggtgctggacgactacgtgatcggccagagccatgcgaagaaggtcctgtcggtcgcggtgcacaaccactacaagcgcctcaaccatcagaccaagcacaacgacgtcgagctcgcgaagtcgaacatcctgctgataggtccgaccggttcgggcaagacgctgcttgcccagacgctcgcgcgcatcctggacgtgccgttcaccatggcggacgcgacgacgctgaccgaagcgggctacgtcggcgaggacgtcgagaacatcatcctgaagctgctccaggccgccgactacaatgtcgagcgcgcccagcgcggcatcgtctacatcgacgagatcgacaagatcagccgcaagtccgacaatccctcgatcacgcgcgacgtgtcgggtgagggcgtgcagcaggcgttgctcaagatcatggaaggcacggtggcttcggtcccgccgcagggcggtcgcaagcatccgcagcaggagttcctgcaggtggataccaccaacatcctgtttatctgcggtggcgccttcgccggcctcgagaagatcatctcggcgcgcggtcggtcgacctcgatcggtttcggcgcccaagtgctcgcgccggaggaccgccgtaccggcgagatcttccgtcacgtcgagcccgaggacctcctgaagtacggcctcatccccgagttcgtcggccgtctgcccgtcgtggcgacgctcgaagatctcgatgagacctcgctgaagaagattctcacagagccgaagaacgcgctggtgaaacagtaccagcgcctgttcgagatggagaacatcgagctgaccttcgccgacgaggcgcttggcgcggtcgcccgtaaggcgatcgagcgcaagaccggcgcgcgcgggctacgctcgatcctcgaagcgatcctcctcgagaccatgttcgacctgccgggcctggaaggtgtggaagaagtcgtgatttcccgcgaagtcgtggaaggaacggcgcgtccgctctacatctacgccgatcggtccgatcgcgcggtcgagaacgccagcgcctgatctggcggcgctggaatgcgccaattgccttgccaaaatgggctgcggaactgaatctccgcagccggtgttgcgtcgcttgtcgcgttgcgtaagcgcctgatggcgcgcgtttttcaatgacttgacaccccccgggtcgatagccacctaatgtcggcggcgagcgaaaattctcttcaagattcgcctcagttccgttccggcaagccggtccaacccgcaaacggaccgaccggttctgcggatcacctcggcaccttgtggcggttgcgcatgatcagcgggctgcgtgcgagggggcaaagcaaaaggaaaaggccatgaccaatcccaaaccccggccaaccatcgtccatggcgaaacgcacgcttatcccgtgttgccgctgcgcgacatcgtcgtcttcccgcacatgatcgttccgctcttcgtcggccgcgagaagtcgatccgcgcgctggaagaggtgatgaagaacgacgcgctgatcatgctcgcgacgcagaagaacgcgtctgacgatgatccggcgcccgacgccatctacgagaccgggacgctcgccagcgtgctccagctcttgaagcttccggacggcaccgtgaaggtgctggtcgaagggctcgagcgtgcgcgcgtggcgaaatataccgatcgcgccgactattacgaggcgactgccgtcgcgctcgccgataccgatgcgaagtcggtcgaggcggaagcgctggcgcgttcggtcgtgtccgacttcgagagctacgtgaagctcaacaagaagatctcggccgaggtcgtcggcgtcgtgcaggcgatcaccgatttcgccaagctcgccgacaccgtggcttcgcatctcgccgtcaagattgccgatcgtcagggcatcctggagacgctgtccgtgaccacgcgcctggagaaggtgctggggctgatggagagcgagatttcggtgctgcaggtcgagaagcgcatccgctcgcgcgtcaagcgccagatggagaagacccagcgcgagtactatctcaacgagcagatgaaggcgatccagaaggaactcggcgacgacgacggtcgcgacgagctcgccgatctcgaagagaagatctccaagaccaagctttccaaggaagcgcgcgagaaggcgcagcatgaattgaagaagctgcgccagatgtcgccgatgtccgcggaagcgactgtcgtgcgcaattatctggattggttgctgtcgatcccgtggaacaagaagtccaaggtgaagaaggatctggagcaggcgcaagccatactggattccgatcactacgggctggagaaggtcaaggaacgtatcgtcgagtatcttgcggtgcagtcgcgcgccaacaagctgacgggtccgatcctgtgcctcgtcggccctcccggcgtcggcaagacctcgctcggcaagtcgatcgcgaaggcgaccgggcgcgaattcgtgcgcgtctcgctcggcggcgtgcgcgacgaagccgagatccgcggccatcgccgcacctatatcggctcgatgcccggcaagatcatccagtcgatgcggaaggcgaagtcgtccaatccgctgttcctgctggacgagatcgacaagatgggcgccgatttccgcggcgatccgtcctcggcgctgctcgaggttctcgatcccgagcagaacgggacgttcaacgaccactatctcgaggtcgactacgatctgtccaacgtgatgttcatcacgaccgcgaatacgctcaatattcccgggccgctgatggaccgcatggagatcatccggatcgcgggctacaccgagaatgagaaggtcgagatctcgcgcaagcatctgatcccgaacgcggtgtccaagcatggcctggactccaaggagttctcgatcgacgacgacgcgctgctgctgctgatccgccgctacacccgcgaagcgggcgtgcgcaacctggagcgtgagctctccacactcgcccgcaaggcggtgaaggagctgatgatctccaagaagaagtcggtcaaggtcaccgagaaaactctggaagagttcctcggcgtgccgaagtaccgcttcggcgagatcgagagcgagccccaggtcggcatcgtcaccggccttgcctggaccgatgtcggcggcgagctgctgaccatcgaaggcgtcatgatgcccggcaagggcaagatgacggtcacgggcaatctgcgcgacgtgatgaaggagtcgatctccgcggcggcttcctatgtccgctcgcgcgcgatcaactatggcgtcgagccgccgctgttcgacaagcgcgacatccacgtgcacgtgcctgagggcgcgacgccgaaggacggcccgtccgccggcgttgccatggccaccgcgatcatctcggtcatgaccggcatcccggtccgccacgatgtcgcgatgaccggcgagatcacgctgcgcgggcgcgtgctgccgatcggcggcctcaaggagaagctgctggctgcggcccgcggcggcatcaagacggtgctgatccccgaggacaacgccaaggatctcacggagatttccgatgcgatcaagggcggcatggagatagtcccggtctctcgcctcgacgacgtcgtcgccaaggctctggtgaagaagcccacaccgatcgtctgggaagaggacaccaaggtgacggtgaagccggacggggatgaagccgccggcggcctgaccgctcactgagatcgaagctcgaaatgatgataagacggcgccttcgggcgccgtttttgtttgggggaagggaggaggcaatgcacatcgacggccaatgccattgcgggaagatcacgtatgaggccgagatcgatccggagcaggtctcggtgtgccattgcaccgattgccaggcgttgaccggctcgccgttccgcgtgaccgcgatctgtgccaaggccgacgtgaagctgaccgccggcacgcccaaggtctacggcaagcgcggcgacaacggccggatgcgcttccagcatttttgcggcgagtgcggttccccgctgttcaccagcggcgagggcgaccaggtcgacgattggggcatccgctggggcagcatccgtcagcgtgaccagttgcggccggtgcggcagatctggtgccagtcggctgcggtgtggatcgacgccgtgccgttgctgccgggcaggccgcaggattgaggcgcttgtgaaaagcccaccttcgccaaacggctggggcatggcagtcttcgccagctttgcaccaatgagcgtcccggctggcatgcccagccgtagcaggcgaaggctggtgggcggtcacggattcgaaccgcggaccctctcggtgtaaacgagatgctctaaccagctgagctaaccgccccaagcgccctctttagctctccggcggggggaggagcaaggggcggcaacgcgcagatccggctcatttgaccgctttgctggcctccaacgtgatatcaccgccgggaaagtgattgaggaagccgatgcaacagcccagcggacacgagcagaacgccgaccagatcgcctattggaacggcccgagcggacagcgctgggccgatcgccatacagcgcaggagagcctgcttggccccattgccgacgtgctgatcgagcgcgcgaggccgaagccgggtgagcgcgtcctcgatgtcggttgcggctccggcgcgacgaccttcgccttcgcgaaggcggtggcacccgacggattcgcgctcggcctcgatgtgtccgaaccgatgctggcgcaggcgcgcgcgcttacgccaaagagcctgccgctcgacttcgtgctggcggatgcgacggtgtatccgttcgagtcggcgagcttcgatctgctcgcctcgcgcttcggcgtgatgttcttcgccgatcccatcgcgtccttcaccaatctgcgtcgcgcactgaagccgtccgggcgcctcgcgtttgcctgctggcgcgagccgaaggagaacccgtggatgatggcgccgctgatggcggtctacaagcatgtgccgaaaatgccgccggttggtcccgaagagccgggcccgttcgccttcgcatcggaggagcgcgtgatgcgcatccttaaaggcgcgggcttcgtggatgtggcaatggagccgcgcaatcttccgatggatatcgcgatcggcggcggcctcgatgccgccgtggacggctcgctgcagatcggccccgccagccgcgcgcttcagggccatccgccggagacctacgaggccgccaaggcctcgatccgcgagacgctcgcgccgttcctgaaggaccggtcggttgagttgcagggtgcgatctggatcgtgacggcgaaggccgcgtaggacacggcgctctctccgcgtcattgcgtggagcacttgcgacgaagcaatccagactgtctctgcggaggcagtctgaattgcttcgcggagcctgtcatcgggccggnnnnnnnnnncccggacccgttggctcgcgatgacagcgtggaggcgccagcgcgcccctcacaccacatcatccggcgccagcgcgcagccattttcggggtgcgtctcgacctgaagcgtggtgtggccgatgcgataggtcgtcttcaggatctgcgccgtctccaccaggaatgcgtcgccgctgcctgcgggcatgacgagatggcaggtcagcgccgtctcggtggtcgagatcggccagacgtggagatcgtggatccctgagacgccgggacgcgcgagcaaaaacgccctgatcgcggcgaggtcggtgcccctgggtgcggctgccatcgacatgtcgatggagccccgcaagaggctcgtcgtgctccagaggatggtggcgcagatgacgaggctggtgacggggtcgagccacagccagccggtccagatgatcagcgccgccgagaccacgacgccgagcgagaccgcggcgtccgcggccatgtgcaggtacgcgccctcgatgttgatgtcgtccttgcggccgcgcgcgaacagcagggcggtaaaaccgttgatgaggatgccgatgcccgcgaccaccatcaccgtgatgcccgcaaccggctcggggtgttgcaggcgcaggatcgcctcccagccgattgcgccggtcgcgaccagcaggaagaccgcgttcgccagcgccgcgaggatggtggaggcgcgcaggccataggtgaagcggccgctcggcgcgcgcttcgccgcgatcgaggcgccccaggccacgaccaggccaagcacgtcggacagattatggccggcgtccgccagcaaagcggtggagttgccgatatagccgtaagtcgcctcggccaccaccagcgcgatgttgagcgtaatgccgatcgcgaacgccttgccgaagctcgcgggcgtatggacgtgcccatgagcttggccatgaccatgcgaatggcttgcatgattatgttggtgatgcccgtgatggtcgtgatcggccacctctagcgctccgcggatgctgccaaatcaggcgccattgtaggcgtttcgcctgcgacgtcacggcggaacagcacgtagagcgccggaagcaccaggagcgtcagcacagtcgatgagatgatgccgccgatcaccacggtcgcgagcggccgctgcacctcggcgccggcgccggtggcgagcgccatcggcacgaagccgagggaggccacgagagcggtcatcagcaccggccgcaaccgcgtcagcgcgccctcacgcacggcatccacgacggaccgcccctcgccgcgcagccgctcgatgaagacgatgatgacgaggccgttgagcacggcgacacccgacagtgcgatgaagccgaccccggcgctgatggacaagggaatgtcgcgcagcaggagtgcggcgacaccacccgtcagtgccagcggtacgccggagaacaccagcgccgcatccgccgccgaccccatgcccatgaataacagcaggaacaccagcaacaaggccaccggcacgacgatcgccagccgcttggtcgcggagacaagctgctcgaactgtccgccccagccgatgaagtagcccggcggcagcttgaccttctcggccacggccgcctcggcctcggcgacgaaggagccgagatcgcgggcacggacattggcggtcaagacgatgcgccgtttgccgttctctcggctgatctggttgggccccggcgtcgcatcgactgttgcgaccgacgagagcggcacatagcgcatctgcgtgaggggcgaagcggccagcgcggtacgaatggccgtgccggagccggcgtcctcaccgggcggcagcggaatcgggatggcccttatcgcctcgagattgccgcgcaggtgctcgggcaggcggaccacgatctcgaagcggcgatcgccctcgaacagcttgccggccgacttgccgcccaccgcgatctcgacgatgccctgcacttcggcgacactgaggccgtagcgggcgagcgcctgacggtcgaggcggacggtgaggatcggcaggcccgcgacctgnnnnnnnnnnatcttgacgtcgctggcgccgcggatgccgcggatcgcgccctccacctgttttgcggcgccttgcaggatgtcgagatcgtcgccgaatatcttgacgccgacgtcggtgcgcacgcccgagatcagctcgttgacgcggaactggatcggctgggagagttcataggcactgccgggaatctcgtccgcggcatggtcgatcgcctcgatcaccgccgatttcgacttgtgcggatcgggccattcggcgcgcggtttcagcatcacgtatccgtcggtctgcgccggcgacatcgggtccgtcgcgatctccgcggtgcctatgcgggtgaagaattccttcacttcgggaatctgcatgacgcgcttctccagcgccttttgcaggtccagcgattgggtgaggctggtaccgggaatccggatcgaggccagcgccacgtcgccttcgtccaggctcggaatgaactcgccgcccatgcgcgaagcggcgatgccgctcgcgagcacgatggccacggccatgacggcgaccgcggcgcgattgtcgatggcaaagcggagcaggggcagataggcgcgcttcgccgcgcgcatgaacaggttctcgtgctcggagaccttgccggtcacgaaaatcgcaacggccgccggcacgaaggtgatggagaacagcaccgcagcgccgagtgccatcagcacggtcagtgccatcggggtgaacatcttgccttcgacaccggtcagcgtcagcaccggcagatagaccaccgcgatgatcagcgttccgaacaggctcggcttgatgacctcgctcgacccgcgcaggatggcccgcaaccgttcggcggtcgtgagcagcccccctttctcgcgctgagctacggccagcatgcgcaggcagttttcgacgatgatcaccgcgccgtcgacgatgatgccgaagtcgatcgcgcccaggctcatcaggttggcgctgaccttggcctcgaccatgccggtgatggtcatggccatggacaggggaatgacgcaggccgtcaccagcgcggcgcggatattgccgaggatcaggaacagcacggcgaccacgagcgccgcgccttcaagcaggttgttccggacggtgcggattgtggcctcgaccagatcggtgcggtcgtagacggtccgcgtcacgacgccctcgggcagcgatttggcgatgtcttcgagccgggctgcgacgcggcctgccacggtgcgactattctcgccgatcagcagcatggcggtgccgagcacggtctcctcgccattgcgcgtcgcggcgcccgtgcgcagatcgcggccttccctgacagtcgcgacgtccctgatcctgacgggattgccgccgcgcgagccgatgacgatgtcctggatctcggcgatattgccgacctggccgggagagcgaaccaggtattgctccccgttgcgctcgatatagccggcgcccacattggcgttgttggctgcgagcgccgtcatgacgtcgcgaaagccgagccggtaggccatcagcttgcccggatccggcagcacgtggaactgccgctcgaagccgccgatggtgttgacctcgatcaccccaggcacgttgcgaagctgcggccggatgatccagtcctgcacggtgcgcagatcggtcaacgaataatcgtggccggcttgcgtcttggcgcccggcttggcctcgacggtgtacatgaagatctcgccgagcccggtggagatcggcccgatcgcaacctcgacgctcgccggcagctggtccttcacctgctggatccgttccccgacgagctgacgcgcgaagtaaatgtcggtaccgtccttgaagaccaccgtcacctggctgaggccgtagcgcgacagcgagcgggtgtagtcgagcttgggcaggccgcccatcgcggtctcgaccgggaaggtgatgcgctgctcggtctcgagcggcgaatagccgggcgcgcgggtgttgatctggacctggacgttggtgatgtcaggcacggcgtcgatcggaaggcgctggaaattccatgcgccgaaggcgagggcgcccagcgcgagcaggaggaccagccagcgctgatgcagcgagagggcgatcagacgctcaatcatgctcggcctcgcccttgcccatctccgccttcacgacgaagctgttctccgcaacgtagtgctcgccggccgcgaggccggccttgatctcaacgtgtcgcggatctgaatcccctgtttcgacggggcgtgcctcgatcttgtcgccgtcctcgcggacgaacacgatggtcttgttgtccagcgtctggatcgcgctgcggcgcacggcaaccgcgacgttgcgttcggcgaggatcagccgcgccgtgacgaacaggccgggccgcaagcgtccgtcaggattttgcagcacgacgcgcgccagcgccgtctgggtctcgctgctgccgatcggcgccatgtaggagatcgtgcccttgatctcgccgcggccgtcatcgggatcgatcagcacctcgtcattgaggcggacgcgcctcaagtcctgccggtagatcgacagatcgacccagatggtggagaggtccgcgacgacgaaggccggcttctgctcggaggcatactcgccgagcgagatctgccgttcgatgatcgtgccggcgatcggcgccttcagctcgtagacggtgaggctctggttgctctcgatcgcggcgagcagatcgtccttggcgaccctgtcgccgatgcgcttcaggatggatttgaccacgcccggaaagcgcggggtcacctgcaccacggcttcctggttggcgcgcaggatgccattgaaagcgagggtgtcggtcagcgtggcgccggcggcttcggccagcgtgacgcctgcggctgcaagcttgacgtcggagatgcggatgcggtcggcgccgtgctcgtcctgctcgacacggtcgttcggttgcttgtgttcggaatgttcggccggttcggtgtgagcgagcttgcccggtgcgagcagggaatagccgtaagcgccgagtgcggccgcaacgatggcaacgacgatggtcgagaacgtcctcatcgtgcgctctcccgcgccagcgtgaatggattgccgacgaggccctcgatgatcgcaacgccggcatggaaattctgcagcgcctcctgctcgcgcagccgggcctgggtgacgctggcctgggcgtcgagcacctcgagcagggtgaagcggccctggccgtagccttgcgagatcgcctcggaggcttcgaccgccttgggaatggcggtctcgcgcagcaccgcgagctcgcgcagcgagccgtgaagcgagtcataggcgcggccggcgatcacgatcagcgtgttgcgattggcctcgcgctcggccctggtcttggcgaggctttcctgtgccgaaaggatgttgccctggttctggtcgaacacggggatcggcaccgagagtgtcagccgcgctgcatcgtcgcccgtttcgtggaagtggcgccagccggccccgatgcgcacgtccggatagggcctgaggcgcgccagcagcagctcggcattgcgctgtgcgtaaaccgcggtccagcgcaccagctgcgggttggcgtcgatggcggcgatcaccgcctggaacgcgggcggccgtccggtggtgtcgagtcggccggagacctcgccgaacttggcggcgggatcgcccatcagcaccgcaagctcgcgccgggcgctggccagactcgccttgaagcgctcgcgatcggccttcacgagggcggaggcgacctcggcgcgcccggtctcggccggcgaggaggcgccggcctcgacgcggcggcgcagcagcggcgtcagccggtcgattgcggcaatctgctcatcgaggatctggatgcgccgctgtgcgccaagcacgctgaggaaggcgatcgcggtctccgacagcacctccagccggatcgccttgcgctgtatcgcggcgacctcgacgccagctactccggccgcaatccgcgcttcgcgcttgccgaacagctcgaaagcctggctgatctgcagtgtggtctccgccgaccgcgttccgcgatacctgccggagccgaatgaatcgtcctgttcataggacagttccggattgagcagggcaccggcctggatgcgctggccggtggcaatgccgatgtcgcgctcagccgcggtcagccgcgggctcgcggccagcgcgcgcgacagcgcgctgcgcatcgtcaaagtctgggcgtgagacggtgcaagtgccgatccaacgatcagacacgccgccgcgagcgccacgcgcgcggccattcccctgcgaaacatgaaaccgacctgtgaaggatgaacctaatgggcgcggaacgcccgaccaatccgttcaggcaatctgcttgggagggggagagtcggtatcggggatgatgccggccagccgggatgcatgttgcgggcgagttgccgacacaagcagcgtcgatgtggtcggtggcaccggctgtgttaccgccagggagaagcagccatggcaatgatgtccgccgatggccttgtgatcgctgccgcccgtggcgtcatctaggaccgccgcgatctccgaaccgccccccggcgtggtgacgtcgatgtcgtgtgcgccatgcagcgcccctgcgagcagatagacaaccgcgatcagcacggagagcaatccgcgccaggtgcgcggacggcaagttcctgagggctggcggttcgcgcgcacgacgtcactctggttgcggtcttggcacgacgtagcataacggcgggaacagtgtcgacccgcaacattgttacgtcccagggacaattgccgcagcgcatattggcgccctgtctctcactggcgggcaatgacgcgccgctgtgagggcatggcatccgtgacttcggtggcgaccggctcggctacggcgccgccatcgtctgccggcacggtaatgacggcgcgacagctcgcctccatggcccgttcgagccatttgatcgcttcgtcgatccattgatcgtggtgctcgggatcggcaatggccttctcccggaatgcattcgcctggtgcaggcacgccgttctgcgatccacgcgcctctcctgatctgaggttccaccccgatcgcatctttgatgatcacggccccgccgtcgttaacataggacaggtcgaggcggacgcagcacggaaaggccccagccggtctgaccggctgaggccttcgtgctcacaatctctatcctcgggactcgagcaggtaaccctcatcccgccacttcgttcccgccgatatgtccaatttggaacgttcctcttacctcgcgattagcgaccagaagaaactgaggaggatggactatggacggactgatttatctgatcggcttgatcgtcgtcatcatggcgatcctgtcattcttcggcctgcgctgagagcgccgcgatgacggttgaaactctcatgcgcgaagagatcatggaaggcggcctggtgagtgagacgcctcgtgcaatccagtggagttcggtcttcgctggtgctctcgcggctggcgctatgtccttcatcctgatcggcttcggagtggccgtcggcctgggtgtcagttcggcctcgccgacatggcgcgacgcctcggccgcgctcgcgttgctctccggactgtatctgatcattcaggcgatcgtcagcttcggcttcggcggttacatcgctggccggacgacccgtccggcgcccgcgctcgcaacgatcgaagacgatggcgagcggcgagacggcctgcacgggctgaccgcctgggccctggcggtgctggctggcgccgctctgctcgctcttctcggggccgccgcgatcgaccgttcgccgatgcgcagctcagcgagcaacgcttccgcggccgagcctttgttgagctatgagctcgacaagctgttccgcgccccgcgtcgcgccccaaacctcgatctcagggacgcgcgggcggaagcgggacgcattctgatgacgtcgtcaagccacagcggcgtgagcgccgatgaccgcacctaccttgtgcaacaggtcgcagctgcgacgggactggcggccccggacgccgagcggcgggtcgatgcggtgatcgcagactccaggaccgccatcaaccgtgcacggcgcaattcgatcatcgtggcgttctcgatcgcagccgcgacccttatcggtgccgcggtcgcctgggctgcagccgtcgccggcggacggcatcgtgatggagacccgctgccgaactggatggcgagctccaatcgcttccaccgcaatccgcgggcgatgccggtgccgtaagctccaacacaaatggccgggcccagcccggccataaggttgcggggaagcttcaggcccgctcctcccagatcatcgccagatgcacgatggtctgcaccgccttttccatgtcctgccggctgacccattcgagccgcgaatgaaacgcatgctcgccggcgaaaatgttggggcagggcaggcccatgaaggacagccgcgagccgtcggtaccgccgcggatcgctgtgcgcatcgggcgcaggccggcgcggcggatggcttcgatggcgtattcgagaacgtgcgggtgacggtcgatcacctgcttcatgttgcggtactgctccttgacctcgaacttgtaggtcgagcgcggataatccttcatcacgtccttgacgatggtctcgagcaggacctccttctccttgagaccttcctcggtgaagtcgcgcacgatgaaggagagcgtcgcctgttcgagcgcgccctcgatgccgatggggtgcagaaagccctgcttgcccgaggtcgtctccggcgagcagccttccttcggcaggcgttcgatgatggccgccgcgatcttgattgcgtgctccatcttgcctttggcgtagccgggatgggcgctgacgccattgatggtgatggtggcgccgtcggccgagaaggtctcgtcctcgacgcagcccgcactctcgccgtccatggtgtaaccgaaatcggcgcccagcttcttcaggtcgacattgtcgacgccgcggccgatctcctcgtccggcgtgaacaggatcttgatggtgccgtgcttcacgtcgggattgttgatgaagaaatgcgcggcatccatgatctcggcgacgccggccttgttgtcggcccccaaaagcgtcgtgccgtcggtggtgatgatgtcgttgccgatctggttcttcagtgcggggtgctcggcgaagcggatcacctggctgctgtcccccggcagcgtgatgtcgccgccgcgataattcttcacgacctgcggcttgacgtccttgccggtgacatccggcgaagtgtccatgtgcgagcagaagcagatcaccggcaccttcttgtcggtgttcgccgggatcgttgcgtagacatagccgtattcgtcgagatgcgcgtcctcaacgcccatggccttcagctcggcagcgagcacgcggccgagatccttctgtttctcggtggatggcgaggtgggggattccggatcggactgggtatcgatggtgacgtagcgcaggaagcgctcggtcacggtgtgcgtaaaggagagggaggacatttctggtcaaccgccgggtctttggggaagctggcggtatatcagaaaagcgagccggatgcggccggacggaggtttgatcagccttaacgaagtgtaagcggtcagatcgcctctttcagctccttgaccggacgaaaggcgaccttcctggttgccttgatgtggatcgcttcgccggtggcaggattgcggccggtgcgggcggcgcgcttgcggacctggaagatgccgaggccgacgatgcggacccggtcgcccttcttgaggtgcttcacgatcagctcgaccatgtccgtcagcacggcctcggcgtgctttttcgacaggtcccggcgctccgcgatgtcagcggcgagctgcttgagcgtgacggtggcaggcgcggctgtcttctttgccgaatccttcttggccatgactgcctcctcaatccaatggcagggaagccccggaaaagccggaacgcgtggggagacccattaagtcctggaaggggtagacgattccagcgcgagctgactatgccgagagttcccgcttggcaccgcaatgacgcgcgaagatgcatgcgcgccgaagaaatcaggctaagactatgatgggattgccaaaatggcgcgagagacggggctcgaacccgcgacctccggcgtgacaggccgatagttcatctttgcgatcaaggagctctgacagtccgcgcctcaaatcgcggctgaaaaaccatgccaagtgtcaggagaagacaatgatagaaagcaccgtctacgaccccaccaccttcctgccgccgaacccagaggcggtctatccgctcgattgcgagtctcgccgaacggaggacaagacccgccagatgcagctcacggtgctgatggcctgccagaagaacgggacgcgggccggcttccttgagcggcagatcgggatcgtcaagtcgcaccgctacggtgtggctgccaagcgcgaggtggtgtcgtgagcgaacagacccgatcacttgcccaatgtgctgaacagccggaggctactgaaccgatgggcatctgcgattgcggttttactgccgatgagtgcggcacaaatcattgcatgcgcaagaagatacatttggccggcatgacgccgggcagcaagtggccggaaggagcacccatcagtaaggatttcaagacaaccggggacgggaccggaaacggccgcaccaccaaacctgaattgacaggttcacccagcgggacgccgcaaggggccggtaatttttcagagcgatgggagatcggcaagaacggctgggatgcctccgacgaagccacgcgggaggacatctaaatggatagcgttctttccaacgaagtcgcgcgacgtatcgccgctgatctcgcaaccctagtctctgaggcggaaaagcacggcactctgcctcgcattaaatcggtagcgttctacttcaacgaaacggaattgcggaccatcatcaaattgctgcggtcgtgtcatggcatcctcgatcctgcccaaacagcccctcgcactccggcaggaggcggagacccggaactaatgatcgttggagacaacgattccgctggcgtcgtgccctatagcgcaaacgaggctttggcagagattgatcggctccgcgaagaactgtctcaggcccgcgcactggtcgaggaattgaagagcaaactcgccggcagcttcacgcatgatcagtaccatgccgggcttgattgtatccgcaaggagcgtgaccgggctctgaatcaggtcgaggaactgacggccaccattaagcggatcgacgcgatcaacgacaatccggcctgcttcaacgtcgagatcgatcaagtctgccgtccgttcacatcgactgtgggagagccaaaatgatcgagcattgcccatgctgcggcgccggccgcaaaaggtatacggcgccagatgataatttctacgaaacttggacattctactgcgacggcgagatcatgcggtgggatagcggaaagttcaccgctaacgagccttgcgggaatgcaatgcgtaatgccgtaaaacgtcttaacgacgcaacgccgcacgctccgcatgtgaaacagcccgaatgagggtctattacaacgaaatcgatcacttcaattgcgattggctgcagaagcttatggaccgcggactgatgggtccaggctgcttcgcatcaaccggaggtacgagatgacgctgagtggagatgaagcctactacgccaagcagacatacgatcgaatccaggaccgctggagcgattgcttggcgacgatcaattccgtcagcgccaacccggcgcggtccggacagcatctcgacatccgaattgtcgggcccggatgttctatcactctgcttagcctggacgacttgcgtgatctcatcgcgcgggctcgatcagccccgctcacatgaaagttgagcataggagagagacgatgagaaagccagacattcgttgcgtaaccagcgtggtcaaggacgcggctgagtgccaggcaggcttgccggacggccgctgggtgccggctcgatcctacggctggaatcaactgcggttcttcggccgcttcatggccgcgtggcttgtcttcactggccgcgctgacgccgtcacttacccaggccaataggagccgcaacatgcaaaaactcgatccggaagacattcgagacgagatgcgggagatgggccaacaagcagatcctacccgcgagatgctacgccgcatggtggcggagttctgtgactatcactacggcacctgcccggcggatattggcagcggcgagtgcaattgctttgctggtgccctactgatccaggctagggctacgctctcgaatggagagcgcgatgccggctgatcacatcaacattcagcacccggagaagcgcggcgtcgagagccgctactatcgcgaccagctcgaaaacgaaaagctccgcgtcgaactgaagcagctccgcgcctggtacgacacggtcagcaaggatctcgaatcgatcttcaaccggattgaggacgggaagtcggcagagctgcactaccctgacggccgggtgttcatcattaccggaacaccaagaagctcttgagcagaatgaggaatcacgaaatggccgtaactaaagaaaaggatcggatgacgatccgccagcaggttgaaatcacctttccggcggaagacgtcgagcacatcatccgctgctgggtggatcacaacatggccgcccatgtgccaaagcctaaggacctcagcaagatcgaagtgcggttctctaccggcgaggatacggtatacagtgcgcgcgtgacctatgagccggtcgagcacactgccgcacctaaatagaaagcgagaagatgcccgacaaactgagcgtcaaaaagtcctacagagacggctgcgttgcgctgcgcttctcggtgaagggaggctacagtctcaaggtggaaggcggcactgatctgaccaccgcagatgcgcgagctttggcgaaagcgatgattgaggaggctgaccgcgtggatgcacgccaagccgcaaaaagagcagccgaggagcgccgtcagaaatggcgagaacgggagatcgccgccggccggttgaaggtgatgcccttgacttcactattcaggcaatgacgcacctaagccaggggagacatgccatgccgctgatctatgagggcatcgattacagcgcctgccggcgcggccatgaggagttcgagatggaggacggggaaacactactctggccccgctgcgagatcacgggttgcgaggccatgatttgcgtgggcatgagcaagagcctctgctacccgcacggcattgagttcggcgccttcaccaaggaacagttcgaggccgaccgcgcagccagaagcaccccctgagggtacgtccgcccattaaccctctttaggggctaggcgggaggggcaacgtggggtagtggtgaagtcatgcaaacgcttgcgttcaaggctaaacgccgcctcaactggtacaagaaccgcttccgggtcaataaccctgtcgtcggtcgcgcggtagaattactcggaaaccgagtccgcttggatgggcttacctattcgcttgacacgccacagatcagccgcgggcacaaaagcacgattgcctttggccttcatgagattgaggagcgacatctggtgagccgatggttgccatcgcatctccccgtcttggaatttgggggtggccttggcgtcgtttcctgcctcaccaatcgcaagctagatcggccagagcgccatgtcgtggtggaggccaacccagcgatgatcccgatcctaaccgagaatagagacttgaatcgctgtaagttctcgatcgtcaacaaggctatcgcctacgactgcgaggcaattgacctcaatgtggatgaagagttcgttggcagcaccgccaaggccgccagctttggccgaaccacccgcgtctctgccgcaaccgttaagcaaatcatggacgaggctgggtttgagcgcgccggcctcgtctgcgatatcgagggtatagagatcgacattatcgatcgggaagcagaccttctagccagccgcatagagttcattgtggcggagatgcaccccgcaatttcgggagaagcggatgttgtccgcgctatcgccaagcttgaagctgtcggcttcactctcaaggaaactctcggaacgtgcgtctacatgcagaaacccgtcagttcgtaacgacgaggctcttccttttcaaccccctattcctcaggcttgcgtacagccacgcgttgtcaagcccagaccactcgacgtcgcccactgcattgccgtagctgtccgggcttgtgtggccccatcgtgcattcgtctgaatgtaatcagccggcagatccgcgccagcagtcgagtcgaatgcatcgaagaaaccgcgcagcttttgcgcccaagccgtgcttcgctttaccgcagtaaggaagttctgctgatccgtagacccgcttatggccctgtcccatcctccttcatacatgatggtggttttgccgcgcgagacaagtccagaggcgtaagcaggcaggagcacatcgcgatagcgatatacggtctcgtttccacttgtgcccgtgttctcaaacccggcaacgtatgaagcgcaatccgcttcctgtgccacgggatcgcctgcgtgagatacccaacttgcaacgatggttgccagattggtgctttcccaagtcccgccgatgacgaagtaagccgcccatgcaaaataatcgtgcaaggagatcggtgtaaccccgcccgcattgagtgggtcggtcaagacatagcttgtgccgtccatccttgcggtgttgagcccagacacccccaccgtaccctggccggcaagaacgaatttgagacggctacgcgggaagttctggctggcaccaagaatgtccgtaagcgaagcttttgtcccatttgat

SEQ ID NO: 285 - DNA, 1430 bp, Bradyrhizobium colbertium
cggcagcgtctcgataccttttacgaaactcgaatagacccgcgcgggttcgccgaccacatcaatatggtcgaaacgcttgagaatctcttcccaaataatcttgagctggagctcggcaagcctgaggcccacgcagcggtggatgccgaagccgaaggagaggtgcgtgcgcggccgcgggcggtcgatgatgaattcgttcggcttctcgaacatctcctcgtcccggttgccggagacgtaccacatcacgacccggtcgcccttcctgatgtgcttgcccccgatttccgtgtcctgcaacgcggtgcgccgcatatgtgccagcggcgtctgccatcggatcacctcgggcaccatggaatcgatcagcgccgggttggcgcgcagtttgtcgtattgctcagggttctcgttcagcgccagcaccgaaccggtcatggtgttgcgcgtggtgtcgttgccgccgacgatgagcaggatgatgttgcccatgagattgtcgggatccatgtggcgcgtcgcctcgttgtgcgccatcagcgacaagagatcgttgcgcggcgcggaattgacgcgctcgttccagagcttggacatgtaggcgtagcactcgtccatctcgcggcggcgctcttcggcgctggcgacgatgccgctttttggcagcgcggtcgagacatccgaccagcgcgtcagcttgcgccgctcttcccatgggaagtcgaacagggtcgccagcatctgcgtcgtcagctcgatcgagacgcgctcgacgaaattgaaggtctcgttgcgcggcagattgtcgagcactgtctgcgagcgctgccggatcagcttggcgagttcgtcgagatgctgcggggtgaacatcggcgagacggtcttgcgctgtgccgaatgcttgggctggtccatcgcgatgaagctaggatagtcgtagccttccggcacgtcgcggatcgagatgccgccgagcttcgaatccgaggagaagatgccgtggttggtgtcgacatgcatgatgtcgttgtatttcaccacggaccagtagggctcgatgggcgcgttcgtgcagtaatgcaccggctcttccttgcgcagccgctcgaaccacggccacagcgtgtcgtcctggaacagccggggcgcgccggggtggaattgcgacaacggcgtcgcataggcttcctcgcgcgccctgcgcaggcgttcggccttgtgcactttgatcggcgcttggatgttcatgctcatggctccagttggttctcttcttcgccaggcgagggggctctccgcgaccgtgtctcagcggtttcgcggagagagcccttaccccgaccctctccctgcaagaacgggaggggagattgctatgccgcgatcttcaccggcagcgtctcgataccttttacgaaact

SEQ ID NO: 286 - DNA, 4245 bp, Bradyrhizobium colbertium
ggaaatctcgaaagtcggcgatccacttcggacaggatacgctcgagcgagcgaccatccagcacaccccactcccgcgagcgtaaacgctgccgcgcggacagtcgcgcgtaggtttcgtcatcgctggccatcgccatcagcacgcgctcgacggcgctcatgtcgcgcagttcgacgaccccagatacaccttcgtatgtagagagattgaatttgtacatgtcgtagtttacgacaggcttgctgcaggcaattgcccagcgcgttgtgctggaaaacgccgtcaccagcacatcgtggcgaggaatcaactcaagaacccattgatcagaaaacacggcttcttgcttgagccagacctctcgatcctgcggcgtagtcgccggatggagtgacactgtcacatcagcccgaccatcgcacttagccgcggcaacgagcctctccacgctctcctggtacgttgcgaattcggcaacgtgactatggctgttgtgatagctcggaggtggtgcgatcaggaccttaaacctttcggcatcaacgcgccccccagtcgcagcggaatttgcgagtgccacatcactggccagcacagccgcgaccgtatcagcgtagaggctacccgtcataactagcttcgttagtggcactccctcgcggagataaattcgcttcattgcttccgactcgaccagcaaagcgtcggccgccccgccatgaacgacccacggctgatcgatatctaatccaactgcaacacgcgccagaatgaactcagcgggcatcatcgtgatgtcgccctgatccaccgttctgatccaatgcccggcgtggcgacgcaagttggtgcccaccgaggacactggcactatgttgaggttgccctctcgagctttgtcccgaacaaaattgtcgtagtcccggctctctcctatgccgaagggcatatcaagaaccgggagttgtctttgcttcgccgccgcgatcaggggaccgcacccgcccggaccgtcttcgcagacgatcagcatcctggctaaaacgtcatcgagcagttttccagccgccccaagctgacggaacagcatcgcccggtaagaaagctcctcctcggtagggatccaggaagtaagcgcgtgcagattggtaagttctaaagtcggcaatatgaagtcattcacaacggcagagaaatctgcgaacttgagcccgtcagcctctgctcgttccctgatcgctacgttgacaacagcttggtcattgaagctcactatcatggtctcgtcgccgcgcttctccatcgccttagccgcggcttcgaggatcttgacttgcgacagtgaataagcggcgagaacgatcatggcagctactcctagctcggcgagccgccccgaaaggcaccacaggcagctcaagcacggttccgcagcgtgaatctctttttagtgatacaactttcgccgctcgtctcgagcagtactggtgttgtattcgttgcgactaagggcgaacgtacacgctgagttcgcaaggaggcaagctgtgataagagttcttctctcggcgcgcgatgccgccgcggcccaccacgttgccgagatgctcagactgggagcacgccctggctggcaggtagtattggtagcgcaagcacccgctcttcaaatattgcagcagcgaggccatgactgcattgaggttccgctatctgccgcaagaattggtgatgaggtaagcgccgcaagattgcggtcatttgcggacatgctgttggaaagagagaaacctgatgtgataatagcagggctatcctctccgggggacggagggattgacgaagcgctgctggccatgcgtaaggtccccgccctgttgatgcaggatttttggggagaacagaacgtcttcttcggtcgcggtgcggacagctttctagcactcgatgaattcgcggtgactttaaacgacgctcgctatggcaaaccaagcttcgtggtcggatcacctcgccacgcaagtctggccgaactcgatgttaccagaacccgaagcaagattagacagaatctacaaacgaaacccgagcacaccgttgtgggctggtttggccaatcgttgcatcacctgccgggctataggaaatcgataagagaatggattgctgccttggctgcacttggggaaattcaggtgctctacaagccgcaccctcgcgaaagcgacaatgctcgtcaagaaacgtccgcgctgttgacgagctatgggctgacccaccacatcctgtcggactggagcatcgaatgcgcgctcctcgcttgcgacgtcgcctcgagcattttgtcgaattgcctatatgatgccgcttacctgaatcacttctccccggaacctctggcagctccggtggcatggctagtcgaacctgatattcaggagttcttcgatgccgtagtgccagcgaaacaactgccttatgccaatgcgggattagctctactgctgtacgacacgcgcaacgttgccgaaattatagaccaggcccgaaaagcgcccgaaagaacagcgctttggcgcgcagcgcagcagaacctggttgatccgctacaagcgaatgatctggttgcatcagcaattctttctacactcgggtaacggccgaactcggggcttgttcttggccatcaaggtcaagtgcaaacgatctacgacgcgagcgatgctggatagctcacgatgttgaactcacgatccgatctggtcagagcgaatgacatgcgcgagcagcagccctgttcgcccttcatttgttgatttgcgccccaagaacgactgccacattgatgtcggacgatcctgctcggcggcaaagggcatctgagcttaacctagagcgtttcacatttcgactgaagcataaccggctttggcgaattagttggcgcattcgcgaggctggatgttctggacgaggtgatcgatgtggcgccaagtatcctcgatggtgcgcttctgagcttgccgcatccagtgtttgatattggagaaggcctgttcgatcggtaagcatccggtgaggaccgcgtagcggtcactcaggctgcttggttgacttgcttatttcggtcgcgccaattccagggcaaaagttcgtcgagccgttgtacgggatgtgcagcgatgcgtgccaggacgtcggcgagccaagcttgtggatccacgccgccgcggtcggagccacagaacagcgaagacttccgccccagggcgatgccgcgcaggctcgctcggcggcgttgttctacaggcagatgcggccatcgtcgaggaagcgggtaaacgcatcccagcgcttgagcatgcagtccatcgccttggcaacgtcgttgcgccgggatagcttggcgcgttgttcacgcatccagactttcagatcggcaatcagcggcgcgctcagctcctggcggacggcccggcgccgttcgggcgtctcgccgttgatgcctcgctcgatctcgaacaaggcgtcgatccgacggactgcttccagtgccagaggcgagatcaccgctggctttttgccttgtaccttgcggcgcgcattctccgccagatcagccatcacgaagaacggtcgtcgggcatggacccaacacgccgcttccaggatcggacctgcgttgcggcccacctcgtaaagcttgccatagccgccataggcatcggcctggaagatgccgttgtagccggccagatgggcctggggatgctcgccggcgcgatcgcgcgagtaataaaacactgctcccagcggggcctgcccgccaaaaggcttgtcgtcgcgtacatagacccagatgcggccggtgtcggtcttgcctttggccaggaccggcaccgtcgtgtcatccccgtgcaatcgctcggcactcagcacatgggcctcgaggcgccggaacaagggcgtcagcgcaacagtgcagccaccaacctggtcggcgagggtcgacaggctgatcggcacgccttccttgccatagcgttcggcctgacggttcagcggctggtgctggccgaacttctcgaacagcaccatcgccagtaagctggggctggcccaaccacgggcgatgacgtggaacggcgccggggactggctgatcttctcgcaatcacggcagctgaacttctcccggacgtgctggatcaccgtaagcgacgtctacgtcccattcgcaa

SEQ ID NO: 287 - DNA, 2702 bp, Bradyrhizobium colbertium
aggattgaggccggacagtctctatctcagcaccggcggcggctgggcgccggcaactgtcgtggcgatccagcaactggccgcgccgcgggataagcagcttgttgccgcgactgacaataacaagcagggcgacgtttacgctggccgtcttgaagcgatcgcgttggaggtgggatgcgcgttcgagcggcttcggccgctggccgacgattggaacgagggcctgcgcgcagttcatgctgagtgcggatcgtcttgaaagtctgacggcatcatgcgtcgcctcaactacccattgtgaacatcgtgcgctccgatctatcagtgccgtcccacgcttgttcgactgcggcgagcgggaccgtcttcgtcgcgatgccggcgggaccaaccgccttgagcagtgatgcgatcgcggccacgaggctctcccgggtgatgctgccgataccgcttcccatcagcgcgatcgccgacgaacgcagcgcgatgcttggccgcgtgatatccgccccgctgacggagccgacctggacgaaccgaatcggggcggcttccgctccggctttgacacttgcgatcagacgacgctcggcgctcttgccccagagataatcgatgacgacggagacgtcgctgccaaactgctctttgaagagctcctccaatttgctctcgtcctctccgagcgcaatcgtgacgtccgcgccaagcgcggcaaccggtcgcaatgaccttccctgcgccgaggtgcttggcgagctggaccgcgagctggcggcagtgccggtcgcgccgttcaccagcaccgtctctgcacccttgaggtgggcgcgctctgtataggccggcccaggacgacaggcccggattggcgattgcggctgcggtcgcatcatcaagaccatcggggatcgcaaggcagtgcgccgatggcgcgacggtctggtcggccatgccgccgtagggcgcgcgcggcagcacaaaatacaaccccgctggctgtcgtcgagccgatccacgccgtcgatgccagcgacgaacggaaattgtcccgacgaactgtaatgcgtgcccgaggcacggctcttggtgacctggatcagcgcggccgcagagaccgtgatgcacttctcgttggaggatgcagtgccgccaagaaagagcgttcaaaatacccatatagttgatcagctccgccagctccatggtgcggttctcgacatcgtagccgtcatgaaccgaccgcagcgcgacgacctgctgatcaaagcggccggaataccgctcgatcgcgcaccgtttccgctgcttgtcggcgtcgagcgcttcggcccgattggcgtggtcgagatcgcggaccatgtcggtcgcgactacacgaccgtcagccggcaggttgcaaagcttgaaagcctcggcttggtcgaacgccggggcagcgccgtcgacggccgcgcccgtgaggctgtcatcaccgccaggggtgaggcgatgaccgaccgggccgacgccgcccgcgagaagatcgaacgcgccatcttcgagacctggaatccgcgtgacgttgacgaactcgtccgtctgatgcggaaatttgcggatgcgatcgtcagcgagccgcccacgaattgaggcaagaagaggcgaggggaggaggaaatcgatgcgaacccgctgccgcatgcccggccggacgcgtcaagggtgaagcttcgcccgcgtcccgcggcccttgacccgccggaccggagaggcggccgccaggaaggtgtgacgaaggactgaagtgatgagggattcaggtggatcacttgcgcttcagtccggccaggccaagaggagccgccgatgcacaccaaacccgctatccgcaaagtcttcgaaggcgtcgcaccgcgccacgatatgtaccgtatgttcaaccgccatcgcggagatcctgcccattccgcaggcgatgcctcgcatctgtttgccggcgagtggttcgaaatcgctgagagcgagtatgactatatgctggaaatcctgccgccgctgtggatgcgcggcgagacgttcgcgatgcgcgaattcatgacggacaacgtcacaagcgtcttctccgcgctgatcatcgatggccgcaaacgcttcttccacgcctattgcgacctctcggacaagggctcacccgatcgcatgcgggctgcaattatcgaccgagagtcgcggccggtaaaggcgatgacgcgtgaggagcgcctcgagcacatctggtcgagcacccatgacgactatcgcggctacgccggcgagcgctgggcggggcatttgcgcgacgtgcgaacggtgctgtcctatgacggttcgcgcggaacggtgctgaagctgctcgaccgactgaccggcgcggaaatcgcggcgaagctgcccgtgcatctgcgccatctgcctgacgctatcgcggcataagggagactcacgtgtttacatttcccatcccgtccgtccgcgcggtgatcgagcgcgggaaaaccgatgccactgccaatggcggattccgcaatccttactacggccagcggcccggcgagggcgagaaacctggtctttggctggtgggcgataacggcgtctacatcatgtcgaacggcaagctcgccgagggtacccgcccgcttgttgtctattccgaggaatgccatcccgtcggc

SEQ ID NO: 288 - DNA, 143298 bp, Bradyrhizobium colbertium
  misc_feature (59942)..(59951): n is a, c, g, or t
  misc_feature (110668)..(110677): n is a, c, g, or t
ggtgtccactcattcggaggaagttcaatccgtccctcggacacgtaattgggattataggccatggtccaggggtagttctgcgggtcgttgaagcgcgcggcacccgtcgaggcgaggagctgcgggatcttcttgccgttgaggtatttctgcacggcggcgttcgcggcagttccgatcagctggaaagtgaacaggacctcgtcgccttcgaccagcttgcggacctgctcgaccgtcttcggcggcgaataggcgtcgtcatattggatcaggttgatcttgcggccgttgatgccgccctgatcgttgatcatcttgaagtaggcggcctgggtcttgccgatgttggcatagaccgaataggcgccggagaacggcacagtctggccgatcttgatctccgtgtcggttgcgccggtgtcgtatttcttctgggcgagggcctggctggtggagaccgcgacggcgagcgccgctgcggcagctatgaaggctctgcgattgttcatgttgggtcgttcctcctgacggaattatcggccgacggtctttctccgttgattgcaacggtcgccatcgctgccgaagattgtggaggaaggtttgccgctacgcaaggatggcggcgctgcgccgtagcgtctcaggcgagaaacaatgcgaccagggcgacggccgcgggcagcgcctgcacgatcagaatccgcgtgctgacggtcgcggcgccataagcaccggccacgatcacgcaaagcaggaagaagaccttgatctggaatgcgaaggtcgggttgccctgcgcaagcccccagatcaggccggcggcgaggaagccgttatagaggccctgattggcggccagcaccttcgtgatctcggccttctccggcgtgttgcgaaacaccttgaggccctgcggcctgtcccagagaaacatctccaggatcaggaagaagacgtgcagtgccgcgaccagcgccaccaggacattggcgatcaggttcaagttgacctcccctgaagcgtcagctttcgggtggacgttagcacggccggcatggcaagtgcgacgggtgtgtttcgatgcctggtgccgcgatgcccgctcgttcaaccaactcgcccgaccgcttcggcctcgatcgcgtgacgacgccgatcggtaccgcgctgctcgtcaccgatgccgaaggcgtgttgcgcgcgctcgactgggaagactacgagcagcgcatgcgtgaactgttgcgcctccactacggcacggtggatctgcgcgagcagcctgcgccgacggcgatgcggattgcgctggagcgctatttcgacggcgatctcggtcagatcgcaggcattgcgtggcgcatcgccggcacgccgttccagcagaaggtctggactgcgctcgcgcagattcctgccggcaccaccatgagctatggcgcgctcgcggcaaagatcgccatgcccagggcgatccgcgccgttggtcatgccaacggctcaaatccgatcagcgtggtgctgccctgccatcgcttgatcggtgcgaacggttcgttggtgaagtacggcggcggactggagcgcaagcgctggctgttgcggcatgagggcgtggaggtttaggtctcccccatcgtcttccggggcgcgcgaggcgcgagcccggatcatctatccgcgtaaccgttggctcaatggataccgggttcgccgctatcgcggcgccccggaatgacgagaggcctcacgccgccggctgaaccgccttgtcgctagccatcacatgagtcagcgcgctcttgatcgcggcctgccgcgtcggcgcgttgatctgcgcgcccaggaggtcggtgacgtagaacacgtcgcgcgcgcgctcgccgaaggtcgcgacatgggccgacgcaatattgaggtttagcttggagatcgccgtggtcagctcgtagagcaggccgggccggtcgaggccggagacctcgaccacggtgtagcggtcggaccattggttgttgatggtcacttccggctcgatcacgaacggcctcgccttgctgcgcacggtgcgccgcgcgacggcttcgggcaggcgcaacttgccctccagcacgtcctcgatcatctcgccgatgcgcgtggcgcgccttccctcgtcctcgtcgcgatcgtattcccgggagatcgagatcgtgtcgagcgcgcggccgtcggtcgtggtgtagatctgggcgtccacgatgttggcgccggccgaggcacaggcgccggcgatgatcgacagcagccagggatggtcggcggcgaagatcgtcagctcggtgacgccgcgcacctcgtcgaagccgacattgatcgcgagcttgtggccggcctgctcgctggagcggacgaagcgggcgtggcggatcttgcgcggcagctcgaccttgagccaataggccggatagtgccgtccgatataggcatcgagctcttccgccggccattcggcaaaggcgttgcggaattcggcataggcggccgtgaggcgcttgccgcgatcgacttccgagaagccgcccgtgagcaccggctcggtttcataatagagcgagcgcagaagctgcgccttccagccgttccacacgcctgggccgacaccccggatgtcggccgtggtcaggatggtcaggagcttcatctgctcgaccgactgcaccacggcggcgaaattctcgatggtcttgcggtccgaaagatcgcgcgactgcgcgaccgtggacatcgtcagatgctcctcgatcagccaggccacgagctcggtgtcggccggactgaagccgagccgcgggcacagccggcgggccaccttggcgccagcgatcgagtgatcctcgggcctgcccttggcgacgtcgtgcagcaaggtcgcgatgtagatcacggcgcggtgctcgggccggatcttgcggaagaggtcgctggcgagcgcgaactcctcgatgccgccgcgctcgatgtcctgcaggaagccgatgcagcggatcaggtgctcgtcgacggtgtagtgatgatacatgttgaattgcatcatcgagacgatcttgccgaaggcgcggatgaagtggccgagcacgccggtctcgttcatccgccgcagcacgatctccgcgttgtccgaggtcaggatctccatgaacagccggttggcctcgggattctcgcgaagctgggcgttgatcaggccgagcgagcgcgtcacgtcgcgcatggcatccgggtggaaggcgaggttgttcttttgcgccaagcggaagatgcggatcagattgaccggatcgtgcttgaagatgtcgggcgcggcgacgttgatgcggttgttgtcgacgatgaagtcgtcgctgtcggggacgcgccgcttcacggtgctggggcgcagccgcgccatcatccggctcagcaccggcgcaggcttggcctgctggtcctcgagcttggcgcagaggatggcggtgaggttgccgacctccttggccaccaggaagtagtgcttcatgaagcgctcgacgtcctgcatcccgggatgcgaggtgtagccgaggcgcaccgcgatctcgcgctggaggtcgaaggagaggcgctcttcggcgcggttgcaatggaaatgcagattgcagcgcaccgaccagaggaaatccgcgcagcgacggaaggagcgatattcctgcgcatcgaacacgccgcgcacgaccagctcgttcgtatcgcggacgcggtagacgtacttggcgatccagaacagcgtgtgcaggtcgcgcaaaccccccttgccgtccttgacattgggctcgaccagatagcgtgactggccgccgcggcggtgccgctcttcgcgctcggcgagctttgcggtgacgaattcagacgcggtgccctgcacgacctccttgtcgaaacgctcgaccagctcgtcatagagcggcttgtcgccggtgaggaagcgcgtctccaggatcgcggtgcggatcgtcatgtcgccgcgcgcctgccggatcgattcatcgaccgagcgcgtggcgtgtccgaccttcagccccatgtcccagagacaatagagaatcgcttcggcgacctgctcgccccaggcggtctgcttgtagggcaggatgaagagcagatcgatgtccgattccggcgccatcaggccgcggccgtagccgccggtcgccaccaccgccatgcgctcggcgccgctcgggatcggcgagcggtacagatggcgcgtcgcggcagagtacaggatacggatgatctcgtcctgcacgtggcacagccgctcggcgcagcggcggccgtggcggtccttcaggaggatcgcctgtgcggcggcgcgcgcggcgatcagctccgccttgagcagttgcgccatcgccgtgcggaacgcgtcctcgcgtccctgatgcttttcggcaagcgcatcgaccgcggcggtgatccgcgcggtatcgaagcgatcgtccgccccggccttctgctcagtcgcgatgctgtccatgtctctccggatataagaggtgaaaggcgctgtcacccgccaatctctggcaatagtcgttccatgctggaaacgcgcggcttcgggcaaatctgtcctcagctcgggtactttggagggacagatttctcattgacctctagatgtaactcattgaaaaacaatgaagttttggaggaggctgagcgtgaccaggattacacgacgcattctgttggcaggcgcggtggcgctcgccgtgacccccgcggcacgggcggcggatccgctcaaggagatccgcatcgattgggcgacctacaatccggtatcgatggtcctgaagcaaaagggtcttctggagaaagagttcgccaaggacggcatcaaggtcacctgggttcagtcggccggatccaacaaggcgctcgaattcctcaacgccggctcgatcgatttcggctcgaccgcgggctcggcggcgcttgtcgcccgcatcaacggcaatccgatcaagtcgatctatgtctattcacgccccgaatggaccgcgctggtgacaggcaaggactccaggatcgctgctgttgccgatctcaagggcaagcgcgtcgcggtgacgcgcggcaccgatccgcacatctttctggtgcgtgcgctgctcggcgccggcctgacggagaaagacatcacgcccgtgctccttcagcatgccgatggcaagaccgcgctgatccgcggcgacgtcgacgcctgggccggtctcgatcccgtgatggcgcaagcggaggtcgaggagggcgcaaggctgttccaccgcaaggccgacgccaacacctggggcatcctcaatgtgcgcgagcagttcttgaaggattatcccgaggccgtccgccgcgtcctctcgatttacgaggaagcgcggaagtactcgctggcgaactacgacgagctgaagaggaccttcatcgccgtcacgaaactccccgaggcggtcgtcgacaagcagttgaaggaccgcaccgagctcacccacagccgcattggcgccccccagcgcgagtcgatcctcgccgccggtctcgcactccagcaagccggcgtcgtcgatcccaaggtcgacgtcaaggcgacgctggacgccctgatcgacgaccaggtcccgctgccgacgaattgaggtcggcagagaagaggcggacaagcgcagcagtctccgctgtcgtcccgggcaagcgtgagcgcagacccgggacccgtaatcaaggggactcgtttggcgcggaagacgtcactccgggtccccgtaaccacatcgtcctggggttatgggcctcgatctgcgcttcgcttgtccggggcgacggcggagaatgtcgcgcgcccttgcattccttcaccagacacgcttgctaatggccatgatctccgacgcgccagttcttcgacaatcctctgatacagccgagcgtgccgccgcaacatcggcgctgtcgcgctttgggcggcccatgctgggtgtgctgctgccggcctcgctggcgcttggctgggagctcgtggtctggtttggctggtccaacggccggctggtgccgccgccctcgcgcgtcctggtcgaaatcgccgagctcgcccactccggggagctggtccgccacatcacggcgacgctctggcgcgtcggcctcggcttcctgttcggcgtggttgcgggcacgctgctcggcgccatctccggctattggtcgctggcgcgccggctgctcgatccgaccgtgcaggcactgcgtgcgattccctcgctcgcctgggtgccgctgttcattctctggctcggtatcttggagacctcgaagaacgcactgatcgcggtcggtgtgttctttccggtctacctgggcgtgatgggcgcgatcctgtcggtcgatcgcaagatcgtcgaggtcggtcgcacctttcgcctgtccgggttcgccatgatccgccgcatcctgttgcctgcggtgctgcccgcctatgtcgtgtccttgcgcgtcggacttgggctcggctggatgttcgtggtcgcggccgagctgatcggcgccgccgaaggcctcggctatctcctgctcgatggccagcagctcggcaaaccatcgcagatcctcgccgccatcgtgatcttcgccgtcctcggcaagctcacggactggctgatcgagatcgggtccgcgcccttcctgcgctggcaggacgccttctcgcgcgcggcgggagcttgaggcaatgctggcgctcgaccgggtcagcaagacctatcccaacggcgtcgaggcgctggcgcgcttctcggccgaaatcaggcaaggcgagattatcgccatcatcggcggctccggctgcggcaaatccacattgttgcgcgccatcgccggcctcgaccgtgccagctcaggctcggtgacgctcgacgatgaggtcatcacctcgccgcacgccaagataggcatcatcttccaggagcctcggctgctgccgtggctcagcgtcgccgacaacatcggctttgggctcgccgatttgcccgcgatccagcgtcgcgagaaggtggcgcgcgcgctcgagcgcgtcgggctcgccgacaaggcgcaggcctggccgcgcgagctctccggcgggcaggcgcagcgggttgcgattgcgcgggcgctggtgccgcagccggaggtgctgctgctcgacgagccgttctccgcgctcgacgctttcacccgcagggatctccaggatcatctgctcgacctctgggccgacacgcggccgaccttgatcctcgtcactcacgacgtcgacgaggccgtggtgctggccgaccgcgtgctggtaatgcgaccgcgaccgggcaggctgttcgaccagatcgggatcaatctcggccggccccgcgaccgcaactcgcccctgttcgagaatttcaagcgcagcgtgctgacctcactcgaccgatcgctcgaccgcagcgtgcccgaccgcgacgcaacagagggtcccgggcgggccatgtggtggtgacaatcttgctgcgagccggtacatcggaggtatcatgtcccgggagagaacaagatggacgctgtgcaactgcgccagatgcaagccccaatcaaggagcgctacaagaccgatcccaaggctgcgttgatcacgctgaaggccaagggctccaccgccagcgaaggcatcgcctgcaagatcgagacagggcgcgccatcgcgatggccggcctgcatccgggcaccggcggctccggcctcgagctctgctccggcgacatgctgcttgaagccctggttgcctgtgctggcgtcacgttgaaatcggttgcgacggcgatcgaggtgccgctcaagactggcaacgtctatgccgagggcgatctcgacttccgcggcacgctcggcatcgacaaggaagcgccggtcggctttgccgagatccgtttgcgcttcgaggtcgacaccgacgcgccgcaggacaagctcgatctcctgctcaagctcaccgagcgctattgcgtggtctatcagaccatcaagaacggcccgaaggtgtcagtgtcgatgcagcggatgtaagggcgcaagtcatcatcccagcaattggtgtcgtcccgggggcatgcctcttggcgcgagcccgggacgccatgagcgcaggccgtcgcgatttcgggacggtcgttgctcccagctctcgaaccacggcggcctgtggtcatggattccgggcgcgcgcttcgagcgtcccggaatgacagacagaatgtccctcgacctccacttccttctctttcttctcctgcgcatggcggttgcggcggctttcgtggtgacggcgtcggtcgtcgccgagcgcttcggtcctgtgatcggcgcgctggtcgcgaccctgccggtttcggccggtccctcctacgttttcctcgcgctcgatcacgacgcggccttcatcgcgcagagtgcgctggcgagcctgccggtcaatgccgcgacgatcgttctcgcactcacctatgtcgtgctggcgcagcgacatggccttctcgtcagttgtggatgcgcagtcgcggtctggatcgtgcttgcatcgatcatccgccaattcgactggtccctcgccgcggggcttgcggccaatctgatcgcgttcggcgtctgcataccgctgctcgcgggctatcgtcatgtgaagatgccgctggtgacgcgccgttggtacgatgtgccgatgcgcgctgcgctggtcgcaactctcgttgccatcgtggtctcgacatcgagctgggttggtccccgcatcagcggcatcatcgcactgtatccagtggtgttctccagtatcatggtgatcctgcatccgcgcatcggcggacggccgaccgccgccgtgcttgccaactccgcctggggcctgctcggattcggcatggccatcgctgtgctgcacgttgcagtcgtatggttcggctccgccgtcgggttgtgcctcgcgctcgcgacctgcgtcatctggaatttgacgctgtgggcgaggagtcgctgatcgttgcgtgcgaccgactcactcggcgaggcccgcgcagctgatatccgatgaggatgttagaagtttattcgaacttgttgcttacattgaccttggcaattcccgtccagcgttcagtacgtccgtttgcggtccgtaagtctacggagcgcctttgcacaaccgggttgatacggagatactatgttcaagcgcaagtcgaattccgacgcattgacgttgatggcgaccaaggtggtgagtgccaatgtgatggtcgcggataacgacctcaacatcgtctacatgaacaatgccgtcacggatttgctccgcgaggcggagacagatctcaagaaggagctgccgcatttcaatgtgaacacgctcgtcggcaccaacatcgacgtgttccacaagaacccccaacatcagcgccggatgctcgcgagcctcagcacggcgcatcgtgcgatgatccagatcggtgaacggaagttcgatctcgtcgcaacgcccgtgaagaacgacgacggcagccgcgccggaatcgtggtggaatggtccgatgcctcgatccgcctccggaacctcgactttggcgcgcaggtggcagctgcgagccgttcgcaggcggtcatcgagttcaacatggacggcacgatcatcaccgccaacgccaatttcctcggcgcgctcggctattcgctggccgagatcaagggcaagcatcacagcatgttcgtcgaggcctcagagcgcgacggttcccgctatcgcgagttctgggccgcactcaatcgcggcgagtaccaggcggccgaatacaagcgcatcggcaagggcggcaaggaggtctacatccaggcctcctacaatccgatcctcgatctcaacggcaagccgttcaaggtggtgaaatacgccaccgacgtgaccaaacaggtccttgtccgcatgggcaacgaacgcgtccgcggcatgatggaatcggttgctgccggctccgaggagctcaatgcgtcggtacgggagatttccgaggcgatgaccaaatcgcgcgaaaccgcgatgagcgcggtcgagcaggtgtcttcggccgatgcgcaggcccagcgtctcaccgaagccgcgcaggcgatgagcggcatcgtcgagatgatcaacaacatcacggggcagatcaacctgctcgcgctcaacgccacgatcgagtccgcgcgcgccggcgaagcaggccgcggctttgccgtggtcgcatccgaggtgaagagcctcgccaactaggccaagcaggccaccgacaagatcggcgaggagatcggcagcctcaacagcatttccggcgatgtcgtcagcgcgcttggttcgatcaagcaggcgatcaacaatgtcagcgagtacgtgacgtcgacggccgcggcgatcgaggaacagagcactgtgacgaacgagatgtcgaccagcatgcagcgcgccgccgcggaagccgcggcgatggcggcgcgggcttgaccttgcataggtagcccgcatgagcgaagcgacatgcgggaacaaacctcccggatgtcgttgccctcatccgggcttcagcacgattacggcttcggcagcttggccttcagggcatagagcgcatcgagcgcctcgcgcggcgacatctcgtcggggtgaagcgccttcaccgcctccatgagctgctcggcttcgctcggcggcgcggcctccgcggcggcgcgcgaggggactgcgaacagcggcaggtcgtccaccagcgcgcgcgcggtctggccgcgatcctgtgcctccagcttggacagcaccgatttggcacgcgtgatcaccgccggcggcaggccggcgagcttggcgacctggatgccgtaggagcggtcggccgagcccggcagcacctcgtgcaggaacacgacgttcccctgccattccttgacgcgcacggtggcgttgaacatccgcggcagcttggccgccagcgcggttagctcgtgataatgcgtggcgaacaatgtgcggcagcgattgctctcgtgcagatgctcgattgcggcccacgcgatcgaaaggccgtcgaaggtagcggtgccgcggccgatctcgtcgaggatcacgagcgagcgctcgccggcctggttgaggatggccgcggtctcgaccatctccaccatgaaggtcgaacggccgcgggcgagatcgtcggcggcgccgacgcgcgagaacaggcgatcgacgatgccgatccgcgcgcgggtggccggcacgaagctgccgatctgagccatcaaggcaatcagcgcattctggcgcaggaaggtcgacttacccgccatgttcggaccggtcagcagccagagctgaccggacttctgcgctggcgcaggcgacagatcgcaggcattggcaatgaacggctcgccgttgcgcttcagggcctgctccaccaccggatgacggccggcttcgatggcgaagctgagcgagccatcgacctcgggccgcacatagttctcgtcgactgccagcttggccagcgaggtcgcgacgtcgagcagcgcaaacccttgtgccgccgcgcgcagatcgtcgctgatcgcgagcgccctgccgcagagccgctcgaagatctcgagctcgagcccgagcgcgcggtcgccggcattggcgatcttggcctcgatctcgccgagctcggaggtggtgaagcgcacctgtcccgccagggtctggcggtggatgaaggtggcgttcagcggcgccgacatcagcttgtcgccatgctgggcggtgacctcgacgaaatagccgagcacgttgttgtggcggatcttgaggcccttcacgccggtgtcgtcggcgtagcgcgcctgcatcgaggccaccaccaggcgcgaggcgtcgcgcaggttgcgcgcctcatccagtgccggttcgtagccctggcgcacgaagccgccgtcgcgcttgatcagcggcagctgctcgtcgagtgcgccggcgaattcggatgcgagagcgcgcgacggcctctgcagcgccgccatcaccgctgcgatctcctgcggcggtcgatccagttcggagagccgggccaggacctggtccgcagcgatgatgccgtcgcgaatgccggcgaggtcgcgtggtccgccgcggccgaccgagagccgggccagcgcgcgcgaaatgtcgggtgcgccgcgcaggatgctgcgaatgtcctcgcgcgcggcggaatcggccacgaaggccctgaccgcgtcgagcctccgcgcgatcgccggcgcatccgtcagcggggccgccaggcgctgggccagcaggcgcgagccggccgaggtcaccgtgcagtcgatcgcgtcgagcagcgaaccacggcgctcgccggcgagggtccgcgtcagctcgagattggcgcgggtggccgggtcgatcgccatggtcgcgcccgaggcttcgcgcgcgggcggcgacagcggcggatgcttgccgacctgggtacgatcgacgtaggtgacggcggcggccgcggcggtggcttccaggcgcgtgagctgggagagcccgtccatggttgcgacggcgaagtagtcgcacagccgcttctcagccgtcgcaccgtcgaagacgtcgcgggtcaacggcgtcaccgccggcagctcgcgcaacgtctggccgatctcgttgtcgttgtagagcgcgtcggtgacgatcgcctcgttcgggttgatgcgcgccagcgtcgccgcaagctcgccgctggagcattcggtgaccatgaattcggcggtcgatatgtcgatccaggcgaggccaaagcggtcgccgccggccgaggaacgggcgcgcgcgatcgccagcagataattgttggcgcgcgcgtcgagcagcgtgtcctcggtcagcgtgcccggcgtgaccagccgcaccacgccgcggcgcacgacgctcttgttgccgcgcgctttcgccgcggccggatcctcggtctgctcgcagacggcgacgcggtgaccggccgagatcaggcggtgcagataatcctcggagcgctcgaccggcacgccgcacatcggaatgtcggcgccctgatgcttgccgcgcttggtcaatacgatgccgagcgtcttcgaggcgatctcggcgtcctcgaagaacagctcgtagaagtcgcccatccggtaaaacaagaggaggccctgatgcgccgccttgatctccaggtactgttccatcatcggcgtgacgcgcgcggctgcttcggcctgcggcgcgggcgcggattcggcctcttgggcggagatgggctgctgtatcgtcatgagcggcgcaacctacaaaatttcgccacctgctcctatcgctttggccggcaaggggaggttttccacgttgtccgcatcgcggtatgcgcggcctgtgtgcgcgtcccccggaacatgcgggcatcagtcaattgacctgccgcgggcaccctcctaaaactccgccgacattgaagaatttggccgaaccgcggcattcagggagaacaacgatgcgtgacgtctttatctgcgatgccgtccggaccccgatcggccgcttcggcggctcgctcgccaaggtgcgggccgacgatctcgccgcagccccgatcaaggcgctgatggccaagcaccccaacctcgactgggcgcaggtggacgaggtgttcttcggctgcgccaaccaggccggcgaggacaaccgcaacgtcgcgcgcatggcgctcctgctcgcaggtctgccggattcagttcccggccagaccctgaaccggctctgcgcctccggcctcgatgccgtcggcgctgcggggcgcgcgatccgctccggcgagatcgagctcgcgatcgcgggcggcgtcgagtcgatgacccgcgctcccttcgtgatgggcaaggcgcaggaagctttctcgcgttcggctgagatcttcgacaccaccatcggctggcgcttcatcaatccgctgctgaaggcgcaatacggcgtcgacgcgatgccggagaccggggagaacgtcgccgaggaattccaggtttcccgcgccgaccaggatgccttcgccatccgctcgcagcagcgcgcgggtgcggcgatcacggccggctatttcgccgaggagatcacgccgatcacgatccccggcggcaaggccggccccatcaccatcgacaaggatgagcatccgcgtcccgagaccacgctggaaggcctcgccaagctgaagccgatcgtgcgcaatcccggcacggtcaccgccggcaacgcctccggcgtcaatgacggcgccgccgcgatgatcctcgcgtccgaagctgcggtgaagaagcacggcctgacgccgcgcgcgcgcattcttggccttgcctcggccggcgtgccgccgcgcatcatgggcatcggccccgtgccggccacccgcaagctgatggagcgcctcggcaagaaaatcagcgatttcgacctgatcgagcttaacgaagccttcgcctcgcagggtatcgcctgcctgcgccagctcggcgtcaaggacgatgccgatttcgtcaatccgcatggcggcgccatcgcgctcggccatccgctcggcatgagcggcgcgcggctcgccctcacggcggttcacggcatggaaaagcgtggcggcaagctggcgctcgccaccatgtgcgtcggcgtgggccagggcgtcgcggtcgcgatcgagaagctgaactgaccgggcgcgaagcgtccgccccgtccatctgacgtcatgcccgggcttgtcccgggcatgcacgttctcggcgccccgggaacatcgtggatatggccggacaagcccggccatgactgaagcagggaaccgacgcgctcgaaacccgcttcccccaattagttatatcctataatgatcggcgaaagcgctgaccggctggatcacaatggccggggaggagttcgccatgaccttcatctaccccacagacagcaacaaggcgcatccgctgccgctgtcgcccgagtacaagagctcgatcaagcgcgcgccgaacaagcccctgatcccgatgcgccacacgctgtcagagctgaccggcccggtctacggccacgagaccgtgcgcgacggcgacaacgccctcccccgccagcacgcgggcgagccgctgggtgagcgcatcatcgtccatggccatgtccgcgacgaggatggccgcggcgtgccgcactcgttggtcgagatctggcaggccaattcctgcggccgctatgtccatgtccgtgaccagcatccggcgccgctcgatccgaacttcaccggggcgggccgtaccgtgagcgatgcttccggctactaccgcttcgtcaccatcaagcccggcgcctacccctggggcaatcaccacaacgcctggcggcccgcacacatccatctctcggtgttcggctattccttcgtcacgcggctcgtgacgcagatgtatttcccgaacgatcccttgttccccttcgacccgatcttcaattcggtcccggatgagaaggcgcgggcgcggatggtctcttcgttcgatctcgagaacaccaagcccgaatgggcgctgtgctaccgctttgacatcgtgctgcgcggcaagaacgccacccccatggagaatcactaagtgcaggagtctgtgaagcccgacgggatcaccccatcgcagacggtcggtccgttcttcaagtacggcctgacgcccaacggcgaatacgcgtggaacgacgcgttcaccaattcaacgctgaccccggacgtctcaggcgaccgcatccgcatcgagggccgtgtgttcgacggcgacgccgtcgccgtgccggattgcatgctggagatctggcagccggatgcgcagggtcgcttcgccgatccccaggacaagcgtgcgctgccgaatgcgagcttccgcggctttgcccgctgcggcaccgacaaggatggcaactacgcgttcgagaccatcaagccgggcgctgtgccggattccgacggcaagccgcaggcgccgcatattctgcttgcggtgttcggccgcggcatgctcaggcatctctacacccgcatctatttcagcgacgaggccggcaacgctgccgatcccgtgctggcgctggtgccgactgaccgccgggccacgctcactgcgatgcgcgaggctggcaagccggtctaccggctcgacctgcgactccagggcgacaacgagacggtgttcttcgacgtgtaactcgtcgcgtaccgctgacgcgagtcggcgggcacgcgcgcttccagcgcagtgcgcgtggcaggcatcccctctgtgctctcgtctgtgtgtcagccttgctgaccaaacagcgatcgttcagtgctttgctgcccgtagttttgcggagcttttcgtcgacgtcctttcgaaagggcaatcccgtatttacgatgttgatctaggctcctcgcggtttcggcgcgagccctggaatatttcatgaagtttcgtctctcgttgtcctctgcgatcattgcattcggcatcgttctggccctcggtttcgcggccgtggtctccaccagcctttacaccttgaaagaactcaaggtcggcggcccgctctattccgacatcaagctcggcaacgacctcatcgccgacatcctgccgccgccggaatacatcatcgaggcttacctcgaggccaccctcgcgatgcgtgagccggatcaactggccgcgcatggcgagcgcctggtccagctccgcaaggattacgacgagcgcaaggcgttctgggtctcctccagtctcacggaggacctcaagaccacgctggtgtcgaagtccgatgagcaggtgcagaaattctggaaagcatccgaccagctgctgccggcgctcaaggccaaggacgcggctgcgtccgagcgcatctatgcccagctcaaggacgcctacactgcgcatcgcgccgtgatcgacagcatcgtcgagagcgccaacaagcggaatgccgccatggagaagctggccgcggaccgcgacagctcgatgctctatatcctccttggcgtctccgtagccgtcctcggcttcattgccgctggcctgctcggcgttgccctcggtgtcgtgcgcccgatcgtgcgaatgaccgacacgatgcagaagcttgcgaccggcgatctcgccgccgacattccattcgcgcgccgccaggacgaggtcggctcgatggcgggcgcgctcctggtgttcaagcaggcggctatcgagaattcccgcctgcgccaggaacagttgcggcaggagcaggaggcggcgcttgccaagcgcgccgccctgcaccagatggccgaaaccgtggagcgcgagaccggccgctcggtcgacactgcgggcgcggcgacgcaaggcgtcgagcgggccgcgtccagcctgtccgagattgcgaaatcgctctcggcgcagtcgcaggcggtcgcggcggcctcgacgcaggccctcggcagctcgcaagccgtctcggcggcggccgaggaattgagcgcctcgatccgcgagatcgcaagccaggtcgcacggaccagcaccgtcaccaaatcggcggtcgccgggcgcgagcaggcgcgctcgaccattcaggcgctggcgggatcggtgaagaggatcgcggaggtttccgacctgatcggcggcatcgcaggccagaccaacctcctcgcgctcaacgccacgatcgaggcggcgcgcgccggcgaagcgggccgcggtttcgcggtggttgccgccgaggtgaaatccctgtccgaccagaccgccaaatccaccgaggagatcgggcggctgattgccgagatccagacctcgacgcaggccgcagtcgacgccgtggaggccatgggaggccacatcgtcgagatcgacggtgtcgcgacctcggtcgccgccgcgatggaggagcaggacgccgcgacgcgggagatcacgcggtcgatttccgaatcggcgtccgctgccaaagaggtctcggccaagatcggcgatgtcagccgcgatgctgcctccgtcaacgagcgcgccgcggaggtcaggcaggcgatcgccgggatggcggccaatctcgaacagctgcggtcggtcgtcgtcagtaccgtgcgcgactcgaccgcggcggcctgagcccggcggcaactcggccgctggtgcccgggagcgtgattgtgcagtatggcgagggacaggggcatcatggttcatgacatctccacaattgccggcggtcgttgagcccgcccaactgacggccgccctgcgcaggggcggcgtgctggacgcaggcgccgtgcgcgaggtgaaggtgctgcatcaacgcgacaccgtcgtctcacacatcatccgtctcggcctgcgctatgtcggcgaatccgccggcgccccgcattcgctgatcgtgaaaatccccaattccgcgttcgcgcagacgctcgcagatggcggccggcgcgaggtggactactacacccggctcgcaccaagaatgccgcctgggctcgtgccgcgctgcttcgacggacatttcgacgagcagaacctcgcctggcatctcctgctcgaagatctcaccgacagccatgcgaccgcggggcaatggccgctgccgccgtcgcgcgatcaggcggtcgcgatcgtcaccacgctcgcacgctggcatgcggcatggtgggaccatcccgacctcggcgacaccgtcggcacgtttgcgagcgccggggacagcgcggagcgcatggaggccttcgccggccactacgatcgtttcgccgacctgctcggcgatcgcctcagcgaagaacgccgcatcctctaccgacgtctcatcgatcgatcggacgggctgtcccagcgctaccactcacgccgtcatctcagcatcacccatggcgatgcccatgtctggaacttcctgctgccacgcgcaggtgttgccgacaccgtgcggatcttcgacttcgatctctggagcatcaacgttccgacccacgacctcgcttacatgatcgcgatgcattggtatccggagcgccggcaggcgctcgaacgcccgctgctcagtctctaccatgacacgctgatcgagagcggcatcaccggctatacgcgcggcgcgctcgatcgcgattatcgctgggcggtgctttggcagatcacgcggccggtctggcagtggagcatcaacatcccgccggggatctggtggaataatctggagagggtgtttgcggcagtggacgatctaggctgcgaggagatgctgggctgatccatcgtgcccggacgttgcgcagcactcccggcgatgccaagcatcgtccggtgtgatgccctgctgagccggggcctggactcaacagcagaatgcgtgtcggtcctgcggcgcatcgctacgcgctgcgccgtgtccgcgacaccaggccgcgcgaagcctgcctactcgatcaccgcgtgctccggtcccgccgcctgcttgcgcagggtggccttggtcgagccgatcagcaaggcgagcggcagggtgcagaggacgaagatcatcaccagctggtaatcgtgggagaaggcgatgatctgcgcctgcacgttgaccatcttgtcggccatggcgcggccggtgtcggtggacagattgatcaggccgctgacgccgggcatctggagtgcgtggttgaaggggttgatgtgctcggacaggatcgcgtaggtccaccgcgtgccctgcgtcagttgcgcgatcacgatggaaatgccgaccgagcttgcgacgttgcgcatcagggtcaacatcgcggtgccgtcggtccggagttcgttcgacagggtcaggaacgccaccgtcgagagcggcacgaagacgaggccgaagccgaagccctggatgacgctgacggtgacgatctccggcacctgggtcaggtcggtccagccggtcatctgaaacagcgagcccgcggtcagcgtcagcccggcgacgatcagcgtgcgcgcctcgaaataacgcatcatgcggccgaccagcatcatggcgaagaaggtgccgagcccccggctcgccagcagaaggccggcggtgatgatgggatagccgatcacgttctgcatatagggcgaggccagcgccatggtcgagaacagcacgagccccatcacgatcatgaacacgcagccggtgacgaaattgcgatcccggaacagcgcgaagcggatgaacggggtcgaggtcgtgaaggagtgcgcgaggaagaaatagaaggcggcggccgagacgatgaactccgccacgatctcgttggagtccagccagcccaattgctcgcctcggtcgagcgcgagctgtagcgcgccgatcgcgaccgccagcgcggcgaagccgaaccagtcgaatttgaggctgaaatccttcctggtctcgtccatgaagacgatcagcccgagcacggtgatgatgccgaacggcaggttgacgaagaacacccagtgccaggaataggtctcggtgagccaggctcccagcgacggtcccatgatcggacccatcatcacgcccatgccccagatcgccatcgccttggcgcgttcctggagcgtgtaatagtcgagcatgaccgattgcgacagcggcaccagcgccgcgccgaacacgccctgcagcaggcggaacagcaccatctggttgatgtcctgcgcgaggccgcacagcaccgacgccatggtgaagccggccgagcagatgatgaagatgcgcttgcggccgaagcgattggcgatccagccgaccggcgccgtcatgatcgcggcggcgacgatgtaggaggtcagcacccagttgatctggtcctgcgaggcggacagcgtgccctgcatgtaggggagggcgacattggcgatggtcgtgtcgagcgcctgcatgatggtcgcggtcatggcgcagatcgtcaccatgttgcggcgcaggccggggaccatcaggctggctttggcgtcggacatcggatcggtcctgtcgcagtctctggctcagtctttgtcgccgtcctggcccgcggtcgccgacaggccgaacaggcccgccagcgagcgcttgtggccggtgtcgatggtggcgtagacgctcatgccggccttcagcttccgcacatgcctgtcggtctcgtcgaaatagatgcggatcggcacgcgctgcaccaccttgacgaaattgcccgtggcgttctgcggcggcaggatcgcgaattgcgcgccggtgccgggcgagagcgagccgatcttgcccttgaagacgtggttcgggaacgcgtccacgacgagcgtcaccggctgtccctcggttacgtaagtgagatcgctctccttcggattggcgtcgacccagggatgggcgacgtcgatgatggagaacaccggcgtgccggcgggcacatagcgcccgagctgaatctgctcgacctgcgtcgccacgccatccatcggcgcgcgcaagacggtgtggtccaggttgcgctgcgcgtcatccagcttggctttcgcctgagcgtaggccgggaattgctcgagcggcaggtcagggttgccgagcagttgtgttttggcgttggagagctgctgcctgatgtattgcgcctgcgccccggcggtgaccagtgcattcgatgcgttgtcgagatcgagctgcgagccgaaattgttcttcaccagcgcctgcttgcgctcgacgtcgcgctgcttcagatcgatgccctgctgggccagattgagcatgtcgccgtagatcttgatgttggcgaccaggttgtcataggtcgtgcgcgcctgtgccagctgtgccttggcctcctccaccgccaggcggaacggaactgggtcgatctcgaacagttcgtctccccgcttgaccgactggccttccttcacgacgaccttcaggaccttgccggagatgtccggcgtcaccagcaccttctgcgcgccgacataggcatcgtcggtgccgacatagcgtccaccattgagataaaacgcgaggccgccggtggcgacgacgattggtagcaccaccaggagcaggaagcggcggtaacgccgcaggcccgcgacgaggcggcggcgcggatcggtgcccgccttcttggctggtttggcgttgtcggtcttctgttcggtctggaacttgaggacttgatcagccatagcgctgctccttgcgcgcctgttccgcaccgctggtctggattgcggtccgcacgttttccttgatggcttcgagctgagtgagaaggcgatgggcgtcggccggcgtaatgccgtcgagcgcgttggccgtaagctcggacttcagcccgctcatccggccaagcaattggcggccggccttcttgagatagaggcgcttgacgcggcggtccgaagcatcgctgcggcgctcgatccagtcattgtcgcagagcttgtcgatcagccgcgtcagcgtgatcggctgcatttcgagcaaatcggcgagctcggattgcttcatgccctcgctgcgctcgaccttggcgagcaccgcccattgcgcgcgggtgatgccgaagcgcgaggcctccttgtccgcatagacgcgcagcagacggtagagctcaccgagcgtgaacaggaagttctggtcgaccgaccctcgggtcatgagcttcatctccaataagcaacgaatatcataagcaagcttatgattttttcatggctgattagcaggtggctgtcccgcaatgccggcatggctggcagcggctgccagggtggtgctttgggttccccggatgaaatgctagaagtcggccacatgaccctcgcaaagccggcatttcccgcgcccgatcacgatcaccgccgctgcaccgcggatgcactggcgcatgccgaggcggtgtgcgagcagcgtgcgcagaaattcacgccaattcgccgtcaggtgctgggggcgctgctctccagccaccggccgctcggcgcctatgaggtgatcgacgaactcgccaagtcgatggcgcggccggcgccgatcacggtctaccgtgccctcgacttcctgatggccaacggccttgtgcaccgcatcgaaagccgcaacgcctacctcgcctgcgctgcccacgaccacgacacgacctcggcggtggcgttcctgatctgcgagcgctgtggcctggtcggcgagatctcgtcggcgcccttcgccaaggacctcaacgccgccgcgcgcagttcaggcttcgctcccaaattgtccgtggtggagatcacgggcgtctgcacgcattgccagaaaactgactagagcaacaacggcgcgaagccggatttcgggaagacatgccctcgccacaagccctaacgtccgccgcacgtcccctcagtgccggcgccatcgccctgatgctcatgctgtgcctgacctgggggttcaaccagatcgcggtgaagctggtgctgcccgacattccgccgatgctccaggccaccatccgctcgatgggcgcgctgccggtgctgttcatcattggcaccctgcgtggcgtcaatttcttcgaacgtgacggcacctggaagcccggcctgatcgccgggctgatgttcggcatcgagtttgtgctgatcttccagggcctgcgcttcacgtccgcttcgcgcgcggtggtattcctctacacggcgccgttcttcgtggcgctcggctcctatcaagtgcttggcgaacgtcttggcgcctcgcaatggctgggattggccatcagctttgcgggcgtcgcgctcgctatcggcgtgccgcagcccaatgtcgatgcgcatgttctgctcggcgacctcatgatcgtcggcggtgccgcgctgtgggctgcgaccacgctggtcgccaagggcacgcggctgcgcttcgccgcgccggagaaggcgctgggctaccaggttgccacctcgatcccgattctgggagcggcggcctggctgtttggcgaatccatcacgcacacgcccagcccgctgtcgctcggcctgatggcgttccaggcgatctgggtggttggaaccacgttcacgctttggttcgcgctggtgaaggcttactccgccagcaaattgtccgctttcaccttcatcacccctttgtttggcgtcgtcggtagctatttcatcatgcacgacaccctaagcctggcgttcggggctgctgccctccttgtaattgctgggctttttctagttaaccgtccgagccaaggcgccgcggcgccgcgtgatgcattgctgaacgtcaccaaaacctgatatttggacccccatgaacaagctcgaaaaccctctcgattccgacattgcgggcccggcgccccggcatcggaccacccaggtcaaggtcggcgacgtcgccgtcggtggcggagcaccgatcgtcgtgcagtcgatgaccaacaccgacaccgccgatgtcgatagcaccatcgcccaggtcgcagcgctcgcgcgcgccggctccgaaatggtccgcattaccgtggaccgcgaggaggcagcagccgccgttccttatatccgcgacggcctcgccaagcgcggcatcaccacgcccctgatcggcgacttccattacatcggccacaagctgctcgcggcctatccggcctgcgccgaggcgctcgccaagtaccgcatcaatcccggtaatgtcggcttcaaggacaagcgcgacacccagttcgccgacatcatcgagatcgcgaacaagaacagcaagccggtgcgcatcggagccaactggggctcgctcgaccaggagctcctgaccaagctgatggacgagaacgccgcctcgccgaatccgcgcgacgtgcgcgcggtgacgcgcgaggccatggtgcagtcggcgttgctctcggccgcgcgcgccgaggagctcggcatgccgaaggatcgcatcatcctctcggcaaaagtctcggcggtgcaggatctgatcgcggtctaccaggatctggcccgccgttcggattacgccatccacctcggcctgaccgaagccggcatgggctcgaagggcatcgtggcgtcctcggcggcgctcggcatcctgctgcagcagggcatcggcgacaccatccgcatctcgctgacgccggagcccggcggcgaccgcacccgtgaggtgcaggtcggccaggagctgctgcagaccatgggtttccgcaccttcgtgccgctggttgcggcgtgccccggctgcggccgcaccacctcgaccaccttccaggagctggcccgctcgatccaggatttcatccgcgacgagatgccgacctggaaaacgaaatatcccggcgtggaagaactcaacgtcgcggtgatgggctgcatcgtcaacggccccggtgaatccaagcatgccaatatcggcatctcgctgcccggcaccggcgaagccccggccgcgcccgtgttcgtcgacggcaagaagttccgaacgctgcgcggtccgaccatctcggccgacttcaaggcgctggtgatcgactacatcgaccagcgctacggccagggcgccaaggtgccggtctctgcggcggagtgatctcaccccgctagcgcaccacacacctccgtcgtcccgacaagcgcagcgggccgtagcgcaggtccgggacgacggctttgcagcgcagattgcgtatctgtcgtcgcgcgctacgatgcgcccgatcaacaatgatcggggcacgccatgagattgctcgccggcaagcagggtcccagcaactcgagggacctgcttgcggggatcccggaacgcttcggcggacgttgccggcttcgtcgatcgtcccaggtcgcagcggcggagtagcgcttgaggcacctgcggagcttcatcgtcgggctgctcacggcgatcccgctgtcgtcgcttgcggtcgttggcagcagcgaggcagttcccgcgcgaaaggtcgttggacccaaggccaagcagctgtcacctgccaaatgcgaaatcccgaagtttcgaatcgtcgtcgatgtcggacacactccggactcctacggcgcgttgagtgcgcgcaatgatccggagttcggcttcaacttccgcctcgccagactgatcacgacgaagctcaagtccgaaggatttgccgcgacacgcctgctcgtcacggacggcaaagcgcggccgagcctgttcaagcgcgtcagcgccgcgaacgaaggcaaggccgatctgttcctgtcggtccatcatgattcggtgccggacaagctgctcgagacctgggaattcgacggggccaagagctatttcagcgaccgcttttcgggtcattcgctgttcgtctcgcgacagaatcagcacttcgccaccagcctgatgctggcccggatcattggcaggcagttgaaggagcagggcctgcgctatgccagccaatacaccctgccggtcatgggccgctaccggcgccagctgctcgacaaggacgtgggcgtctatcgctatgatgggctcgtcgtgctgtcgcggacgaggagcgccgcggtgctgctcgaggccggctcgatcatcaatcgcgacgaggaaatggagatgaactcgccggagcggcacgaggcggtcgccggagccgtcgcggctgcaatgagggagttttgcgcgaggcggtagtttgatctgccggttcaacagcaatcattgcgagcgaagcaacaacgagaagctacaggagcgcctcgcgatattcccggttcgccagactcgcctcctccagatcgagatcgcgctcgatccgtcgtcgcgtctcgtcggtgatctggcctctccgcaggagattgtggatgaatgctctctcggcggcgatcagttcccgtgtcagcgcggtaccggcggccgagatgtcgtgatggttgggatcgagcgcgtcgggaagctggttcaagcgtatctcgtggcgagcgcgcagcagccgcatcacttcgtcggagacgtccttctgctcggtcaacgcgtcgagcgatttcagcgcggcatcgagcgcctgacggcgtgcggcaatctcggcgtcgtgctcggcggcatgctcatgccggccggcttcggcgacgcccagccagcgcacgaccggcggcagcgtcaggccgacgccgatcagcgtgacgaagatgacaccgaaggcgacgaacaggatcaagtcgcgatatggaaaggcctcgccgtccggcaatgtgaacggcagcgccagcgcggccgccagcgacaccgcgccgcgcacgccggtgaaggcgagcacgaacggccattgccatggtggcgacgggtcgcgcttgcgcagcgatttgctgagcatccgcggcagataagttgcgggatagagccatgcgaagcgcgcgaccacgacgatgaccaggaccacggccgtcgcgatgaggatgtcgtcgagcgggaaggtcttcgatttttcgtagagcgcgcgcatctggaagccggtcagcaggaacagcatgccttcgatcaggtagatcacgagatcccagaagaagatgccttgcaggcgcgttgcggacgagatcagcaatggcccgttccagctcacatagaggccgcaggcgacggtcgcgatcacgccggagccgccgacgtgttcgggcaaccagtaggagacgtaaggtgtgatcagcgacagcgtcagctcgacctgcggatctccggaccatttgcggaagcgcaatgagagccagccgaccccgacaccgaaggcgatctcgctggcgatgatgagcaggaactcgccggccgcgagcggcagggagaaattcccgaccatgatcgccgcgagcgcgaagcggtagaggatcagcgcagtggcatcgttggcgagcccttcaccctcgaggatgaccaggagccggcgcggcatgttgagccggcgcgcgatcgcgagcggtgccaccacgtcgggcggcgcgacgatggccccgagcaggaaggcgacggtccagggcaggccgatcatgtagtgtgttgcggccgccaccagcgccgcggtgaagatgaccgcgccgacagcgagcaggacgatagggcgcagattgttcctgaattcgcgccagctcatggcgacgcttgccgagtagatcagcggcggcagcaccatcaagagcaccagctccggcggcaattccaccgggggcatgcccggcacgaaagcgagccccacgccggagagcatcagcagaatggcaggcgcgatgttgaagcggcgcgcgacgagagcggtacctgccagcacggtcagcaggatgaggaaagtctgaaatttcgcttccatgacggtctgtcttcacccggaagcgatcgcaacgtcaatccgcgtggcttacgcgagccgttccgtcaccatgcgccccattcgtgcgaacacggccgcgatctgctccgcggtcggcgagccgccttggacataggccgcgatcaggatcggcgtctcgggcttcggccaagccaccgcgacgtcgcccgccgcgtccttgccgttgtagccggtcttgtcgccgatcttccagctcgcggggagcccgccacgcagccggtttgccccggtcttgcagttcaccatccagtcggtgagctgggcacgcgagcctggcgacagcgccgcgcccgtcaccagccgccgcaaattgcccgccatcgctgttggcgtcgtggtgtcctggggattgccgggcggtgaacggttgagttcaggctcgtcgtggtcgaggcgtgaaatggtgtcaccgatcgatcgccagaatgcggtcagggcggaagggccgccgatccgcgccagcagcagattggcgcaagtgttgtcgctgagctcgacgatcgccttgcacatttcagcgacggacatctcgccggccgcgaggttttgcctcgccaccggtgcgtaatcgagcaggtcggtctggccaaaagggatcatggccgcaagctgctcctcgccccgatcgacccgcgccagcacgcaggccgcaagcgaggccttgaaggtcgagcacatcacgaaccgctcgtcggcgcgccaggcgagctttctgccagttgcaagattctccgcatagagcccaacccgcccgccgctctcgcgctcgtaggcttcgagctccggcggcgcgtccgcggccagcacgggggcggcagccatccagcagagtgaggcgagcagggaacggcggtcgagaatcatggagagttttcagacatcgtgattgcgagggagcggagcgacgaagcaatccagcctgtctccgcggaaagactctggattgcgtcgcttcgcgcgcaatgacggaaaatggacagcgagtgcgtccgatttcgggcagctaaaggtcgagccttttcactccctcaggtcataccggtacgatttcgacacgatctgccagccgtcggcgagcttcatcgcgaccagatagtcggtgaaataccgcggcggaagctggcatctgaccttgatgaaggcggtcttgtcgtccgaccggtcgatcgtgacaatgaaatcctcgcgtggcttgccttctgccttggccgaggcgcgcttgcggacgcgatcgagccagtcaggcaccgtcagaacctggagctcgcccttctcgacccagcgcagatcggcggagggatggaagatggcgccgagcttttcggcgtcgccctcataaagtccgtcaaaataggattgcacgacggcttcgacgctcgaccggtttgggctcatgggtcattcctttgcatgatggcttcgggcagtcctagtcgtacacatcaagatgcgacgacaccacccgcgatgcccattgtcgtcgtccggctcgttgccctattcctggcccgtgaaggaggggcggtccctgtcgtatggagccctgctcgattctcccctcgatccgccacggatgcccacattttcgtggactcaaagccgctctggcatgaaattgcggacgaactgccgcaatatcgggagcacatcggggttgtctgaggggaacccgctcgcccgcatctgccggcgaaccgcgacagcactggcgcgacaaaccaaaaaggggctgtcggcccgtcgtcggtggccttcgtgacctccatcacaagcgcctgcggcggatgctgctaaagcggtccaaggggcccagccggcccggaactatcggaagtggtgtcatgcgcattttgctcagactttgtccgcttttcgtcgccctcgggctgctggtcggcgccgggcccgcccttgccgggaagcgcgtcgctctggtgctcgccaattcggcctatcagcacgcgccgtcgctcgccaaccccgtcaacgacggatccgtgatggccaggacgctgaaggaggccggcttcgacgtcgtcgattcccggcacgatctgtcggcgcaggacacgcggcgcgtgctgcgcgacttcgccgacgcgacccgcgatgccgatatcgccgtggtctactatgccggccatggcatcgaggtcgagggctcgaactacctgattccggtggatgccaagctcgagcgcgataccgacgtctacgacgaggcgctctcgctcgaccgtgtcctggtcgcggtcgagcctgcaaagcagcttcgtctggtgatcctggatgcctgccgcgacaatccgttcggcaagcggatgaagcgcacgattgcatcgcgtggcttcggccggggcctcgcccaggtcgagccgaccagccccaacacgttgattgcctattcggccaaggccggcttcacggcgcaggatggcgacggtgtcaacagtccattcacggttgcgctttcgaagcatctgacaacacccggtctcgacgtccgccgtgccttcggcttcgtgcgcgatgaggtgctcaggtcgacgggcaacaagcaggagccgttcgtctacggttccctcggcggcgaggacatgccgctggtgccggtcaaggtggccgctatagcgccggcgaatccccaagccgatatccggcgggactacgagcttgcgcttcaggttggcagcaggccggcgtgggaagccttcctcgcccagcatcccgacggcttctatgcgagccttgccaggcttcagatcgagaagatcagcgccgaacaggcccatgcggcagccatcgcgaaggcgaagcaggccgaggcggagcgcgatcgtcttgccgcgctcggcgcccagaaggaagcgcaggccaaggccgcggccgatgcgaaggccgccgaacaggcgcagcttgccgcgcagaaggccaaggagcaggcgcagcagcaggcggctgcggccgagcagcagcgtgtcaacctcgccgccgcggcgccgagtgctgcaccggccagcacagcgagccccgcaggcaccagcgtggcctctctgaccccggcgatcgcaccagccgatctcaaccgctcggtgcaggccgaactcggccgcgtaggctgcttctccggccaagccgacggcaattggaatacgtccgcgcagcgatcgctgtcgcagttcaatcgctacgccggcaccaagctcgacgtgaaggtggcgagcaccgatgcgctcgatgcggtcaaatcgaagccgtcgcgcgtctgtccgctggtctgcgagcatggcttcaaggctgacggcgacaagtgcacgaaaatcgtctgccgccagggctatgccgtcaacgacgacaatgagtgcgaaaagcagcgtgcggccaagccggccaagcccgcgtcggccaagcgcgacgaccgtgatgagcgtcctgcacggcagcgtcgtcaggccggcggtgcggctgctggcgctgcaggtggctatggtgctgctgccggcatcgccgctgccgctggcggcagccgcgcctcgagtggcgggcagattttctgcaacagcaccggctgtcgtccggtccaccgcggttgccgtctcgaatatcgcggcggcggcggccccggcaacgacgccaatgccgaggtctgctactgaagcgccctcgaatgacgtcccggcgtcggccgggacgactggatcagtttgggatcgcgctggccgcgatattgaccgtcagcgcgagcaacgcggtgttgtagatgaacgacacgatcccatgcgccgtagcggtgcggcggattgtcttgtccgtgatgcctacgtcggagacttgcgcggtcatgccgatcacgaacgagaaatagacgaagtcccaatagtcggcgtggtctttctcgtcgccgctcggaaattgcaggccgcccggcttggcgttgcggtaatagtcatgcgcgtaatgcagcgcgaaggtcgtgtgcacggcagcccacgacaacgcgattgtggtgatcgcgatcgtgagctccaggactccccgatgcgggatgccgagctcggagacgatcgccgcgatgctggcgaaggcgccggtcgccgtcacgagcaggatcacgaagcggccgtcgtcctgcatcgcggcggcgcggcggatgtgctggtggtcattgcagaccatcatggcgtagaccagcacgagatagaccgcgatcagcgcattccagccgagcaggagccgtgtcaccagccggtacgtccccggcaacagcaggcagaccaggatgccgacagcgagtgcgacgaaggtccgcggccgcgcatagatcagccgcaccggccgcgacatctggcggaagcggacgaggacgggatcctctttgccgccggccgccatcgtcgcgcgtcagttcttccgttcggcgacgaagcgcgccgcagcctgcagtaccccggcgcggtcgccgaagatcgacacggcgctgtccgcccgcgcgagcagatcgcgcacgcgctgcttggcgccttcgatgccgagctgggtgacgaaggtggtcttgccgagcgctgcgtcctggccggagggcttgcccagcgcggccgcatcgccctcgacgtcgagcagatcgtcggcgatctggaaggcctcgcccagcgcgcggccgtaatcgtcgagcgcctgatattccttctgcgaggcctgcccgaggatggcgcccgcgatgcagccgtagcgcagcagcgcgccggtcttcatctgctgaatgcgggcgacatcgatcggctcgtttccgccgaagcggccctcgccggcgagatcgaggatctgcccgcctaccatgccgccgatgccggcgcagcgcgccagcgcgcgcgtcagcaacagccgcacattggcgtcgcgatggacctcgtcgcgggtgatgatgtcgaaggcgagcgtcaggaggccgtcgccggcgaggatcgcggtggcatcatcggtcttcttatgcaacgtcgggcgaccgcgacgcaggtcggaattgtccattgccggcagatcgtcatgaatcagcgaatagcagtggatgcattcgagcgcggcgcccaccagcagggccgcctcgcgcggcacactgaacaccgcggcactctcgaccaccaggaacggccgcaggcgtttcccgccattcagggtcgaatagcgcattgcgtccatcagtcgcttgggccgggcgatctcgtcgtgcaggatgtcgtcagacagcaggcgcccgagcagggcttcggtgtcatcagcggtcttgtccagacgtttggcgaaatcggacggggacgtgccggtcatcaagaaaggctccagaactaaaattcggcgggacaatcctttatgaaccggccccagtcaatcgtttggaaggcctaaaaagtgctggaaaaggtccggattatcacagacttaatggctcagcccatggccgcgtttcatcgagcgccggaaaggtcgatttgcgcatcgtcaagatccttctcctggtgctcgcagtcgcagctcttgcgccctatgtcattgcgccgttctaccgcaccgggcatcccgtttcgacgctgatggcctggcgcgcgcttcgcggcgcgccgatgcaccgagagtggatcgatctggcgaacatgtcgccctacctgccgcgcgccgtggtggcggccgaagacgcccatttctgcaagcatcacggcatcgactggggtgcgctgcgcgaggcgatcgacgatgcgcaggaggacggcaccccgttccggggcgcctccaccataacccagcaggtcgcaaaaaacctgttcctctggcaggggcgggatttcgtccgcaaagcactggaattcccgctggcgctctggatcgatctcgtcctccccaagccgcggattctcgaaatttacctcaacatcgccgagttgggcccgcaggggcaatttggtgtcgaggcggccagcgcctatgccttcggcaagtcggccggaagcctctctccacgcgaggccgcgcttctggcctcgatcctgccgaatcccgtcaaacgcagtgcccggagccctggcccaggtgtccggcggctggcggccacctatatggcgcgggggcaggcaagctcgcttgcgacctgctggcgggaaaatcgctgatttcggacccattccgggcgtattttccggcccaagagcctagctttacggcctgccttcctctataagcccggccttgatcggcattcagctcgcctcgtattgcgggtgctgagccgtccttcgcggacgatgccctgaacaccaatccctagaggatattgaaatggccgttccgagaagaaaaacctcgccgtcgcgccgtggcatgcgccgctcggcagacgccatcaagaagccgacctatgtggaagacaaggactccggcgagctccgtcgtccgcaccatctcgacctcaagaccggcatgtacaagggccgtcaggtcctgaagaagaaagagtcctgagggcaggatctttcttcaggcgggaggattgggcccgcctgattttggccaacccatgagctagacggtgacggcggcggagcgaatgcttcgccgctgcattgctctgtccggatatcttgatcgagaaggcatctcgccgatggtcggtttcccgctgcttctgattccgcttgcggtctacaacatcatcgccttcctgatgccgaccgtgtcctttacggacgtgctgttcacggtgccgatgatgtccggcgaggtctggccggtcacactcgccgacctcctgctcgcactgggcgtggtgttgctgctgctcgaagtggtcaagggcgcgcggccgggctcgaaattcctgatggatcacttgctgtcgctgatcgtgttcggtgctgctgcggccgaattcgtgatgtggcccaaattcagcaactccacctttttcctgctggtgctgctggcgatggccgacttcctcggcggcattgcccagcgtacgcgccggcgcgtcacctatgtcgccgagacgacagtacccgcgccacgcaaggtcaagcgcaaggcggagacgccggcggatgatgcggaggctccctccaagttcgagccggtgatcgcgccgcaaccggcgccggcaccggtagagccgcccgccccctcggcgcaatccgtcgccgagtccgtgctgatggatcatcccgcaccgaagccggcgcagggcgctccctcgccggaaataccctcgccccatcttcagccgggcaacggtacgccacccgcgtctgatacgccgccgcgctgatcggcctcaggccacctgccgtgttcgtgcggcgacgcttccgagcggacgcttgctgccatatgccgtccgcgcatcctcggaagaggcacggcggaatcggctcgtctggggcggacattcggcgttggcgatgagctgagtgatgaagctggggtcgggccgcggcaggggcgccttgtgaacccattgcaacgtcggcatcaccgccaccagagccgtgcccgtgccgttgtccgccgcgtcagacccatcggtactcaacatcgcattcaccgttgacccggcgagattgtcgcgtttcgggacgcgagcgccggtgcgagtcctgtactcgcaaggcctatgccggccgggccggcttggttccccacgccagggaaacgtggtttccaaattgtttatcaactttgcctagggtcgggggcgaatctggctctatcctgtgccggctcaggacttctccactgtcccgaaacgaggcgattttgatccccacactgccgcaagcctcagacatcctggccgcgcttggccaggccgtgttcgcctgggacatcgccagcgattccatcgcctggggcgagcaggtcaccagcatctttcccggtattccggccgagcggctggcgaccggcgccgaattcgccaagctgatcgagcccgcgcaaacgctgcggagcgcagctctggcgcagacctccgccgtgcacggcgccgatggcacgccgtaccgggttgagtatggcgtacgcatgaacgcctccgaccccgtggtctgggtggaggagaccggccgctggttcgcaggccccgatggccgccccacgcgtgcgatcggtgctgtccgcatcaacaacgagcgtcacgcccgcgacgaagagctggccaagctggcccggctcgatccgttgaccggcgagctcaaccgctcccatctgctcggcgcgctggcagaggcgatcgaggaggcgacccgcttccgttcgaccgccgccttcatgctggtcgggatcgatcatctcgcccgagtcaacgatgccttcggcttcgatgtcgccgatgccgtgatcctcgatgtcgccaagcggattcgcgcgcgtctgcgcggcggcgacgtgcttggtcgcttctcaggcaacaagttcggcctgatcctcaagaactgtaccgtcgacgacatgaacgttgccgcggagcgcttcctcgccggcattcgcaccgacgtggtgccgacgaaatcaggcccggtctcggtcaccgcgtcgatcggcgcggtcagcctgccgcgctatgcccgcaacaccgatgaagccgtcaatcgcgcccatgagacgcttgacgctgccaagcgccgccgcgccggctcgttcgcggtatggcgtccggatgctgcgcgcgacgcgcagcgccgggtcaacatccgcgtcaccgacgagatcgtcactgcgctcaacgagcggcgcatcaggctagcctatgagcccgtggtctcggccgtctcgcgcgagcgcgcattccatgaatgcctggtgcggatggaccagggcaacggccaggtgctgctcgcgcccgacatcgtgccggtcgccgagcggctcggcctgatccgcctggtcgatcatcgcgtgctcgaactcgtggtcgccgagctcgcagccgcacccgacgtctgcctcagcctcaacatctcgcctgatacgacgatggatccggactggtgggcggggatcgaatcgctgatgctggcccatcccggtgttgccgagcggctgatcatcgagatcacggagacggtcgcgatccaggacatcgacgatgtccgtgccttcgtcagccgcctcaagcatttcggcagccgtatcgccatcgacgatttcggtgccggctacacctcgttccgcaatctgcgcaagctcggcgtggacatcgtgaagatcgacggcgctttcgtgcagaacatcacccattccgccgacgaccgcgctttcgtgcagaccctgatcgatctcgcccgccgcctcgacatcaagacggtggcggaatgggtgcaggacgaagaagcagcgagcatgctgcgcgactggggctgcgactacatccagggccgtctgatcgggcttgcctcggccgaccgcccatggggcgctccgccggacagcgcgctgcctgcggcggggtaagagccgcaagtggcttcgccgaaggcgtaacgcaccgcgttggcctccttggagggagaggtggactacgccttcggctcatccaccctgcaggttcctcacgccccctcgtccagcgcaacgagctcgcgcttcttgcgcagcgcgggcaacagcggcgcgatcagcagcaccagcgcgaacgcaagacacgcccccgagatcggacgctgcacgaaggtccagagatcgccctgcgacaggatcagcgacttgcgcagattgttctccatcatcggccccagcacgaaggcgagcaccaatggtgccggctcgaagccgagcttgcgcatgaaatagccgatgatcccgaacgcgatcatcacatagacgtcgaacacgttgttgctcgagcagtacacgccgaggatcgtgaacaggatgatcagtgggaacaggatgttgtagggcagcttgagcagctgcacccacatgccgatcatcggcaggttcaggatcagcagcatgacgttgccgatatacatgctggccacgatgccccagaacaggccggggttttgcgtgatcagcagcggtccgggctgcagcccgtgaatgacgaacgccccgagtagcagtgccatcaccacattcggggggatgccaagcgtcatcaacggaatgaaggcgccgcccgccgcggcgttgttggccgactcgggcccggcgacgccctcgatcgcgccatggccgaaacgctcgggcgtcttcgacaggcgcttctccagcgcgtaggaggcgaatgaggccaccaccgcgccgccgcccggcaggatgccgaggaagaagccgaggacggtgccgcggccgaccggacccgcgctcgccttccagtccttcctggtgggcaagagatgagtgatcttggtgttgatgatgtcgcgcttgatcgcctgctcggtgttgagcagcacctcggcaacaccgaacaggcccatcaccaccggcaccaggccgatgccgtcgatcagctccatgcggccgaaggtcagccgcggctgcgcggtgatgctgtcgagccctaccagcccgagcacgacgccgatgcatgccatcaacagtgccttaggcatcgagccctgcgtcaggaaggtgagcacgacgaggccgagcaccatcaggctgaaatactcggccggaccgaatgcgatggcgacgctggcaagcttcggcgcgaccagcatcaaggcgatcagcgcaaacgtgccggcggcgaaggagccgaaagcggagatgccgagcgcgggaccggcacgcccctgcttcgccatctggtggccgtcgatgcaggtgacgacggaagccgcctcgccggggatgttgaccaggatcgaggtggttgagccgccatacattgagccgtaatagatgccggccatcatgatgatgccggattcgggcgtcccggagagcgtcaccggcagcagcagcgacatcgccgagatcggcccgatgcctggcagcacgccgaccagagtgccgatgaagacgccgatgaagcaatagagcaggttgatcggcagcagcgcgacgccgaaaccatgggcgacgttgacgagcgtatccatgggtcagccgatcccgaacaggcctgagggcaactggatcaagagcaggcgcttgagcacccaccacatgcagaccggcaccagcacggcgatcggaaccgccagcgtccagcgcacgggatcgatcaggcgcaacagcagcagcatcaacgggatcgacgacaacaggaagcccaacggctcaagggcgagggagaatgcgatgaggcaggcgatgaggagaagcggcttgctccagcgcacattctcccagcgtgaggccagcgtcggcccgccctcggtgatcgccgagacgatgatggcgctcgcgaacacgcacatcaggattccggtgtagaacagcacgtagccggagccgggatcgttgatggtgccgagcctgagcttcagccccgaccagatcacgaagccgccgagtgcgagcccgatcagcccgccccagagctcggagttgctgaggcggagtttgacattggtgtcgttgttcatatgacgaaccttatgggtcaccgtcacccgaacgcagcggcgaagccgttgtccttgaggtggcgggtcgtagcgaggccctcgaaggggcgaccgtgcccggtccatccttcgaggcgagccgccagtgcggctcacctcaggatgacgtcagcatctgtggcaggcagccgaaccctacttcttcgccagcccgagcgtgttgatcaccttgcgctcggaatccgtgacctcgacgacgaacttcttgtagtcctcagtgttcttgtagttcggcaccatgtcgtatttggcgagcgtcgcgatcaccgcggggtcctcgagggccttcttgaaggcatcgtgcaacttgccgacgatcttgggatccatccccttcgggccggcgatgccgaacggagaatcatagaccatgggatagccgagctccttcagtgtcggcacatcggggtaattcggcgagcgggcgccggtccacaccatcagcagccgcagcttgcccgcgtcgaccagcggtcgccatcccgtggaatcagcctgaagcatggtatgcttaccgagcacggcggcattggtctctgcacctcccttgaacggcacctgcgtcagcttgatgccggccatcccggcgatctgctccatcccgatatgcagcgaagtgccggcgccgggcgtggcgtaggtcaccttgcccggattcgccttggcgaactcgaccacgtccttccagctcttgaactgcgactccgcgctggtcgtcacaccgaaggtgtagccggtgagatggacgatgtaggtgaaatccttcgctggatcccacgacacctcctgcatcagcggaagacggaataccgtgattgggatttgcgagatggtgtagccgtccggcttcgccgccgccgccatggtcgcaggtccgaccgtgccgccgccgcccgccttgttgtcgatgacgatcggctgccccagggtcttcgaagcactgtcggcgatcgcgcgcatcgagatgtcggtcgatccgccggccggccatggcacgatcaacgtgatcggcttggtgggatagtcctgcgcgctgaccgcagtggggagcaatgcgcccatcacagcgtgcagcgcggcaaatgcgatcgtcttcagcccgtgtcccgacattgaaacccctccctcgcagcggcgtctcttgcaccgccgcctctcgttcttgtgaggcgattgttcctgaaatcaagagagaagaaaagcacattgcgcacgccctgtgaggaagccggtgaggcaatgtcggcaaagccggtctgtgcgacaattcgtcgtcaggcttcgtgccgagtgacggaatttggcgccgggaagcggtcaggccacgcgccggaccatgctcagtgtctcgatggtgcggccgacgtcggatgcgagacatggcttgccgaaataatagccttggacggcggtgcagccgcattcgcggacgaagtcgagttgctcttccgtctccaccccctccgccgtggtctcgacgcccagcactgagccgaggcttgcgatggtgcggacgatcgcaacgctctccgggctctccccgagcgtgccgacgaaggagcggtcgatcttgatgcggtcgaaaggaaattttcgtaagtagctcagcgatgaatagccgacgccgaaatcgtcgaggctgacgcgcactcctagcgcgcgaagctggtgcaggatctcgatcgtcgcctcgctgtcatcgagcagcgccgtctcggtcacctcgagctcgagccgttgcggcggcaggccggcttctgcaagcgcgctggtgaccatcccgaccaacccgcgcgagcggaactgcaccggagacaggttcaccgcaacggcgacgccgggccaggacgcggcgaccgcgcaggccgtgcgcagcacccattcgccgatcggcacgatcagcccgttctcctccgcaatcggaatgaactcggcgggagaaacgatgccgcgtgagggatgtttccagcgcagcaatgcctcgaagccggtgagctcggaagaatcgagccgcatctgcggctggaacaccaggtggaactgacgaccctcgagcgcgccacccagatcctgctcgagcgcgtgccggctgcgtgcttcttcctccatctcgggctcgaacagctgatagattccgcgtcccctggccttggcctggtacagcgcgaggtcggcgcacttcatcagctcgtccgcgtcgagcccgtggtcaggtgcgatcgcaataccgacagacacgccgacatggactgattgactttccagcggcggaggatgaccgatgatgtcgacgagacggcgggcgagctcctcagccgattgcggctgtggtccgcgctgcaggacggcgaactcgtcgccgccgaggcgcgcgacggtatcgtgttcgccgacgttcgctttcagctgcgctgcgacccagcgcagcaggcgatcgcctgcggcgtggccgaggcggtcgttgacggtcttgaagttgtcgaggtcgaagcaaagcacggccatggcgccgccggcgaccgcaacctggttcagtccctcagccatcttctcgcggaacagcgtgcgattgggcaggtcggtgagcgaatcgtgccgcgccatgtgcgccacccgggcctgggccttgtggcgctcagtgacgtcctcgtaggtgacgacccagccgccgtgctccatccgtttgtgattgagcttgatgatgcggccgtcgctcaagtgccgatgcagcgtgtgctcgccctcgcgcaaccgctcgacatagtcggcatagagcttggcgccggtcgtgttcgggtggatgccgagctcgcagctgtagtccatgatctctcgcatcgagacgccgggcttaacgatctccggcgacagtccgtacatctcgagataacggcgattgcagacgatcacgcgcaggctcgaatcgagcatgcacaggccctggctcatgttgttcagcgcggcatcgaagcggcgatactgttcgctgagctgctcgatggcacgctcgcgctcggttatgtcctcgtaggtggcgacgaagccgccttcggccagcgcgcaatagcgtaccgagatcatcgtgtcgtccgccatgtgccggcgcatcggcgatgaatcgcggttcgcaatgctcgtccttgcggcttccagcagctgttgcggactgtattcggacgagaacgcgccgtttgccatcgagcgctcgatcagctcggcgagatgcgtcccgggcctggtctcctccggcgacagacggtagatcttccggtaggtggtattgcagacgcgaaggcgcatatcgctgtcgaagaaggcgagcccgtgcgccatgttctccagcgccgcatcgagaatgaagttctgccgcctcagcgtttcctcgtattgcagccgctccgtgacgtcctcgtgcacggtcacccagccgccgtcgggcaggaagcgggagatcgtctgcaccatgcgtccgtcgtagcgcatcaccagcagggatttttctcttttggcgcgcacgtcctccattctggagctgtgaaactcgtcggccggcatccccggcaggttgccgcgcgatatccaatggtcgagcaccgcgcggtgcgagactcccggcttcacgattccaggatcgagattgtagaggttgaggaagcgttcgttgcagacgaccacgcggctgtcggcgtcgtacatgatgagaccgtgcgacatgttcgcaagcgcgtgctggctgcgctccgtttgcacgcgcaattccgcctcgagccgggcgagtcgggtgacgtcgtcgcagatcgtcatccagccgccgccggggagaggcttcagctcgagcgacatgacaaggccgctcgccagccgctgctcggtgcggaacggctttccggccgcgatccgcgcgatccgcgccgaatagagcgcgtcgagctcgctttccgggaagttgccgcgcctggcgctgtgcgcgagcacctctcgatagctcgtgccgacgcgcacgatgtcggcggacatgttgaagaaggagaggtaacgctgattgaccagcaagatgcgattgtcggcatcgtagacgcaaacaccctgctccatatggtcgagcgcgagttggctcagcgcgaccagggcgtccgggccctgctcgcggagtgcaccaagctctttgtcgcgggtcgacgtcatcgggcgggactcggcaggcaacagacttaacgcaacctaattcagctgccgaggctagcgaagaggccggaaaaatcccttaagcgcggtagtttacggaggatgaccggcgatgcgtggatgcgtatgaagtaagaggtgcctgcgtgggctggccagatatcgtgcgtcgccggcacggcagccaactctcggccgtgccctctacggcccgtaaagcacgagctccgtgtcggtgaggtcgcccagaagtggctggtgcggccccttgaaatatttgcgaccccgtcgctcggtatagataccaacgaggccgggaattgggccattggaatcgacggcgaccgaaatcttgccgagccgcaacagcagccggccgattcggcccgcgcattcggcgtattccgtcatgctccggcaatagatcagcttcatggcgggcggggcgatgaagccgcggcggatgcgcaccggttgcaggatgaaggggaaggttcctttcggcgtgcggcagacaaggctgagacaattgtagcgcgcatgccgcctcaagagctcggtctcggcggcggaaagtcccttgatctccttggcatgcggcgggatgacctcgatctcgctccaccgcggcgcgcgcgccagcgcagggatcgagaagaatatcccgcggcaataagcgcgaaagccctgcgtctcgatgatcggccaggtccacggcgccgggctgatgttgaaataggtgacgtccttgtgccgctgcgcgatcttggtcagcagcggcgcgtagttgcgataggccggatcgacataccagctcgacaggttgcactggacagccgtctcctcgccacgctggcgcgccgtgtagatcagaagcagcacgccgaccggcgtgccgtcatcgtcgagcatgtagccgaagcgcggatagccctccggcaccgctcggaaggcctgccggcgcaggccctgaatccagtattcgcgtgaacggccgacgaagccgcgcgtcagcaagtccgcgatcttatcgacatcggactccgtgatctcgcggcatcggaccttggtatggatcacgctcgtcttgcccgtggaaatggtcagcctcgtgagttgcttagcgccagccttcgccgtgagcaccggccgcaacatgcggctgaaagcccaggacgtcctgcaccttggcgggccaggcggaaagatcggtgccgtgggtgtggaacatggcgacggccagccggtccatgccaaaggcaacgcagccggtatgggccggctcgccattggcgtcctggattccccaggtcgtgccgaaatgttcgcggtgatagttgaagctcatgcaggccgtcggctgctcgtccgagcgcagcggaatgaggagctcgaacttgagttgctgctgcttctggctcaccgccttcatctggccgacccggccgaagaatggatcgctggcatagtcgacgcggaaggtgaggccgaggtcacgcgcgatcgcctgcgcccgcaccatccagcgctcgcggaagtcggcgacgtcgtcggggctgccgatgcagacatattcgcgcatccggaacgattgcaggcgatcgagatgcttcgacggctcgcggcggaagcagtcggcagcgacatcgaaacgcaggccgcccttcggcaacggtccgcggctcgccgcgatcggatagacgggatagcaggcggcaggcgacagcacgaggtcggctggcgacagtgaagaggtccagtcgccgccagcatcgaagcggctcaccgcggcgttgatctcgcgttcggtgccgtgcagtccgcaaacgcagccgagcaggttcggaaagctcttgaggtagccggatttctccagctgggcgcggctcatcaccggtggaaagcgcatcacttcggtgccggcttcgcgatggctcgtgatcagtgcggccagccgctcgacgatgccttcataaagcgcggtgcgggcatagacgccgtcggcgcccatgcggtggaacagcttgtcggcaagatgatcgagcggatcgatcatctgcggcgcggtatcgggcgaattggggaggacggcaatgctcataggtcggtgtcctgctatatgaaaaaaattcttcttcttggttcagtcgcgaaggctcgtcggcacgccgctcatcagcgtcgatgtcgcggcgttggagagaatacggtcattgttgatcatgatcggtgacgacagcacgtcgcgcaggtggcggcccatggtgaactcgccgtcgttgcggtagccggaaagacccgcggtgcgcatcgcatgcatcaccgtctcgaccgcgagctcggaagcttgcaccttgagcagcgtgatcgcggactggaagtcgagcgagctcagcgcacgctcgtcatgctcggcgcgggcgaaagcgtcagtgttggcagagatcagcgcgcgcagcttggcaagcgacatcttggcggcggtgaagtgggccgcggccgggggcatctggccgccggaagagcgcgccgccttgcggatgaaagcctgcgcgcgggtcacggccgcagcggcgatgccggcccaggccgacgaccagcacagatgtgcgaacggggtcatggtctgggcgtggatcttgtcgtaggattccgggaagacgcggtcggcagggcaatcgaccttcagctcgaagccggtcgagcaggtgccgcgcatgccgagcgtttcccagccgagcgtccgcttcagcgaataatcgtccttggcgagcgccatcagaacctggtcggaggctgcggcatcggtggcgcggcgggcgatggtgacgaggccgtcggcctcggcgccgtaggagatcacggtggcatcgcgaaccagggagacggtgtcgccagcatgatcgaccgcggcggcgctggcgcggatattgccgccattctggccctcggtggtggaggaggcgagcagccactggtcgcgggcgacccggcgcatcatggtctccatccagggaatgccatggccgtgcctgatgacgcaggcgaccttggtctgatgcatcgcgtagatcatcgccgtggaagcgcaggcgcgtccgagtgtgtagcagatgtcagtaacgtcatagatcgaggcgccgaagccgccgaactcgaccgggatcatcacgcccagcagcttctgctcacgcgcgacgtcgaaggccttgtgcgggaagcgggcgtcgcgatcgaccccgtctgcgtcggccgctgccgctgcggcggtccgggcggcgcgctcggtcagggacgggccctgctcgagaaagctcgcctgcatttcgtcgacagtgaggactgcttcacgcacgttcatactcgtccgcctccggtttgccgttcgagatcgccagcatcagtcgcgatgccgcctgaagcgatcttccggccatctttgcttgtgagacgaggctagggatttaattcaaattcgtcgatgaaatagagggtaaacaaaacccaattccgaacgaacagttaaaggcgggttgtttgcatcaccagattttccagcaccgcgttaggactttggaagaatcccggattccggacaatctgagtcatcgtttactaagaagcgcgaagtattgctgccgcccattgcaggaccggcaggccgtgcccatcgtagccggcagtccgatccgacctcgatagacacatgggaattcgccgatgcaggccttcgataccgatttgcgcaatcgcatcatcaagctggtgaaggatatccttgagcagaactcgctcactgccgacgtcacgccggaggcaaagctagtcgacgtcggcctgacttcgatggacatggtcaatctgatgctcggcgtcgaagccgagttcgacttcaccatcccgcagtccgagatcacgccggagaatttccagtcggtcgagacgctggagcggatggtcgcgacgcagctgcagctcgcgaacgcggcttaagccgggcgcgcctctttctccgctatcgtccccgcgtatgcggggacctataccgcggaatctcgatcactgacgatcggagtgcccaacgactggtctttgcctgcctgtggttatgggtccctgcgttcgcgggggcgacaccaaatgtgaggctcgcccctccgtccctcacaccaccggcatcacccggccaccccgttccaaaaccgccgcaaaactggcatagctcagccgtgtcacacgtggcggacagggtggagcaggcatgacgcaggcgatattggggatcatcggcggctcgggcatctatgacctgccgggcctcgagggggcccacgaagaggtgatcgctagtccgtggggggagccgtcagcaccattgcggcgcggctccatcgccggtctgccgatcgtgttcctgccgcggcatgacaagggtcaccggctttctccctccgatatcaactatcgcgccaatatcgacgtgctgaagcgcgccggcgtcaccgacctgatctcgctttcggcctgcggttccttcaaggaggaactgccgcccggcaccttcgttctcgtcgaccagttcgtcgaccggacccacaagcgcgagagctcattcttcggccgcggctgcgtcgcacatgtgtccatggcgcacccggtctcgccgcggctgcggctccatctcgcggcggcggctgacgccgagggcatcgcgatcgcccgcggcggcacttatgtctgcatggaggggccgcaattctctacttacgcagagagcatgacctacaaggcccttggctattccgtgatcggcatgaccaatatgcccgaagcgaagctcgcgcgtgaggcggagatctgttacgccaccgtcgcgatggtgacggatttcgattgctggcatcccgatcatgacgccgtcaccgtgcaggacatcattcgcgtgttgacgtcgaacgccgacaaggcgaaggcgctggtggcgcggctggcaagggattttccgcgcgagcacgagccgtgcccgatcggctccgaccgggcgctcgacaccgcgctgatcacggcgcctgaggcgcgcgatccggagcttctgaagaagctcgatgcggtggcgggtcgcatcctgcgcggctgaggcgcaaggcgaagcacaagaaggcagaatgccatgaaggtcgacggcaaacattttcgcagcatctggcgcgagcgcgacggctggtccgtcggcgcgatcgatcagcgccggctgccgcatgagttcgtcatcgcgcgcctgacctcgtgtgaagacgcggccgttgcgatccgcgacatgctggtacgcggcgcgccgctgatcggggcgactgccgcctacggcatggccctcgcgatgcgcgaggacgcttccgacgccggtctgaaacgggcctacgacacgctcgtggtcgcacggccaaccgcgatcaatctgaaatgggccctggacgagatacgcaggacgctcgcgccggtcgatcccgttgaaagggcggaagctgcctacgcgcgcgccgacgagatcgccgagcaggatgtcgagatcaatcgcggcattgccggcaacggtctgaagctgatcgaggcgattgcggcgaagaagccgggcgagacggtcaacgtcctcacgcactgcaatgccggttggctcgccaccgtcgactggggcaccgcgacggcgccgatctatctcgcgcacgaacgcggcatcaacgtccatgtctgggtcgacgagacccgcccgcgcaaccagggcgcttcgctcacagcctgggagctcggccatcacggcgtgccgcacacggtcatcccggacaacactggcggacacctgatgcaacatggcatggtcgatctcgtcatcgtcggcaccgaccgcgtcgccgccaatggcgacgtctgcaacaagatcggcacctatctgaaggcgctggccgcgcatgacaacggggtgccgttctatgtcgcgctgccatcgccaacgatcgacttcgccgtccacgacggcatccgcggcatcccgatcgagcagcgcagcggcaccgaggtgaccgacatgaccggccgcaccgcggacggaaggctggagacggtgcgcatcgtcccggaggggtcgccggtcgcgaactacgccttcgacgtgacgccggcacggctcgtcaccggcctgatcaccgagcgcggcgtgctgaagccggatcgagcctcgctggcggctgcgttcccggagcgggtcgcagatgctgcggaatagtgcagtttaccaggcgagatgttgccacgtcattgcgaggggctcttgcgacaagcagcaatgaccaagagtgacgcgccagctagcccagcttgaggcccgtggccttctcgagctcggcgatggcctgggcgccgctcgtcacttttatcgtcgtcatgcccatctcgcgcgcgggcttcaggttcacaccgagatcgtcgagatagacgcagttgttcggatcgacctttagcgtctcgaccatcaattgatatatccgcgggtcgggcttgcgcaggccaatcttggcggattcgatcacgtggtcgaacagcaccatgacctcggcgatgtagagggaacgtccggtcatgctcccgatggcgttggccggaaggttgttggtgatgcagccggtcttgaattgcgccttgatgcgcttcagggcttcgaccatctctggacgtagactgccctgcagcaagggcagcacatcgcgtccgcgtacctccgcgcccagtgcaagcgattccgtggcgaataattcgtcgaaagtgtcgatgtccacctcggcccgctcgaacttggcccaggcgttctccaggtggttggcggcgttggtgcgccggatgatgtcggcgggcagtccgcgctcgatctcgaaccgcgtgaacgcctcgaatggtgagctcgtcagcacgccgccaaaatcaaagatcacagcctcgatcgccaatgtcctgccctcgtcaattcctttccaagagggctagcatgcgctatcggcaagagccagtccgaagccgtcctcctcctcaccggtgctgtcgccggagcgtgttcccatgacgaagcttgccatgttcatcgctgcagcgctgctgctcgccacgcctgcccgtgccatcgtcggtggcggcacgccacaggccgatggtgtcgcgcgtgccgtcgtcaccatcgtcggttcgcgcggcaatttctgcaccggcagcttgattgcaccacgcgtggtcctgacggtcgcgcactgcgtgcaacccggcgccgactacaagatcgttgatcgcggtgctgacggccagccgcaattgttgaacgtgcgtacggtcgcgattcacccgaacttcaacatgcaggcgatgcaggcgcaccgcgccaccgccgacgtggcgctgctgcaactggaaattccactcaagggaaaatccacggtgacagtcggcatgccgacgattccaatccaggtcggcagccgcttcgtcatcgccggtatcggtgtcaccgttcgtggtgacggcaagagcggcggcatgacgcgcgttgccggcctcgttgcgaccgggcggcccggtacgctccaggttcgcctggtcgaccccgtaaccaacggtgttcgcgacggaattggcgcctgcaccggcgattccggcggcccggtattcgaggacaggccgggcggtcccgtgcttgtcggcctcatcagctggtccactgggccgaacggcacggctggttgcggcggattgaccggcgtgacgccgctgacgctctatcgcgagtggatcttgcaggccgcgcggagctggggtgcggcactgtgatttgaccgcgatttgatctatgtcattttgaagcggaagcgcggcgggtgatcatgcccgctgcggaggaaacgcgccgcccagtcaagggcggccacaaaaacaagcaaggcatagaagcaacaatgaatgtcgctgttcgcagtcacgccacggccaagcaggtttctgaacatttcgacgtgttgatcgtcggcgccggcatctccggcatcggcagcgcctatcatctcacgaagcagcttccgggaacgagcttcgtcatcctggaaacccaggcgacgttcgggggcacctggaccacgcatcgctatccaggcatccgctcggacagcgatctccataccttcggctatcgcttcaagccctgggtcggcccgccgatcgcgaccgccgaggagatcctcgcctacatgaacgaggtgatcgaggagaacgatctcgccaagcacattcgctacaagcacaagatcaattccgcgagctggtcgagcgagcagaacctctggaccatcgaggcggtgacgaccgacaccggcaagcccaggaccttcaccgccaacttcctctggatgtgccaaggctactatcgccattccgaaggttacacgccggaatggaagggcatggatcgcttcaagggccgcatcgtccatccgcagacctggccggatgatatcgacttgacgaacaagaaggtggtggtgatcggctcgggcgccacggcggcgacgctggtgccgaacatcgcggacaaatgcgcgcatgtcaccatgctgcagcgctcgccaacctacttccgtctcggccgcaacgccatcgagattgcggaagagctgcgccggcttcaggtcgatgaggcctggatccacgagatcgtgcggcggaagatcctgttcgagcaggatgcgttcacgaagctctgcgtatccaagcccgagcaggtcaagaaggagctgatcggccagatcagcgccgtcctgggtcccgattacgacgtcgagacgcacttcacgccgaaataccggccttggcggcagcgcatcgccttcgtgccggatgccgacctgttcaagggaatcgccagcggcaaggcctcggtcgtgaccgacgagatcgaatgtttcgtcgagaatggcatccagctcaaatcgggcaagctgctggaagccgatgtcgtcgtcaccgcgaccggtttcaatcttgcggcgctcggtgacatcgcgttcgagatcgacggaaaaccgctcgccttcggcgacaccgtcacctatcgcggcatgatgttcacgggcgtgcccaacatggtctgggtgttcggctacttccgtgccagctggaccctgcgcgtcgacctcgtcgccgatttcgtctgcaggctgctcggacacatgaaggccaaaggtgcgaagaaggtcgaggtccagctgcgccccgaggaccacaacatgccgatcctgccctggatcgatccggaaaacttcaatcccggctacatgatgcgcaacatggacctgttgcccaagcgcggcgacaagcccgagtggcaacacagccaggattactggaccgagaaggacgagattccgaagacggatctggacgacaaggcgttcgtctacgggtgaggacgttgtcggtgtagcgggggagcgctcgctacacactgtcgtcccggggcgcgaagcgaacccgggaccatagcgacagggactggttacgaagcgagcgggtcactcaggtcttcgccaaacctcttcctgtggctatggggtccggatttgcgcttcgcttgtccgggacgacagcggttgttggaccagcggcgtctcaacccattcagaccacagctcacgaattcctccgcgtcgcattcgtcgcaatcgccgctgcagccgtccggttttccacgccgagcttggcgtagatctgctcgagatgcttgtcgaccgtgcgcgggctgaggcccagaatttgcgcgatgtcgcggttggtcttgcccttgctgagccaggccagcacctcgccctcccgggtggtgaggcccagctcgctcgtgaattcgggcggcagcgcggtgccggattcccgggagagccgcagcaggaactcgtttggcgcggtttcgcccatgtagtagagccgaagctgcggattgtcgggcaacgaagctcccggagacttcgcgctgcccttggccttggcctgctcgagccattgcagcagcgccggcggcagcacgaagtcgtccgcttgcgcgccgtgatgatcggacagcagcttctgagcctgcggcgtcgcccagagcacgtggccctggcggttgaccgcgaacagaaatcggccggagacgtcgagtgcggcgcgtgcgctctgggtcagccgggcattgccgagatggacgcgaatgcgcgccagcatctcctcgatcacgatcggcttggtcacgtagtcgacaccaccggcctccagtccacgcacgatatgctcggtctcggcaagaccagtcatgaagatcacggggacattggcaagaccggcatcgcgcttgagccggcggcaggtctcgaaaccgtcgatgccaggcattacggcatcgagtagcacgatgtccggcgtgatctgatcgatgatccgcatcgcggcggcaccgtcgagcgccaccatgaccgtcatgccggcgccgtcgagcgcgtctgtgagcagccgtagcgtctccggggaatcgtcgacaacgagcgcgacgtcgcgcttcttcgactcaatgttcatgcgcgtgcaacgtcttcaatgtagccatatatcgatcgagatcgaagcgatcgaccagcgagcgcatctgtgcgacgaagtcggcatgctccggatgctcggtgccgatctcgtccagcttcaattggatgcccttgacatagccgagctgaccgagcccgatcagcgcctcgatgtgccgcgccggcggctttgacccggtctcggcacgccatagcggcatcggaacctcatacgaaccgtattgccactcaatcttgaggagctggcggatcgtctccaggaggcgtgggatgtcgatcggcttcatcaggtagccgtcgtggaagggctgcgccaacggcgctccgtgggcctccaacgcacttgccgacaccatcaggatgcgcgcctggtgatggccgctctcgcgcaacgcctcggcaacggcccagccgtccatggttggcatcgagatgtcgagcaggaacagatcggggcggcaatgctgcgccagcgcaagacagcccgcaccatcgggcgcgctgagcaggatgaagccgagcggcgtcagcacctcgcgcaggaggtcgcggtgcacggggtcatcgtcggtgacgaggatggtcttgcgggcgccgtgatagccggagaccggcgcctccaccggcgcgatgcgctggggattggtgacctcggagagcaggatcttgaccttgaacgtcgagccagcgccgacggtgctcgtcaccttgatgtcaccgcccatcacgccggcgagcagccggctgatggttagtccaaggccggtgccggtctgcggctgcgagacgccaatctcgccgcgttcgaagggcgcgaagatgcgttcgagatcgtcgccccggatgccggggccggtgtcgattacctcgaattctgcgaccggactgcggtagtgcaccacgaattgcacgctgcccgactgcgtgaacttgatggcgttcgagagcaggttgatcagcacctgacgcagccgcttctcgtcggcatagaccacgcgcggcagatgcggcggccgcctgaacacgaagtcgatgcccttggctgcggcctggaggcggaacatgccgacgagctggtcgagaaattcgctgagccgcacctcgtcgcgcgacagatacagccgccctgcctcgatcttggagatgtctaggatgccgtcgatcaggccggagagatggtcggcgctacggcggacgacgcggacctggtcgcgcggcttggcgccaagcgtcgtgtcctgctcgagcagctgggcatagccgctgatcgcgttcagcggtgagcgcagctcgtggctcaggcccaccacgtaccggctcttggcgaggttggccgattcggcaacctccttggcccgctggagctccgcatccgtgcgcttgtgcgcgtcgatctcctggatcagcagcgcggtctgacgccgcgtctcggcttctgcggcccggcggctctgttgcgccagcacgaacagccatgcaaccacgccgatgatgatgctgagtgagaagaacaccttccagagcacgtcggaaaccagcgcattctcgccatgcacgcttgctgaagtctgcagatagatcagccccagcaccagcgcgaccaggccggctgagatcacgaacacgccgatataatggccgacctgcgagttgatccgggcgtagatcggctgcggcatcagctttcccagcgcttcagacacctgcgcctggaacctcgcgtgaggcttgcaaaggtcgtggcagcgcgcgtccagcgaacagcagagcgagcagatcggccccgcataggctggacaggaggccatgtcctccggctcgaatgagtgctcgcagatgcagcactggatcgcttcgatattctgccagctccgcttcggcttgcgtgcaatgtagtacctgccgtctgtcgcccaggcgatcagcggcgcggcgaagaaggcggccgcaagtgcgatgaaggccgacagcgccttcgcggtgggtccgaacaggccgtagaacgcgctgatggagacgatggtcgccaatgtcatcgcgccgacgccgaccggattgacgtcgtagaggtgcgcgcgcttgaactcgatctgctgtggtcgcaatccaagcggcttgttgacgacgaggtcggcgaccagtgcgccgacccaggcgatcgcgacgttcgaatagagcgccagagtttgctccagcgccttgtagacgccgatctccatcagcagcagcgccacgatgacgttgaagaccagccagaccacgcgtccgggatggctgtgggtcaggcgcgagaagaaattcgaccaggcgatcgagccggcataggcattcgtgacgttgatcttgacttgcgacaggatcacgaacgtgccggtcaacgccagcgcgagctcgggctgcgacagcacatagcggaacgcttcgagatacatgtgcgccggctcggcggcctcctcgggcggcacgccgtggctgagtgcgaagaaggccagaaacgagccggccaggagcttcagcgcgccaagtacgatccagcccggtcctgcgctcatcagcgcgatccaccaggagaccctcgaagcgcggcgatcgcgcggcaggaagcgcaggaaatccacctgttcaccgatttgcgcgaccagcgagaacacgaccgaggcggcaacgccgaacagcaacaggtcgaaatgtccgttgaggtcgccgtggtcgcccgagaacttgcgccactccgtaaatgagttcgggttatgccaggcgatagccgcgaacgggatgatgtgaaggatcacccacagcggctgcgtccacaattggaagcggctgatcagcgtgatgccgtaggccaccagcggtatgatcacgacggcgctgacgagatagccgaccggccgcggaatcccgaagcacatctcgagcgcggatgcgagaatcacggcttcgatggcgaagaagatgaaggtaaaggacgcgtagatcagcgaggtgacggtcgagccgatatagccgaatccggcccctcgcgtcagcaggtcgatgtcgatgccgcatttggcggcatagtacgcgatcggcacgccgcagcaaaagatgatcagagagaccacgaggatggcggcggtcgcattggtgacgccatagttcagggtgatggtgcctccgatcgcctccatcgccaggaacgagatcgcgcccagcgcggtgttggcgacccgggcggcggaccagcggcgcgcgctcttcgccgtgaagcgcagcgcgtagtcttccagcgtctggttggcgacccattggttgtactggcgcctgacgcggtctattcgctgccgccctgccacgctttaccccacttccgataccggcccggagccctcgcaaattccgtaccagaagcctacgtcggcattttgcggtgcagtatacgcgatcttgcgtatgcttgagctgcatgaattcgagccatcctcacggcaccaaacgcgtgttctcgaacaaaagtgggggtgctcatgtcagacgaagcaaacaaaggcccgttgtcgccgctccggcgcaagttgctgatggggatggcggccgtgccggccatcacgatgctgccgcgggcgtcctttgcacaggcgccggcgacctcggcggtcaacaccaccggccttgccgtcaccgacaccgaggtcacggtcggcatcctgcattcggcgaccggcaccatggcgatctccgagaccggctcgatccaggccgagaagctcgcgatcgagcagatcaatgccgcgggcggcgtgctcggccgcaagatcaagttcatccaggaggacggcgcttcggactggccgaccttcgccgagaaggcgaaaaagctcctcgtcaacgacaaggtcgcggcgatcatgggctgctggacctcggcctcccgcaaggcggtgctgccggtcgtcgagcaatataacggcatgctctactacccgaccttctacgaaggcctcgagcaatccaagaacgtgatctacaccggccaggaggcgacccagcaaattctggcgggtctcaactggatcgccaaggagaagggcgccaagtccttcttcttcatcggctcggactacatctggccgcgcacctccaacaagatcgcccgcaagcatgtcgagaacgtgctcaagggcaaggtcgtcggcgaggaatattatgcgctcggctcgacgcagttcaactccgtcatcaacaagatcaagctgaccaagccggacgtgatcttcaccgacgtcgtcggcggctccaacgtcgcgttctacaagcagctcaaggcggccggcatcgacctttcgaagcagccgctgctcacgatctcggtgacagaggacgagatcgacggtatcggcggcgagaacatcgcaggcgcgtatgcctgcatgaagtacttccagtcgctcgacaacccgaacaacaaggctttcgtctcggcgttcaagaagatgtggggcgagaagaccgtgatcggagatgtcacccaggctgcgtatctcggcccgtggctgtggaagctcaccgtcgagaaagccggctccttcgacgtggacaagatcgccgccgcctcgccgggcgtcgagttcaagggggcgccggaaggctatgtgcgcatccacgagaaccatcacctctggtcgaagacgcgggttggccgcgccaagctcgatggccagttcgagctgatctacgagaccgccgacctggtcgagccggatccgttcccgaagggctaccagtaagggccgcggcttccgccgcactttccctcacgacaaaaccgctccctggcgtggattgcaagtccatgcccaagaccccgcgtcgcgactctgcatcgcgacgcggnnnnnnnnnnacccttacccccgacggaggatatcgatgttcggcgactactcgcttggtgatcttggctcgatcttcgtcatgcagggctttgccgggctgatcctgttctcggtctacgtgctgatggcgctcggtctcgcgatcatcttcggccagatgggcgtcatcaacatggcccatggcgagttcatgatcctcggggcctacgtcacctggatgacttcgaatttcttccagtcctatttgccgagcctgttcagcggctacttcttcctcgcgatgattctggccttcttcgcctccggcgcgctggggatgttggtggagtgggtgctgatacggcacctttacaagcgcccgctcgatacgctgctggccacctggggtctcagcctgatgctgcagcaggcctatcgctccgtgttcggcgcgcgcgaggtcggcgtcgagctgccgcagtggatgctcggctcgctgcgcgtcaccgacagcatcgaggtgcccatcaacggcatattcgtgatgggcctcaccgtgctgattaccatttccgtcgcctacgttctctacatgtcgcgctggggccgccaggtgcgcgcggtcgtgcaaaaccgcatcatggccggcgcggtcggcatcaacaccgagaaggtcgatcgctacactttcgggctcggctgcggcatcgcgggcgtcgccggcagcgccttcaccatgatcggctcgaccgggccgacgtcgggacagctctacatcgtggacacattcctggtcgtcgtgttcggcggcgccgccagcctgctcggcaccatcgcctccgccttctcgatctcgcagacgcaatcgaccctcgaattctttatgtcgggctcgatggccaaggtgctcacgctgctcgccgtcgtcggcatcctgatgctgcggccgcagggtctcttcgccctcaaagtccgcaaataacgagaagcaggcaagtcatgatcatcaactcacgcttcttcaatcgatccgagctcatgggcttcattgccctggcggtggtgctgttcgtgatcctgccgctgaccctcgacgtgttccgcctcaatctggtcgcgaaatacctgacctacgccttcgtcgcgatcggcctcgtgctgtgctggggctatggcggcatcttgagcctggggcagggcgtgttcttcggcctcggcggctattgcatggcgatgttcctcaagctcgaggcctccagcgtcgagaacaccaagatccagtcgacgcccggcatccccgatttcatggactggaatcagatcacggcactgcccttcttctggcagccgtttcacagcctcaccttcaccatcctcgccatcgtcctggtacctggcctgttcgccctgatcatcggcaccgcgatgttcaagcgtcgcgtcggcggcacctatttcgcgatcatcacccaggccgtcgccgccattctaaccatcctgatcgtcggtcagcagggctataccggcggcatcaacggcatgaccgacctgcgcacgctcaagggttgggacatccggcccgaccatgccaagatcatcctctacttcgtcgaggtggtgctgctgttcgcctgcatcggcatcgcgcagttcatccgcctgaccaagcttggccgcatcctggtcgccatgcgcgagcaggaagaccgtgtccgcttctccggctatagcgtggccaacttcaagatcttcgctttctgcatggccgcggtcttcgccgcgatcggcggtgccatgttcgcgctcaatgtcggtttcatgtcgccatccttcgtcggcatcgtgccgtcgatcgagatggtgatctacaccgcggtcggcggacggatgtcgatcttcggcgcgatatggggggcgatcctggtcaacttcgccaagaccagcctctctgaatccttcccgcagctctggctgttcggccttggcgcgctgttcatcgcggtcgtgctcgccttcccgaacggcttgtccgggctgtgggcagactacgtgcagccccgcatcgaccggctgttcgcctcgcgcaaggcgaaggcgggctggaacggcaattcggtcgccgacagcgcaccggcagagtgaggagatcgtcatgctcgtcggacatcagcccaaggatttcctgctcgcggtctccggactgaccgtctcgttcgacgggttcaaggcggtcaacgatctctccttctacgtcgaggagaacgagatccgggtcatcatcggccccaatggcgccggcaagaccacggtgctcgacctgatctgcggcaagaccaaggcgacctcgggctcgatccagtttcgtggcaaggagctcacgaagatgaaggagaacgagatcgtgcaaaccggcgtcggacgcaagttccagacgccgtcggtgttcgaggacctcaccgtgttcgagaacctcgagatctcgttcccgcgcggtcgcaccgtgttcggttcgctgacctttcagcgcgatcagttggtgaaggaccgggtcgaggaggtcgccgagatgatcttcctcaaggacaggctcaacacctatgccgacgagctcagccatggccagaagcagtggctcgagatcggcatgctgctgatccaggatccggacttgctgatgctcgacgagcccgtcgccggcatgagcgtgtccgaacgcgccaagaccgccgagctgctcaaccgcatcatcaagaaccgttcggtgctggtgatcgagcacgacatgaaattcgtcgaggatatcgcgcacaaggtcaccgtgctgcaccagggccagatcctttcggaggggacgatggagaaggtcaagaatgaccccaaggtcgtcgaagtctatctggggcattgagagatggcgaaatcgagtgagctagtcgcggctcggacggtgcacctctctccttgtgggagaggtccgaccgcgcaagcgatccgggtgagaggtatctctccgcgcatcagaccgccgttcgtattcgcagatgtggacccctcatccgtcgcgggcttcgcccgagccaccttctcccacaaggggagaaggaaggcataccgagcctaggagcgcaccgatgctggcaatttccgatctccacgtcgcctacggccagagcgaggtgctgcacgggctcaatgtcaaggtcgcgcccaacgagatcgtcgcgatcatgggccgcaacggcatgggcaagaccacgctgatgaagtcgctgatgggcattctgcccgcgaagagcggctcggtgagcatggatggcgccgagctcggcaatctcaagagctacgagcgcgtcgccaagggcctcgcctatgtgccgcagggtcgcatgatcttctccaccatgacggtgaaggagaacatcgagacaggcctcgtcgtgtccggtggatcggaggtgccggacgatatctacgaactgttcccggtgctgctggagatgaaaggccgccgcggcggcaatctctccggcggtcagcagcaacagctcgccattgcccgcgcactcgcgaccaagccgaaggtgctgctgctggacgagccgaccgaaggcatccagccctccatcatcaaggagatggcgcgcaccttgaagcgcatccgcgacgagaagggtctttcgatcgtcgtgtccgagcaggtgctgagctttgcgctcgatatcgccgaccgcgtgctggtgatcgagaacggcgagatcgtgcgcgacgatccgcgcgacgccgtcgatgccgcacaggtctcgaaatatctgtccgtctaaccaaccgtagtcaaaggggagcctctcgatgccagagacactgatcaaggtcgatctcaccaagtcggcctatgaaaacgacatggtgcacaaccgctggcaccccgacattccgatcgtggcgtgggtcaatcctggcgacgatttcatcatcgagacctatgactggaccggcggcttcatcaagaacaacgattccgccgacgacgtccgcgacattgatctgtcgatcgtgcacttcctctcgggtccgatcggcgtcaagggtgccgagcccggcgaccttcttgtcgtcgatctgctcgatgtcggcccgctcaaggagagcctgtgggggttcaacggcttcttctccaagcagaacggcggcggcttcctgaccgatcatttcccgctggcgcagaagtcgatctgggacatcaagggtctctatacctcctcccgccacgtgcccggcgtcaattttgccggcttgatccatcccggcctgatcggctgtctgcccgatccgaagatgctggagacctggaacaagcgcgaggccgaactgatctcgaccaatccgacccgcgtgcctggtctggccaatccgcccttcgcggcaaccgcccatggcggccgcgccaagggagacgtgaaggccaagatcggcgccgaaggtgcgcgcaccgtcccgccgcgcgagcatggcggcaattgcgacatcaaggacctctcgcgcggctcgaagatctacttcccggtctacgtgcccggcgccggcctctcgatgggcgatttgcacttcagccagggcgacggcgagatcaccttctgtggtgcgatcgagatggccggctggctgcacctgaaggtcgaggtgatcaaggatggcatgtcgaaatacggcatcaagaatccgatcttcaagccgtcgccgatcacgccgaactacaaggattatctcatcttcgaaggcatctcggtcgacgaggccggcaagcagcattacctcgacgtccatatcgcctatcgccaggcctgtctcaacgccatcgagtatctgaagaagttcggctattccggcgcccaggcctattcgatcctcggtactgcgccgtgccagggccacatttccggcgtcgtcgacgtgcccaacgcctgcgccacgctgtggctgccgacggagatattcgacttcgacgtcatgccgtcggcggcgggcccgatcaagcacatcaccggcgacatccagatgccgatctctccggacaagtaatccctgcgcgaggggatgcgggacggccggcgtttcgtccgtcctgcatcaaccgccaggtgtgttgaacaggcaagatgcgtggggatgatgcgatgccagtctacgaatatctctgtgacgattgcggacctttcaaggacctgcgtccgatggcggagtgcgacgatccgcaagcctgcccgcattgcgagacgctggcgccacgggtgatcctgaccgcaccgaatttcttctgcatgccggccgacaggcgcaaggcgcacgcggtcaacgagcgcagcacgcacgcaccgcagacgctggcacaatacaaggcctcgcatggccccggttgcggctgctgctcgacgggcaagaccgtcaaggacaagggcgcgacggacaggaaaaagcccacgcggttggtgaccaagaccaggagcggcgccaagggttttccgacggcgcggccctggatgatcagccactaaccagacgcgatgacctcacacggatagaagacaggagcggtcaacatgcttcacggcgacatttccagcagcaatgacacggtcggcgtcgcggtggtgaactacaagatgccccggctgcataccaaggccgaggtgctcgagaacgcccgcaagatcgccgacatgatcgtgggcatgaaggtcggcctgcccggcatggatctcgtgattttcccggaatattccacgcaaggcatcatgtacgactccaaggagatgtacgagacggcgtccatggtgccgggcgaggaaaccgcgattttcgccgaggcctgccgcaaggcgaaagtgtggggcgtgttctcgctcaccggtgaacgccacgaggagcatccgcacaaggcgccctacaacactctcatcctgatgaacgacaagggtgagatcgtgcagaagtaccgcaagatcatgccctgggtcccgatcgagggctggtatcccggcaattgcacctatgtctcggaggggccaaagggtctcaaggtcagcctgatcatctgcgacgacggcaattatccggaaatctggcgcgactgcgccatgaagggcgccgaactgatcgtgcgttgccagggctacatgtatccggccaaggagcagcaggtcatgatctccaaggcgatggcgtgggccaacaacgtctatgtcgcggtcgccaatgcggccggcttcgacggcgtctattcctatttcggccattccgccatcatcggcttcgacggccgcacgctcggcgagtgcggcgaggaggattacggcatccagtacgcccagctctccaagcatctgatccgggatgcgcgccgcaacggtcagtcccagaatcatctctacaagctggtccaccgcggctacaccggcatgatcaattccggtgacagtccgcgtggcgtcgcggcgtgcccgtatgacttctacaagaactggatcaaggaccccgagggcacgcgggacatggtcgaggcgatgacccgctcgacaccggggaccgacgagtgtccgatcgatggcattccgaacggagcggctccaagcaattactgaggcattgctgccgcacgtcgcgggatcgtacgccgacagagccttgtgcgccacgcgtgggctgagctagcgcctctgctccgtaggcctgcgcggtggtcgcggcggcacgggggtccccgccatcttgttggcggtctcgctgacatcgagcagcgagcggcggatgtcctcgatgtagcccgccgacttcttcttcatggtgccggcaagctcatgcagttccttgatcttctcgaacagttcgtcggccttgccatcgacgaagcctgggaccgcgccctcgatcttcgcgaccgccttgtcgaagcccgcgaaggcgctgtcgaccttggccatgacggagtcgatttctccgcccttgctcctgaggtcggcggtatagctctcgaacgtgtgcagtccctccttgatcgcgggggcgttgctcacgatggtgcgatcaacattgtgcagcgtctccacgatggactcggcgtcgctgagatcggcggtcaatatggggatgccgtccgcgtcaagcggcaccggcggtgcggagggggcgccgccgatcagcgagatcgcggcgatgccggtgagaccctggaactcgatgcctgcgacggtgtccttgcggatcggcgcgctgttgtcgagcatcaccagcgccacgatcctgcggggactatccagcttgatcgactggatttggccgaccggtacaccgtcgaaattgaccggcccgccgcgccgcagtccgctcgcggaaccgccttcgaacaccacgcgcaattggctgcggctctggatggtgcgccatttctgcacgccgagcaggccgccgaatgccacggcgatcgccgccagcatcgccgttccgatcacaagattgctcgcgcgtgccatggagggcgattctaggcccaaagcggggaagttggaaggagttcgctacgttaagtaggccgggttagcgaagcgtaacgcaccgatgctcatgcggatggaccgagttggcggacgatcccagtggcaatcctcccaatggcacctcaatgtccggccgcgtgcctcgccgcggcgttgttgaggacgatcagggcatcgaccgccacgcccgtcctggtgttgatgagaaacgggttgatgtcgaccgaggcgatccggtcgccggcgtctgcgatcaggttggacaggccgaccagcgcctttagcgccgaggcttcgtgcaaggccggcttgccgcgatagccgcgcatcttgatgccggccttggtgcggccgatcaggagctgcgcctcggcttcatccaggggcgcgccggcgagtgcgacgtccttcatcagttcgatgtcgatgccgccggtcccgaacagcacgacgggccccatctcggcgtcgagcgaggcgccgatcacgagctccagctccgccttgacctgctgcgcgatcagaatgccgtcgagcctcggcttgcccttgagcttcgctacccgcgccgtgatgtcggcgaacgcctttttcacctccgccgcgctgttgatattcaggaccacgccgccgatgtcggacttgtgcagaatctctgcgctgacgacctttgccacgaccgggaatccgatctgcctggcgattttcacggcctccgccgcagtctgtgcgatcgcctccttcgaaatcgggatgccataggccttgaggagcttcttcgaggcgacctcgtcgagcgcggcgccggtcgccgacctcaaggtcttctccagcacggcgcgcgcggcgggcttcgagctcgagacgatgtcgggcacctccttgcgcagtttcgcatagtcgagcagcgacttgatcgcggtcaccgcgcggtcgaggccctgcatgaccgcgagatgcggcagcgatttgcgcaattctttagtgaattcagtgaaaccgatcgacatcgcgctgatatagatcacgggctttccggccttgctcgccatatcgttgacgatacgcaaattgcgctcgcgcagctcgtgctgcgctttcggcagctccgcatcgacgatgacgatgtcgatatcggggtcgtcgatcatcagcttgatcgacttcatatagacagagggatcgacgactgcggcaaagccggcgtcgagcggattgccgacgatcgagcccggaccgagcatcttcgccagctcggagctgacatgcgcgctcagcggcgcgaagttcaagcctgctgcgtagaaggcgtcgatcagcatgccgcgcttgccgccggagagcgtgacggcggcgagccggtcgcctttgggcacggtcgcgtgaacgaagcattcggtcgtctcgatcagttcgtcgagcccggcgacccggatcacgccctcgcgcgtggcaatcgcgtcgaacgtctctatcgagcccgcgagcgcgccggtatgcgccatcgccgcggcgcggccgccctcggacgcgccgagcttgagggcgatcaccggcttgctcgcggcgcgcgccgccttgcaggcttcgcgaaaagccttcgtgttccgcacgccttcgaggtagacgacgatcaccttgatgctcgggtcttcggcgaaatagcgcatcaggtccggcgtctcgagcccggcctcgttgccagtcgtcaccatgtagccgacaccgacgccgcgatcctcgagcgcctgacggatcgccatgacgatggcgccggattgtccggcgatcgccaccgcgccctgttccatggtgacgatacgatcgtcgatattggtgaagagcttttcgccggcgctcagattgccgaggcaattcggcccggtgacggcaagacccgtctcgcgcacggccgcctgcaattcggcggcaagcttttggctttcctcatcctgcagttcgctgaagcctgaggtaacgatggtggcagaacgagcgccggccgcggcagcgtcgcgaattacctgcacggcgaaacgtgcaggcaccagcaccaggacgtgatcgggcttttcgggtaggctcgcaaagtccttgtagcagggcacgccccagatggcttcgcgcttggcgttgaccgggtagagaccgccctcaaatccgtatttgaccagattgttccagatgcgctcggcgtagttgccgggcttgtcggtcgcacctaccagcacgatgttgcgcgggtgcagcatggcgtggatgcccttgacgatgtcactggcatcgggcggcggagaccatggatggaacgcggacgcagcagacacctgggcttccatggcgtgacctcacctgttgttcttcttggttgagcgccactccgttctatggcgagtccttcggagtcgcaacctcgcgggcggtatgccgccagatggaatgagcgatccagggcgcgtctcgtcgattcggtaagcgatctacctatcggctccaatcaatgttgcatgcagaatgtagcgctcgggaccgggggtgacggcgtcgaacggccagcaggtcgcgagaatgagttcgtagccctgcgtcgtggcttcgatgcccgatgcatcgaaacggaccacggcggaggcgtccgcgcgatagcgaaaatgttgaccgtcgcgacgtgtgacgtcgatgacgtcgccaatggcaacgttccgcaggaagcggaaatgagtgtcacgatgggctgcatagacggcaatcccgcgttcgccggcatcggccgtttggtggacgtggccgggtccaaaagcgagggcctgtccgctggtgccttccagcacgatggcgctggcgccgatccgcttgacctcgatccgcgcgaccggccaggtgtcagcccacgaccatggcttgacggcctctcccgtcgcaacgctccgctcgaacgcccgctccagcaacacctgcgccagccaggccttggcgtggatgtaagcgccgtcgccgagcaggaggaggccgatcaaggccagcacgagggggaagatgaagcggggcatctgcttctctttggtggtcattccgggatcgatgcttcgcatcgcccccgaagcggcatttcccaaaaaggcgcgcgcggccgtttgcaggggacgggcagccgcgcgcgctgacagaggagttcggggagctcctctctcaagcggagtcggtgagcaaggtccgacgccggttgaacacgaacagggtcaaggcgagcaggatcaggattgcgcctgcgaacatcctgagctcggccggagttgaggttttgggcaggcggatcgcatcgggtgcggcgggtgccgggcgcctcagcgctggcggagtgcccgcatcggcgtggcgttcgcgcaattgcgccgggacctgcggccgttcgccgaagatcttctcgaagtcccagcccgccggcaggttgatcggcaattcttcgagcttgagcggcgcgccttcgggccggctcggcgtcttgtcgaccgcaacgaggctggtgagccgcgtgacgatctggtgatcgagcgccagcgccaggatcgtcttgtcggcgttctccggcgacgtctcgcgcagcgtgcgcgccacttccgcatcagcgatcttgcgcctggcccagagcttggagaggcccttgccttcggcggcgttttgcagcggcaacgttaccgtccaggggcggtcgccgacgcggcccttgatctcgagcgagcctgcgagcttgtcgagtttcgccgccagcaccaacggctcgtcgcgatagacgtcgggaatgatcgcgggagtgacatcggcggtggcttcggagaaccttgcggtgaggccggtcacggccgggttctccagcttggcgaacagaccgcgcatgcgctcctccacctgctcgacggagccgatgtgggtgaaggcaccgcggccgagctcggcggcgcgtgtcatcagataggtgttgggcgcggaaccgatgccgaccatgaacacgcgcgagcggccgcgcatcgccgtgatcgtctcgaacaattgctgctcgttgccgatcgcgccgtctgtcaggaacacgatctgacgaaccatgtcggtgccgcccagcttgtcggtgagggccgcgcgcattgccggcaccatctcggtgccgccccgcgcctgcaaggcgctgacgaaggaggtcgcctcaccgacatgcgcggcatccgccggcacggaagccggaaacagcacgtccatggtgtcgtcgaagcggatgacgttgaagcggtcattcggctgcaggcgaccgagagcataaaggaggctcgctttggcctgaacgatggacgtgccgcccatcgagcccgaattgtcgatcacgaacaccacctcgcgcgccggcggcttgcgcgccgcctggtccgcgccaggcggggtgacgaaggcgagcaggtagtcggcatcgccgatccgctcgtggaacaggccgaccgaaggcgccttctccgcggccggtttccaggtcagttcaaagtcgcggtcggcggggactgcgccgtcggaaagcgtgacgatgcgcgtagcgctgtccggactctcgaccctgacgttatgatggtggctcttgatatcgccgagtgggaagccagccttcaggcgcacggtgatgctggtcggattgaccggcgcatgttttgcgggatccagcacctccggcgaaatacgctcacgatccggaaccggatctgacgtcgctgcgccccagccggagccgtccctgcggaagtcgacgctctgcacgatcggtgccggattgtagcgcggtccgaccacgagcggcaggcgcaacgaatattccctgccggattgatgcaccggctcctggtactcgatctgaaccagcacggtttcgccaggcccgatattggccaccgagttggtgaagatgttcggtcgttcctgctcggtaagggcggccttccggccggtgcggcgcgcctcctcgtagatcacgcgcgcctgctgccgctccttgatgttgccgatgatgacgcggtcgccgaccaccatcttcagcgtatcgacggcgccgccggtcgcgagcggatagacgtaagtcgcctcgacccagtccttgctcgtgttgcggaagacctgcgtgacacgggcgcgcagcgtcgggccggacaccgtgatgtcaacgtcggtgccgaggcggactgcttcggcatacgcgccgtcttccttcaggagcagggtaccagaccttgcatcgccgggctggagcagactggcctgttcggtcgttgccgacaaacttgtcccgaagctcaccagcagggcgatgaaggcgaccagcatcaccgcaacgccttgcgcgaggaggaacaatccgaccttgatgagacgactcaacaaggggtgctcgtcgctatcggccgtgtcgtaggtgtccatttgcattgctcccgaagcatgttctgctagccctcagcatcggttcggagaggctgatctcgcgagcagaatgatcggcaatgttccgccgcgcccggcccgggctcgtttgtcggggacggtcatgtgcggttttgtgctggtttgtccgccctgctagaatggcgctgctggagcagggctaacgatgcagacgcaggataaagtcaccgacaagcagcttacggacgagcaaagccgcgagattgccgagaccattcgcgaggagctcgccagacggcggatctcccggcaggcgctggccgagcaggccaagctcagcctgtcgacgctggaaaaggtgcttggcggccgacggccgttcacgctcgcgaccacggtccggctggagcaggcactcggcgtctccctgcgcagaagcgcagtcatggtgacgcctctggccgcgagcgatgtcgcgcccgacagcctcggctcctatgcgcatcgcgcggtcacctggctcgaggacgtctatgtcaccctgcggccctcgttcggcgacaaggatgcgatctttgcctatcgcaccgagatcgtgtgggagccgaaggtctcgtcgctggtctttcgggagggcgatcggaccgatgccgcctacgagcataccggcgaagtcgccgttccccatcagtccggcttcatctacctcgtcatcatcaagcacggccagcaccgcgtgatcacggtgtcgcggccgacggtttccggcgagatgtacggcatcatctcgacgctccgcgccgggcccggttcgcagctcacgccgatcgctgcgcccattgcctatgtgccgctcaggaacatcccgaacccgtccttggggcgcgtcgcgcccgacgacggcaactacgccctgtatcgaaagcatttgcgtcggacggtggaagagccctttgcgctcttcctgccggcatagcctggctccgagatcacctgcacaaaaaagatagcggccttccggccgctatctgggttggttaattcagctgatgcgagctagccgcccgtttccgcgctgatgatatcaccgaacagctcccactggccggccttgaagcggatcatcttgagctgctcgatcggcgcgaagtcgttgggaccggtgttgatcttgatacctggaatcaacgtgtcgggcgcaaagtccttcaggctcgcggcctgcttcatcacgttctcccgcgtcaggttgtcgccgcactgcttcaaggtctggaccagggtctgcgcggcggcatagccgtagacgatgttggtgtcggcgacgttggcgcccggcatgtacttgtcgacgaaggcgagaaacttcttcatgccctcgtcgtccttccattgcgggtccgatgcgtccttcagatagctcgccgacagcacgccttccgacgcgtcgagcccggcaggcttcatcactgcgccgatcgagatcgagacgtccgtcatcacgtgcataggcctccattcgagctcggcgatcttcttgatcgcctgcgcggcaaatttcggcgtcgagatgttgacgaacacgttggcgccggtgcccttcagcttgacgatgtgggaatcgatcgacggctcggtggtctcatagctctcctccgcgacgatcagcgaggaggccttctcgccaaagatctccttgatgccggcgacgtaatccttgccgaaatcgtcattggcatagaagatcgcgaccttggcatcgggcttggcctggaggatgtacttggcgaagatccgcgcctcgacccggtagcttggctggaagcccatggtccagggaaagcccttcgggtcgttccatttgctggcacccgtggccaggaagagctgcggcactttcttcgcgttgtgatatttctgcacggccgtctgtgtcggcgtgcccagcgcgttgaagaccagaaatacctcgtcgctctcgatcagcttgcgcacctgctccacggtcttgggcggcgaatagccgtcatcataggagatccagttgatcttgcgcccgttgatgccgccctggtcattgatcatcttgaaataggcttcctcggtcttgccgatgatgccgtaggcggaagccggaccggaataggcttcgacattgccgatcttgatctcggtgtcgctggcgccggtgtcgtacttcttctgcgcaaaggcgctttgagccgagagcaaggtcagggccgttgccgccgcgagcagggcgattttcttgttcttcatggaaattccttggagtttcttgttgagtaggcaggcacgtcaaaagaaaagcgccccgcgaggggcgcttcgatcaggcgttggcgactttcttgtcgatctctgaggcgaccgagaactccttgcgcaaggtgggtttgtggatcttgccggtggcgttgcgcggcagcgcatcgacgaagcggatttggcgcgggcatttgaaacgcgcgagattggccgcgcaatgggcgaaaacctcgccctccgtcagcttctgtcctggcttgacggcgacgatggcaaggcccacctcgccccactgagcatcagggatgccgatcacggcagcctcggcgatggcattgagctggtgcaggacgttctcgacctcggccgggtagacgttctcgccgccggaaatgtacatgtccttccagcgatcgacgatgtagtagaagccttcttcgtccacgcgcgtggcgtcacccgtatgcagccagccgtcggtgaaggaggtcttgttcgcctccggcctgttccaatagccgggcgtgatgttggggcccttgacccagagctcgccgagttcgccgacatcggcatcgctgccgtcggggcggacgatacgcacctcggtgtgcagcaccggcttgccggcggagccggccttgcgcgccgcgtcctcgcggtcgagcaccagcacggccggtgaggtctcggtcatgccgtagccctgctgtagcgcgacaccgcgcgcctcccatactttcagcagcggtaccggcattggtgcgccgccgacaccgccgacaatgagccggctgagatcggtggtcgcgaatgccggatgctgcgccatgaactggtagatcgcgggcacgccgaagaacacgttgatgccctgcgcgggatcgttgatcaggccgagtgcggtgccgggatcgaaggcgcgcatgatcatcacggtgccgccggcatgcagcacgggattggtatagcagttgagcccgccggtgtggaacagcggcagcacggtgagcagcaccgaggcggggccgatgcaggcgggaccgccgagattgacgcaattccagaaggtcatgccatgggtgatggtcgcgcccttgggatgcccggtcgtgccggacgtgtacatgacggtcgagacgtcatcgagcgtgacttcctcggctcggtcgagcgggtttgcggcggcgattccggcctcgtaggcgccccccgggccgagcagcaggctggtcggaacgttgcagagctttgcgacggcgagcgcggtctcggccaggtcggcgtcatggatcatcaccttcggcgcgcagtcggacgtgatgaactggagctcgggaacggtaaggcgggtgttcagcggcacgaagatggcgcctagccgcccgcacgcgaattgcacctcgagcgtatcggtcgtgttcaacgccagcactgcgacgcgatcgccgcgcgagacgccgagccggtggcgcagaaacgaggccaggcgcgagacgcgggcatccagctgagaataggtgaagcggcgatcgctcgcgagatcgatcaccgcgaccttgttcggcgtgcggcggccatgatgggcgatccaatcgtagtaacgaacggccaagaattcctccatcggcggccttgtgccgcccacttcctgctgcacgatgcaccatgcccggcgtggccctcgggccagccggagtctgtgcagcaacgtttttttgcgccagagttggcctgtgcgcggcgaaaatcgtcttgcgttgagttgctagtttgctcctcgcccggaagctcgactgcggtcagccactccgcgcaagtgagccgtcaaggttccagccatggtggacgagcgaatcccaacagggcgagactgcgatgaagagcccgttctataccgccgagcatgacgccttccgcgacgtcatgcgacgtttcgtcgagaaggagatcaccccgttcgctcatgaatgggacgaggccggtgaattcccgcgcgcgctctatcgcaaggccgccgagatcggcctcttgggactcggctttcccgaggaatatggcgggattgccgccgaccagttcatgaagatcgttgcgagccaagagctcgcacgggccggtgccggcggcgtcagtgccagcctgatgagccacaccatcggctcgccgccgatcgcccgggcagcccgccccgcggtcaaggcacgggtgttgccgcaaattcttgcaggcgagaagatctccgcgctcgcgatcaccgagccgggtggcggctccgacgtcgcgaacctgagcacccgggcgcggcgcgacggcgatcactacgtcgtgagcggcgaaaagaccttcatcacctcggggatgcgcgccgactatctgaccgttgcggtgcgcaccggcggcgagggcgctggcggcgtcagcctgctcctgatcgagggcaacacgcccggcctgtccaggaccaagctcaagaagatgggctggtgggcctccgacaccgcgacgctgcatttcgacgagtgccgcgtgccggccgaaaacctcatcggcgaggaggggcagggcttcaagatcatcatgcagaacttcaacagcgagcgcatgggcatggcggcgagttgcaccgctttcgcccgcgtctgcctcgatgaggcgatcgcttacgcaaaggagcgcaagaccttcggcaagccgctggcgcagcaccaggtcatcaggcacaagatcgtcgacatggcgcagaaggttgcggcctcgcaagcgatgctggagatgctggcctggcggcttgagcagggcgaaagcccggtcgcggagatctgcatgatgaagaaccaggcgacgcagaccatggccttctgcgcctccgaggcggtgcagatcttcggcggtgccggcttcatgcgcggcatcaaggccgagcgcatctaccgcgaggtcaaggtcaatgccatcggcggcggcaccgaggagatcatgaaggatctggcgtcgcggcagatggggctgtgatcgatgccgtcgttccggggcgtgcgcggcgcgcatgagcccggaatccatcgggccgcacgtgtcgtagaagaatgtattccgggtttgacgctgcgcgtcgccccggaatgacgagaggatcgaatgctattcaaagctgaccacgacgatatccgccgcagcctgcaaaagttcatcgcgaacgagatcaatcctcatgtcgatgaatgggagaaggccgacatcttcccggcgcatgagctgttcaagaaaatgggcaatctcggcttcctcgggctgaacaagcccgcggagttcggcggatcgggcctcgactattcctatgcgctgatgatggcggaggagcttggcgcgattacctgcggcggcgtgccgatggcgatcggggtccagaccgacatggcgacgcccgcgctggcgcggttcggctcggatgaggtgcggcgcgagtttctggcgccctcgattgccggcgactacgtggcctgcatcggcgtctccgagccaggtgcaggctccgacgtcgcctcgatcaagacccaggcgcgatcggatggcgacgattacgtcatcaacggcggcaagatgtggatcaccaacggcacccaggccgactggatctgcctgctcgcgaataccggcgacgggccggttcatcgcaacaagtcgctgatctgcgttcccatgaagagcaagggcgtcaccgtggcgcggaagctcgacaagatgggcatgcgctcctccgacaccgcgcagatattctttgacaacgtccgcgtgcccaagtgcaaccggatcggcgaggaaggcaagggttttacctaccagatgatccagttccaggaggagcggctgtggggcgcggccgcctgtctcaaggcgcatgagtacatcatcaacgaaaccatcgagtacacccgcaatcgcaaggctttcggccagagcattctcgacaaccaggtcgtgcacttcaagctcgcggagatgcagaccgaggtcgagctgctgcgtgcgctgatctatcgtgcgggcgagcagctggtcgcaggcgaggacgtgaccaggctcgccaccatggccaagctgaaggccggccgactcggccgcgagctcaccgacgcctgcttgcaatattggggcggaatgggctttaccaacgagacgccggtcagtcgggcctatcgcgacagccgcctgacctcgatcggcggtggcgccgacgaggtcatgctgatggttctatgcaagatgatgggcacgctgcccggcagcaaagggaaggcctcatgatcacgctctatcactgcgacgcggcgcgctcgtttcgtccgctctggatgctggaagagatggggctgccgtatgaactgaagatgctgcccttcccgccgcgggtgtttgccaaggaatatcttgcgctcaatccgctcggcaccattcccttcatggtcgacggcgagaccaaaatgacggagtcctccggcatctgccattatctcggcatcaaatacggcccgacccccttgatggtcggtcccgaagatcccgcctatggcgctttcctgaactggatgtatttcagcgacgctacgttaacctttccgcaaacgctggtgctccgatacacccagctcgagccggaggagcgccgcaacccgcaggtcgccggcgactacgccaaatggttcctgggccggttgcgtgcggtggaggcagcgacggcaaatgccgaaacattgtgcgggggccgcttcaccgccgccgacattgtgatcggttatgcactccggcttgccgagaacatcggccttgccaaggattttgggccaaatgtcgcagcctattgggctcgtctgcagcagcgtgacggatttaagcgtgcagttgccgcggaacagaaggctggcgccgagcagaatgttgcgccgagggtgagggcgtaagtttcggaagccactcggagcgatgcgcagcgtcgaactccggtgagccttgcgcacctgaggatcttaaggttccgggttcggtcttgtgggcccccggaacggctcaccgtgtttccgtgacagcgctatcctatcgtgacagcgcgcaaatttccgctaaggtgacctccgtccgcagcggccagagagccgcgcgaggaggaccccaatggaagataaaggtcgcgaatccgaccatctgatgctgatcacgccggagcgggtattctatgccggcctgctcggtcgcccccgcaagcgaaccccgggctgctgccacgtctatgttgcggtgaagggcagcctgcacctgacgatcgacgacctccatctctcggacgagttgatcgtgaccctgccgaaccagcggcacaccatcgccagcgactatcgcaccgtcatcagcgtaaccctggagccggagagcatgccggatggcgtgatcgaggctttggccgagcggctgcgcgggccggacaaggcggcctatgcccgcaagatcctcgccgcctatgcgctgctgcgtcagcgccgctatggcgacatcaccacagctgaattcgacgaaatgtgctttggcgaggcgctgccgcgccgcgtgctcgatccgcgcgtgatgcgtgccgttgctcgcatcgagcgcttctccggcgagccggtgacggcggacacctgtgccgctgaagctggcctctccgcctcgcgcttcctgcacctgttcaaggaagagaccggcatctcgttccggtccttccgcgcctggaagcgcgcgcggcatttgctgcacttcgccaaccaggacctcaacctcgcccatctcgcgcaggatatcggttatcccgattccacgcatttcagccactcgatccgtcgcttctacggcttgaagccgcgcgcgatcttcgtcggctcgcgagacctggcgatctatcgcagcaccgagacggtgcggctggcggaggcttcgtagcttcgtagggtgggttacgccatcggctgactcaccctataaccgctcgcttttccagcttctccgcgcaagaagccgcatgtcgcgcgtcacatgatcgcaagcgttgaatcctcaacctgcgagacattacgggcatgaccgacaaggccgtcatcacctgcgcgctgaacggcgtgctcaccgatccgaagcagcacaacgtgcccgtgacgcctgagcagatggcgcgcgaggccaaggctgcgttcgatgccggcgcatccatcatgcacatccatctgcgccagcaggcgccgggcaaggggcacctgccgtcctgggaggtcgcagtcagcaaggagatccagcaggcgatccgcgaagcgtgccccggcgtgatcatcaaccacacttcgggcgtgtcggggccgaactattcgggcgcgctcgattgcattcgcgagaccaggccggagatcgccgcctgcaacgccggctcgctgaactacctgaaggtgaaggccgacaacacctgggcgtggccgccgatgatgttcgacaatgcggtcgagaaggtgaaggactatctcgacgtcatgaacgcggtcggcaccatccccgagttcgagtgcttcgacgtcggcatcgtccgctgcgttggcatgtatcatcaggtcggcatgtacaagggcccgctcgaatacaacttcgtgatgggtgtggcgtcgggaatgcccgctgatcccgagctgctgccgatcctgatcaagctcaagcgtcccgaggcgcattttcaggtcaccgcaatcggccgcgaagagatctggccgctgcaccagcgctgcgccgaactcggcggtcatttgcgcacggggctcgaggacaccttctacctcgccgacggcaagaaggtgacgtcgaacgggcagctgatcgaagccgtcgccgcatgcgccagacgcgcaggtcgcgagatcgcgagcccggcggaggcacggaagatcttcgggacgaatcggtaaagtatcgcctcacccgtcattgcgagcgaagcgaagcaatccagggtctctcggcggaagcagtctggatcgcttcgtcgcttcgctcctcgcaatgacgagcaggatcaagtgatgtccatcctcgaaaacaccatttcccccggcagcgccgcctaccaggccaaccgcgacggcatgctcggcctgatcgaccgcatgcgcgcgctggaggatcgcacacgcgcggcctccgccgcggcaaaggaccgcttccacacgcgcggcagcagctgcccgcgcgaacgtgtcgccctggtgctcgatcccggcgcgccgttcatcgaactgtcgacgcttgccggctacatgttcgacgttcccgatcccaacaagagcgtgcccggcgggggtgtcatcgccggcatcggcttcgtctcgggcgtccgctgcatggtcagcgccaacgacgccggcatcgacgccggcgcgctccagccttatggcctcgacaagacgctgcgggtgcaggagcttgcgctggagaacaagctgccttacgtgcagctcgtcgaaagcgccggcgccaacctcttgcgctatcgcgtcgaggattttatccgcggtggcaacatctttcgtaatcttgcccggctctcggcggcagggcttcccgtcgtcaccgtcacgcacggctcctccacggcgggcggtgcttaccagaccggcctctcagactacatcgtcatggtccgcggccgcacccgcgccttcctggccggcccgccgctgctgaaggctgcgaccggtgagatcgcgaccgaggaggagctcggcggcgccgagatgcacacccaagtctcaggcctcggagactatctcgccgaggacgatcgcgatgcactgcgcatcgcgcgcgagatcatggccgcgatggaatgggagcggccgggcagggtggctccgcagttcaagccgccgcgctatgaccaggacgagttgctcggcatcatgcccatggaccacaagcgtccggtcgacatgaagcaggtgatcgcgcgcatcgtcgacgattccgattttaccgagatggcgccgaactacggcccggcgactgtctgcggtcacgcccgcatcgggggacaggcgatcggtatcatcaccaacaatggcccgctcgatcccgccggcgcgaataaggcgacgcatttcatccaggcttgctgccagacccgcacgccgctgctctatctcaacaacaccaccggctacatggtcggcaaggcctatgaggaagccggcatgatcaagcacggctccaagatgatccaggcggtgacgtcggcgaccgtgccgcagatcaccatctattgcggtgcctcgttcggcgcgggcaattacggcatgtgcggccgcggcttccatccgcgcttctgcttctcctggcccaacgccaagaccgcggtgatgggtggcgagcaggccgccgaaaccatggcgatcgtgaccgaagctgccgccgcgcgccgcggcaagccggtcgagaaggacaagctcgatgcgatgaaggcacagatcatcggcgtgttcgacggccagatggacgtgttctccaccagcgcgcgcgtgctcgacgatggcgtgatcgatccacgtgacacccgcgcggtgctgtccgaagtgctcgcgatctgtcgcgagggcgacgcacgcacgccccagcgcatgcagttttcggtggcccgcccatgaggaacggatcagtgcagcaccggccgttctctagggttctggtggccaatcgcggcgagatcgcgctgcgcgtgatgcgcagcgcgcgaaagctcggcctcggcgtcgtcgcggtctattcggacgccgatcgcgatgcgctccacgtgcgtcaggccgatcgggccgtgcgcatcggagaagccttgccggcgcaatcctatctcaacatccaagcgatcattgcagcggcaagggccagcggcgcggaggcgatccatcccggctacggctttctcgccgagaacgaggaatttgcgcgcgcttgcaaggaagcgggcctcgtcttcatcggcccttcgccgcaggcgatcgaggcaatgggcaacaaggccggcgccaaggagatcttgaagaaggccggcgttcccatcgtgcccggctaccagggagccgatcagagcgacgaggtcatgctcgcggaggccaagaagatcggcttccccgtgatgatcaaggcggttgccggcggcggcgggcgcggcatgcggctcgtcactgacgccacatctttccccgatgcgctacgcagtgcgcgttcggaagcgaaggccgcgttcggcgattctaccgtcatcctggaacgcgcaattcagaacccgcgccacatcgagatccaggtgttcggggatagtcacggcaacgccatccacctcggcgagcgcgattgctcggtgcagcggcggcaccagaagctgatcgaggaagcgccctcgcccgcggtcacgccggagctgcgcgcgaagatgggcgaggtcgcggtcgccgcggtaaaggcgctgcgctacgagggcgccggcacgctcgagttcctgctcgacgcccgcggcgagttctacttcatggagatgaacacgcggctccaggtcgagcatcccgtaacggaagggatcaccgggctcgatctcgtcgagttgcagctgcgcgtcgcgcgcggcgagccgctgccgatcaagcagcaggacatcaagttttccggccatgccatcgaggtgcggctctgttcggaagacgccgcgcaggatttcatgccgcagtcgggccgcatggcgcgctggcaggtgccggacggcatccgcgtcgagcatgcactgcaatccggcacggagatcccgccgttctacgattccatgatcgccaaggtcatcagccatggcactacgcgcgaggaggcgcgggggcggctgatcgtcggtctcgagcaactcaccgcgttcggtgtgaccaccaaccaggcattcctgatgtcctgcttgcgtcatcccggtttcgccaggggtgaggcgaccacggccttcatcggcgcgcatcgcgacgaactgctggcgccggatgcgaacggtgcattcgacgtggcgctggcgggcttgctactctacgtcaccaatccacgcgcgccgtcttggcaggtcgggcgaagcctcgcggcgacgtttccgctgccggcgaagatcgaaatcgccggccacgcccatgagctcgacatcacgcgagagcgcgatggcggctacaccgtcgcctccagtgaccgccaggacagattcgaaatcgaccagctcgcggccgatatgatccgctttcgccatgacggcctgatggacagcgccaacttcctccgtgacggcgatcggctctacgtccagcatcgcgggatcccgctcgcggtcgtcgatctcacgctcgcggcgccgaaggctgcagccagcaatggtggcgacggcaaggttcgcgccgcgatgaacggccgcgtcgtcgccgtcctggtgaagccgggcgaccgcgtcaccgccggccagccagtgctgacgctggaggcgatgaaaatggagcacgtccacaaggcgggcatcgacggcgtcgtcacggcgatcgacgctgccgagggcgagcaggtgaccacgggccggatcgtggcggagatcggggcgggctagcgccccgaatgcggagttggccgggcgaatgggcacaccccagcccagcgtctgttgatcaggaaaagcaaacgctctcagagagatgtggcgcgcgatcgcacgcttgcaggcaatattgaaccttgttcattttcagtctacaaatattgaacgctgttcaataatctggaggctcgtatgttgcgcgcaactgattccgcccgagacgccgctgctgcgctcccgacatcgtcgagcgcgctggcgtttgccgcaccaaccatgcgcgaaagctggctgttcggcgctctcttcgtcctgacgctggccgcgctcctcgcaccggcgctgcctcccgccgcctggcacgtcgcgcattttgtcgataaccgctcctggctgggtatacccaatgcgggggacgtgctgagcaacctcgcgttcgttgcgatgggtgtctggggctccgagcggctgcgcgcccgcaatgatgcgcctgtgggcgcaagctggttcttcgtgggactgatcctcactggcctgggctcgggcttctatcatctggacccatatgcgccggagcgactcgtagccgatcgcctcggcatggcggtggcgtttgcgggattccttgggattgctgccagcgagcggatcagcacacgcgcaggcgaagcggtgctggtgctgacgatgatcgcgggcctgctggctgcctgggtggcacgcgagaatctcgcgccttgggtggtggtgcagttcggcggcatggcgctcgccatggggctggcgttgacgcggccgcggcggggcgcgattggggtgcggctcggcggcgtgctgctcttctacgtgctggccaaactgtttgagctcggcgatgcagccgtgttcgaagcgaccgggcacgtcatctcgggccacacgctcaagcatcttgccgcggctctggcggcgtggccggtgatccgagtgttgaaccctactggctccgtcccgtgccctcgttgagcagacacgccacctgatgcccgtcgcccgcatccaccagcgccggccgctccgtcctgcaccgatccaacgcaaaccggcagcgcgtgtgaaacgcgcagccggaaggcggattgacggggctcggcacatccccatcaaccagcggcgcgagcttcttggcgagcggattggcgatcggcacggaggcgagcagggcctgcgtgtagggatgccgcggattgcggaacagctcatccttgccggcgatctccacgatgcggccgagatacatcacggccacgcggtgactgatatgagcgaccacggcgagatcgtgggcgatgaagagataggagaagccgtgctggcgctgcagatcgatcaggaggttgatcacctgcgcctggatcgaaacgtcgagcgcggacaccggctcgtcgcacacgatcaggcgaggccccagcgccagcgcccgcgcgatgcagatgcgctggcgctggccgccggagaattgatgcgggaagttgcgcatctggtcgggccttaagcccacctgatcgaacagctgcgcgacgcgggcctccagcgccttgccggtcgcgaggccatgcacggcgagcggctcgccgacgatgtcgcccgccgtcatgcgtggattgagcgaagcaaaaggatcctgaaatacgatctgcatcgagcggcggtgcggacgaagatcggacttggagagatgggtgatgtcttctcccacgaggcggattcgccccgatgtcggctcgaccagccgcagcacgctccgcgccacagtggatttgccgcagccggattcgccgaccaggccgagcgtctcccctacgccaaccgcgaatgaaacgccatcgaccgcatgcaccgtgccgacttgccggcgcagcacgcctgcacgcaccgcatagtgcttcttgaggtcggtgacttcgagcagcgcctctgtcatgccacctccgcaacctcttccgcgcgccagcacgccgcgagatggccgccgccccagtccgccagcggcggatattcggcctcgcaacgcttgatggcgagcttgcagcgcggtgcgaaggcgcagcccttcggcagccgcaccagcgatggcacggtaccggggatttcgttcagtcgcgcctgcgccgggactccggatgccggcaccgtcgggatcgaggccatcagcccgcgcgtatagggatgcttgggcgaggcgaaaagcgcctcgacgctcgcctcctccacctttcggcctgcgtacatcacgatcacacgctgcgccgtttgcgcgacgacaccgagatcgtgcgtgatcagcacgagaccggtgccgagttccttctggagatcgaggatcagcgccaggatctgcgcctggatggtgacgtcgagcgcggtggtcggctcgtccgcgatcagcagcaccggacggcacgccagcgccatcgcgatcatcgcgcgctggcgcatgccgccggacagctgatgcggatattcccgtgcgcgccgcgccggctcggggatgcgcaccagccgcagcatctcgaccgcgatgccttgtgcctctttcgaagggatgttccggtgcagccgcaccgcctcgacgatctggtcgccgatccgcatcaccggattgagcgaggtcatcggctcctggaagatcatcgagatgcgattgcctctgacggaccgcatctccgcttcgctcagcgccagcaggtcggtgccttcgagcgagacggagccccccacgatacgaccgggcggatcgggcacgagccgcatcagggaaagcgcggtcacgctcttgccgcacccggattcgccgacgatcgccagcgtctcgccgcgtttcacgctgaaggaaagatcgtcgacggccttgaacaggccggaattggtgaagaacaccgtcttcaggttcttcacgtcgagcacgagatcggttgtgtccgccatcagccgcgttgccttggatccaggatgtcgcgcagagcgtcgccgaacaggttggcgccgaacacggcgaggctgatcgcgatacccgggaagatcacgagccacggcgcggtgcggacatattcggcggcggattcggagagcatgcgcccccacgacggataaggctcggggattccgaggccgaggaaggacagcgaggcttccgtgaggatggtcgagccgagctgagcggtcgccagcacgatcagcggcgccagcgtgttcggcagcacatggcgcagcgcgatccgcgtctcgctcatgccgatcgatttggcggcctccacgaattgctgttcgcgcagcgcgagcgtgttggcgcggatcacgcgggcgaccgtcgggatcagcggaatggcgatggcgatgatgacattgggcagcgagggcccgagcgccgctgtcattaccagggccagcaccagcagcggcagcgcctggagaacgtcggagacgcgctggaacacgaggtcgacccagccggagagatagcccgaagtcagcccgacgatcacgccgatcgtgccgccgagagcggtcgagccgaggccgaccgcaagcgagatccgcgccccgtggatgatgcggctgaacacgtcgcggccgaatgaatcggtgcccatccagtgtgccaggctcgggcgggccagcgcgcgagcggaatcgaccgtcagcggatcataacgcgcgatgaagtcggcgaagatcgcagtcaacacgaacaatgtcatgatgacgaggccggctgcgcccagcacatgccgctgcgccatgaacagcacgcgccgccagccgccggtcgcatgcgcgccggcccgccttagttcaacgtcgaagtcgatcgcggccaagctgatctcctaatccgtatacctgatccgcgggtcgaacaccgcatagagcatgtcgacggcgaaattggcgaacaccaccaccaccgcgatgaacatcacgaggttctgcacgatcggatagtcgcgccagcggatcgcctcgaccaaatagcgcgcgacgcccggtatgttgaacactgtctctgtcacgatcaggccgccgatcaggaatgccgcctcgatgccgatcacggtgatgaccggcaggatcgcgttcttcagcgcgtgctgatagtttaccgtcgcctcggacgcgcccttggcgcgggccgtgcggatatagtcctgccgcagcacctccagcatcgaggatcgcgtaatgcgcatggtcagcgccgcgctgcggaagcccacggcggcggccggaacggcgtaggttgcgaacgcttccagccaggtctgcggattcgggttgaagatcggcatctggccgaacatcgccacggaggcggtcaggatcagaagaccaagccagaacgagggcagcgacaatccgctgagactgacgacgcgcaaagcgtagtcgagcttcgtcccctgtttcaccgcgctgatgacgccgagcgggatgccgatcgatgccgagaacagcagcgcgaggccggcgaggcgcgccgtgatcggaatccgcggcaggatctcctgaagcgccggcttttccgagacgtaggaatacccgaaatcgccgcgcaggaagccgctgatccagtgccagtattgcacgatcagcggccggtcgatgccgagctccttttccagattggctttgtcggcgggatcgacatagccggcggcggcgaacaggatgtcgacgatgttgccggggacgatgcgcagcaggaagaagatgacgatcgagatcccgaacagggtcacgagcatcaggaacaggcgccgcaccagataggcaaacatgcaccgcctcccgtcgaacccgtcaaccgcccgcggcgtgcgctacttgtccagccacacatcctcgtagcgatagccgttataggagctgttggtcatgacggtgagacccttgacgtagggctgccagcagctgcccatgcggctgtggaagacgatggggcgcgcgacgtcctcctgcagcttcttgtcgatgtcccagaccagcttcttgcgcttctcgatattggtctcctgcgactgcacgtcgaacagcttctcgatctccttgttgcagtaattggtgtagttgcgctccgagccgcaggaatagttctcgtagaaggactggtcgggatcgtccaccgcgttgcccgtgagattgagcccgatcatgtagtccttgcgcgcgaccttcgggaaccagttcgcggtctcgacgacgtcgacctcgccgtcgatatagatcgtcttgagctggtcgatcaggatcaccgcggggtcgcgatagatcgggatgttgcgtgtggagaccttcacggccagatgcttgtctggcccgtagccggccttctgcatcagcttcttcgcctcctcgcggttggccttcacgtcgggcccgtagccgggaatggtctccagcatctccttgggcatgccccacaggccgttcggcggcggcagcatggtcccgccgatgtcgccctggccctcgaacatgatggagatgaaagccttgcggtcgagcgccatcgccatggcgcggcgaatgtcgacattgtcgaacggcggcgaggacgaattgacgatgatgttggtcgacacgttcgtcggcgcgatctcgcagatcgcgttcggggcctgctgtttgacgtccctcaccagcgggatcgtcacctccgtcggaaacgtcatgtcgaacttgccggcgacgaaggcgaggatcgcggtcgagcggttcgggatgatggtgagctcgatgccgtcgaggtaaggccggcccttgcgccaatagtccggattgcgggtcagcttgatggattcattggccttgaactcgacgaacttgaaggggccggtgccgattggatgcgtgcgcatctccgccggcgagacatggcagggatagaccggggtgtagccggaggcgagcagcgccagcagcgagggctgcggccgcttcagattgaacgagacctcggactcgccgttggtcgagatgtcgctgacctggtcgtaccagctcttgcgcgggttctgccggaacttctgctgcgccttgcccatcagcatgtcgaaggtgcatttgacgtcggccgaggtgaatggcttgccgtcgtgccatttcacgccctggcgcagcttgaaggtcagcgtcttgttgccgttcacccaggcccagctctccgcgagctcggggacgatgctgtccatgctgttctgcgccacgtcctgcttgtagatgacgaggttgttgaacacgggcatgaagggaacgttgagcgagtaggtcgcgccttcgtggatcgaggcattgccgggactgtcgcggtgatacatccgcagaatcccgccctgcttgggctcggcggcgagcgttgcggttgagatcgtcagcaaagataacgccgccgtcgcggcgagcgcccacacgctccgcatgctcatcctccctggacacggccttttgcggcctgtttgtctgacgatagcgaggcgcgcgcatcgaggcaacccgcaaggcgcgggccgcctcgacaattcggatgacgcaaggccgcagggctttcgtcttcgcacaatgtgagagtgcagtgcgaagggaaggttcctgcatcatattgcgcgcagctgcttcgccaatctcactgtcgtcccggggcgcgacgacgtcgccaacccgagaccatacccacagggagaagttgcggagcgaactggcaactccgaatcttcgccaaaccactccctatggccaaagtgccggatctgcgctgcgcttgtccgggacgatggcggatggagttgcagccctcagacgatccgcgacgccttgttgccccagtagcggtcccgcagcagcctcttgtagagcttgccggtcggcagccgcggcaactccttctcgaaatcgaccgagcgcggcaccttctgccgcgaaagtgatttggcgcagaacgcgatcagctcttcggccagggccggcccgggcaccacaccgggcatcggttgcaccacggccttcacctcttcgccgagatcggcgttgggcacgccgaacacggcggcatcggccaccttgggatgcgtgatcagcagattctcgcattcctgaggatagatgttcaccccgcctgaaatgatcatgaaggtcgcgcggtcggtgagatagagaaagcggtccttgtcgacatagccgacgtcgccgacggtgctcatgctgccgtcgggcgaacgcgcctccctggtcttctcgggatcgttgaaatattcgaacggcgttgccgtcttgaaccagacctggccaggcgtgccggtcgggcactcctgcatgttctcgtcgaggatgtgcaggtcgccgagcagcactttgcccacggtgccgcgatgaccaagccattcctcgctgttgcaggccgtgaagccgaggccctcggtcgcgccgtaatattcgtggatgatcggtccccaccatttgatcatgtcgtccttgacctgggccgggcagggcgcggccgcgtggatcgcaatctccagcgaggacacgtcgtagcgatttcgcacttcatccggcagcttcagcatgcgcgagaacatcgtcggcaccagctgggtgtgggtgatgccccattgctcgaccagctgaaggtaacgctcggggtcgaagctttccatgatgatgacggtgccgcccatgcggatcgtcaggttcacggcggcttgcggcgcggaatgatagagcggtgcgggcgacagatagaccatgccctcacggtagtgccagagcttggtcaggaaatcgaacagcggcagattgtgcttcggcggctcctccggcaggggccgcaggattcctttcggccgtcccgtcgtgccggacgaatagagcatggcggtgccgagccattcatccgagatcggcgttgtcggcaggccggcggtcacctcggcaagaccgacgatgcgctcgctctctccggggccatcggccacgatgcagagcttgatatcggggcaggcctggatcgcctcccgcgcgatgtcgagcttggcgacagacgtgatcaagatctgcgactggctgttggcgaggagataggcgagctcgcccggcgtcaggaaggagttgatgcaggtgtagtagagaccggagcgttcgcccgcgccgcaggcttcaaggtagcgcgaattgttctccatgaagaccgaataatgatcgagccgcttcaggccgtgcctgcgaaacagatgtgccagccgattgctgcgtgcctcgagttcgcgataggtgactgactcgcctgtgcccgccatgatgaaggcgggctggagcgggcgcaggcgggcatggtgaccagtgtacatcaatcctccggctttggttcatgcggcaagaagcaggatttcgcgcacgtcggcgggaccctcgatcttgcgcggattacgcgggatccagttcgtgcgcattgcctgctcggcgatggagtcgaaatgttccggcgaaacccgaacgtcggcgaggctgcgcggcatgccgagcgagcggatgaaggcatcgagcacgtcggcggcgtcgtggccgggatagcccatggcggccgcgacgatcgtctggcgctcggcattgtcgcgcgcgttccaacgcatcaccgctggcagcatgatgcaggatgtgtagccgtgcggcacgtctaaggccgctcccaggacgtagccgatgccatggctcgcccccatgggaacgccggctgcgagcgcgcccatcgacagccaggtgccgatctgcgcatccatccgggcatcgagatcggcagggttcgccttcacccgcggcaatgcgtcggcaagcatggcgaggctcttcaccgattgcgcgtcggcataagggtgggtctcatgcgagcagatcgcctcgacgcaatggtcgacggcgcggatgccggtcgagatgaacagccattccggcgtgtgcacggtgatggcagggtcgaggatggtcgcgcgcggcaccgccagcggatgccgcagcatctgcttcacatgcgcagcccggtcggtgacgccggcaatcgcgctgaactcgccgccggcgatcgtggtcggtacgctgatctgccgcacggtcggcgcgatcatctcgggcgcgacgcccttgtgcacgcggatgcgctcgatgccctcgatatcgtcgatgccgttggcgaggcagagctgcaccgccttggcgccgtcggtgatggagccgcccccgacagtgacgatgaggtcggcgtccgcctcacgcgccgctcgggttgccgcgatcaccgcctcccgcggcgtatgcgccggcatggcatcgaacaagccggcgcagcgcgggccaagtgcttgcctgatcttcgtaatctcgtcggtctgccggttcagcgtgccggaaaccatcaggaaggcccggctggctccgagccggtccatctgtgcgacgatggctccggccgcaggatggccgaacacgacctcctcgatcgcgccgaaaacgacacgtccctggtgcacgcctgtcctcccggacatcttattgttgtgattggcaatctagccgaggagtctgcgcccgtcatgtgtgaagacgctggcccgcaccgaccctccccccgaagagatggctaactcgctcggtcttgtgacgcgccgacctcaaggtcgcggccattttcgcctgtcaatccgccgtccgggcaaggcggccttccagccattgcggcagccggcgtcttgaagagatcatcatcgcaacccatcttgtggcgcccgcaggtagaagcgtaccatgcttttctgcggctttgatgtgaggacctgggatgggtggaccggacggaagcgagcagtttgtcaaaagacacgatttcgttcagcctcgtcgcagcgcaatcgctggacttgtcgccgcagcgttcgccatcaccggttgcgacaagccggcgtcgcaggccgccgcgccagcgcccgcgtcagtgacggtcgcgcagccggtcaagcgcaccgtcaccgactgggacgaattcaccggccgcttcgaggccatggaggaggtgcaagtgcggccgcgcgtcggcggctttgtcaactccgtcaacttccaggatggcgccatcgtgcgtcagggcgatctgctctacgtgatcgacccgcgtccgttcgaggcggtggccacgcaggcggaaggccagctggccgacgcgcgcgccagggtcgagctcgcaaagcgcgagctggaccgcgccttgagcctggtgcagaccagtgcagtctccgagcaagtcgtcgatcagcgccgccaggccttgcaggccgcgcatgcggccgaaacgcaggccgatggcgcattgaaggccgccaagctcaacatcgagttcacgcatgtcacggcgccgctgacgggccgtgtcagccgccatctcgtcagccccggcaatctcgtgcagggcagcgacagcggatcgtcgaccttgctgacatccatcgtgacactcgatccgatctacatctatttcgacatggatgaggcgaccttcatcaaatacagcaagctgtggttcgaaggccggcgcccgagctcgcgcgatacggcgaacccggtgcaggtgtctctcgtcggcgagaccaagcaatcgcgtgaaggcaccatcaacttcctcgacaaccgcctcgacgtctccacgggaacgctgcgcagccgcgccgtcgtcaagaacaccgatcagtcgatcctgcccggccagttcggccgcgtccgcctgatcgccagtgcgccctacgaggcgctgctgatcccggatgccgccatcgcgaccgaccagtcccgcaagatcgtgttcgtggtcaagcccgacgacaccgtcgaggcgcgcccggtcgtgctcgggccgcttgacgacggcctgcgcgtgatccgtgacgggctcaaggccgacgatcgcgtcatcgtcaacggcatccagcgcgcccgcgtcggcgccaaggtcgctccgcagactgcgcaagccccgaccggtggcaagtcatgaacctcggtcgcctctccatcaaccagcccatcctggcgatggtgctgtcgatcgtgctcttgatcgtcggtgcacttgcctacaccacgctgccagtctccgaatatccgcaagtggtgccgccgaccgtcgtcgtcacgacgcaatatcccggcgcctccgcgcagatcgtgtccgacacggtcgcggctccgatcgagcaggagatcaacggcgtcgaggacatgctgtatctctacagccaggcgacctcgaacggccagctcaccatcacggtcaccttcaagctcggaaccgatctcgacaaggcccaggtgctggtgcagaaccgcgtcgcgatcgcgcagccgcgccttcccgaggaagtgcagcgcaacggggtcaccacacgcaagaactcgcccgacatcctgatggtcgtgttcatgctgtcgccggacgacaccttcgaccagctctacatctccaactatgcgctgctccaggtccgcgaccagctgctgcgcctcgacggcgtcggcgacatccagatctttggcgcgcgcgactattcgatgcggctgtggctcgatcccgatcggatcgccaatctcggcctgacctcggccgaggtgctggcggcgatccgcgcccagaacgtgcagatcgcgggcggccagatcgccgagccgccgatcgcggaccgtgccttccagccgaacctgactttcacgggccggctgaaggaccagaagcagttcgaggacattttgatcaaggcgggatccgacggccggatcgtccgcttgcgcgacgttgcccgcatcgagctcggtgccttgtcctactccaccaacagcttcctgctgcggaaatcggcggtcgccatgctggtgacgcagcggcccggatcgaacgcgctcgcaacggcgaagaacatctccgacaccatgacaaggctgaaggagaactttcctaaggggctcgactacaacatcggctataatccgaccgagttcatcgcgcagtccgtgcacgaactgatcaagacgatctacgaggccatgctgctcgtggtcgtcgtggtgctggtgttcctgcagggctggcggccggcgatcattccgatcatcgccatcccggtctcgctggttggcactttcgcggtcatggcggcgctcggcttctccatcaacaatctcacgctgttcgggctcgtcctcgccgtcgggatcgtggtcgacgacgccatcgtggtggtcgagaatgtcgagcgtcatctcgagcacggcatgggccggcgcgacgccgcgctgaagaccatggaggaggtcggcagcgcgctggtctcgatcgcgctggtgttgtgcgcggtgttcgtcccgaccgccttcctcggcggaatttccgggcagttcttccagcagttcgccgtcacgatcgcggtcgcgaccgcgatctcctgcttctgctcgctgacgctgtctccggcactggcttcgctgatcctcaccccgcatgaggacaagaagccgcccgccgcgtggaacgtcgtcgcgcgcggctggaacgccttcacgggcgtgttcaaccgcgtgttcgatcgtctcgcgcatggctatgcgagcctcgcaaacttcgtgatccgccatgcggtggtgatgctgctgttctatgtcgtgctgatcggcagcgccggctggctgatcgtgaccacgccgcagggcttcattccctcgcaggatcgaggctacgtcatcatctccgtgcaactgcccggcgcggcctcgctggcgcgcaccacggaggtcgtgcgcgagatcgagcggatctcgctggacacgcccggcatcgtccgcgtcgccgctttcgccggcttctccggcgccacgcgcacgcaagccggcaatgccgcggcgctattccccgtgttcgacgagccggagacccggctgaagaaggggctgtccgcgaacgcaatcacggccgagctgcgcaagcgcctgtccgcgatccagggcgcgttcatcatcgtgattccgccgccggccgtgcccggcatcggcaccggaggcggcttcaccatccgtatccaggaccgacagggccgcgggcccgaaatgctcgcagccgcgaccgacgagctggtcgctgccgcgcgcaaggcgccgagcctcacctcggtgttctcgccgtttacggccaatacgccgcaactcttcgtcgacatcgaccgcaccaaggcgcagaagctgggcgttcccatcgccaacatcaacgacacgatccagacctatttcggatcgacctacgtcaacgacttcaacctgttcggccgcacctaccacgtcaccgcgcaggcggacttcccgtaccgcaaggagcagagcgaccttgcgcgcctgcgcacgcgcaatgcgtccggcgacatggtgatgctcggcagcgtcgtcgaattcaaggacgcctcgggccctgaccgcgtcgcgcgctacaatctctatgcagcctccgagctccagggcgagccggcgccgggcatcagctcgaccactgcgctcgacaccatcaagcagctcgcgaacgacacgctgccgagcggcttcaccttcgaatggacagatctgtcctatcagcaggtcaccggcggcaatgcaggtctctatgtgttcccgatctgcgtgctgttcgtctatctcgtgctcgccgcgcaatatggcagctggacgctgccgttcgctgtgatcctgatcgtgccgatgtgcctgctcgcggccaccctcggcgtgcggatcatgggacaggacgtcaacattctcacccagatcggcttcgtcgtgctggtgggactggcggcgaagaatgcgatcctgatcgtcgagttcgcgcgcgacatcgagaatgagggcaagtcgcggctggaggcggtgatcgaggcctgccgcctgcgcctgcggccgatcctgatgacgtcgttcgccttcatcctcggcgtgctgccgctggtgatctcgagcggctccggctctgagatgcgtcaggccgtcggcgtcgccgtgtttttcggcatgatcggcgtcacgctgttcgggcttctgttcacgccgatcttctacgtggtagtgcggaacctggcggagggacgcagagacaagaagccgaagatcgtggcctcctaggtgccggccattgccaacagcgcacccgcattcacgctgtcgtccccgcctcctgcgcaatcgcgcatggggacccataaccacagggagacgttttgagcgaaggagcaacttcgactcttcgccaaatctctccctgcggccaggtccggatctgcgctgtgcttgtccggggcgacaccggttgttggcgcgtaccctccatactaatgaccaacgtgaaacggatgggcacgcgcgcggttcttcactagtattcgcgcgatttcacaacagaagactgtcgggagctaacacatgaaatcagcccttttggccgccgtcgcaacctctgccgtattgctcgccgcaccggccgccgcgcaaggcgtcaagatcggcattctcaacgaccaatccggcgtctatgccgactacggcggcaaatggtcggtcgaggcagccaggatggcgatcgaggatttcggcggcgaggtgctgggccagaagatcgagctcgtcaccgccgaccaccagaacaagccggaccttgcaacctcgatcgcgcggcgctggtacgatgtcgagaatgtcgacatgatcacggagctgacgacctcctcggttgcgctcgcgatccacgaactctcgaaggaaaagaagaagatcgacatcgtcgtcggggctgcgacctcgcgcctgacaggcgatgcctgccagccctacggcttccattgggcctacgacacccgggcgctcggtgtcggcaccggcggcgcgctgaccaaggccggcggtgatacctggttcttcctcaccgcggactacgccttcggctacgcgctggagaaggacaccagcgagatcgtcaccgccaatggcggcaaggtggtcggatcggtgcgcgtgccgctcaattcctcggacttctcctcctttctgctgcaggcgcagagttccaaggccaagatcgtcggcctggccaatgccggcctcgacaccaccaactcgatcaagcaggcgtccgagttcggcatcgtctccggcggccagaagctcgccggcctgttgatgacgcttgccgaagtgcatggcctcggcctgcaggccgcgcagggcctggtgctgacggaaggctattattgggacgtcaatgacaagagccgcaatctcggcgagcgattcctcaagcgtaccgggcggatgccgaacatgatccaggccggcacctattcggcgacgctgagctatctgaaagcggtcaaggccgccggcaccaaggatccggatgccgtcgccaagaagctgaaggagctgccggtcgacgacgacttcgcgcagggcggcaaggtgctggagaacggccgcatggtccacgacatgtatctgttcgaggtcaagaagccctcggaatcgaagaagccgtgggactattacaagctgctcgccaccgtccccggcgacaaggccttcttcaccgccaaggaaagcggctgcccgctgacgaagtgacgcgcagcgtcattccgggttcggcgctagcgcgccgccccggaatgccggcttgtgtctcacccctcacaccagccgcaacaccaccgcgcccagcgctcctgcccacaacgccatggcggcgatgctctggatcgcgaatcccgggccacgcttggccgcagccttcgaataaccgacgaagtagacgatgcggccgatgatccagaccacgccgataccagccgcaatggcatcgctgatatagaccgcgaacagccacagcgccggcaggaagatcggcatccattccagcgtgttcatctggatgcggaaggcacgttcgaaatcgggatggcccgacatcgcaggcaccttgacaccggtcgcggtgcgcgagcgcgacacgttgatggcagtgaagaaataaaacgcgatcgccagcagcgtgacgagagcggtgagatgatacatcgtaaatccccttgaagcgagtgcgcttcaatagccggtcagctcgagatagccaacgccgtcatgcgtgccggcaaagctgatcggtccctcccaataggagaagccggtccccatccaggccttcgggttgagcggcttgcaggcgatcgagagcgagcgcgaggggatcgcgatttgccattccacgggcaccttgcgtcccgcgatatccgccgtgcctttcggcatcatctgaatatcactacctgcaatcatctgtgtctcgcccgtggcgctgatccagttgccgaacggatagtccctgccgtccttctgccgcagccggtacagcatcagcttgtcgccggatgcgagatgcagcgatagccagtcccagccggtctggtcggcgtcgagcggctggctgctccattccctgtccatccaggcctggcccgagacatcgatcggcttgtcgccgatgatgagcgtgcctcgggcccggtagaacggctggctgtaatagtaggacgcctgtccgcgctccgacttgcggctgtagccgccgtcgccttgcaagaccaccggccggtcggcctccagcgtcagcgcatagctgaaatcggtgccggatgccttcagcgtcagcggcgccagtgtgcgatcgtcggtgcgctccaagcccttcatctcccaatcgtcgatccaggcatcgaacggcttggccgtgacgccggcctgccccacgccgccgcgtgaaaacgtttcggagaagcggtgggtgtctgcgcgcgtcgccgcggcatgcgccatccacacctgttgattggcccagccttcgccttgcggacccggctgcgcggcctggcggaacagcgtccattgcagcccgcatgctgcgccgctgccgtcgacgaggtttgccgtgagataccaccactcgatccgaaactcgggatgcggcccgtgatcggcgggaaatgtgaatgtccgtcccggcgtgaccttggcgaagccgtcggcggcctcgccgaggccggcatagccttgcgcgctggcgcgccgtacgaatgccagggcggcgatgctggcggcgaaggtacgtcgcgagatcctgtcagcgctcattggcgaacaccttgacgaggctggccggccgcattcgcgccagccgcgccaccggcagcagcgccgcaaccagcgaagcgagcaacgccaccgcgacgagctcgatcaattgtaacggaaacacgtggaacggcagtcgccagccgaacgccttcacattgacgatggcgatcaggcaccacgccaccaggaggccgagcggcacggccagcagcgccgtgaagagtgcgaccgaaagcgtcttggtcaattcgatcgcggcaaggcgcggccgcgtgatgccgatcgcccaaagcggcgcgagctgcggcagacgggagttggccagcgtgagcaggctcgtgaaaagcgcaatgccggcaacgccgagcgtgaaggcgttcagcgccgaggttaccgcgaaggtgcggttgaagatgcgaatcgattccgctttcaccgtcgcctggtcggcgacactgcggtcatcgagcgcgaactgcttctgcaaggctgcgatcaggccagggatatggtccttcgcgacgatgaggcccatccgcgtctgcggcgtctgcggaaactgccggatcagcgccgcgacattcaccgtgagctgcccctttgggttgccgtagtcggcatagatgccgacgacgtcgagcgcccaggcgccgcccggcgccggcacttcgatcacgtcgccgatccgcacattcagctggcggctcaattgctcgctgacgaaggcggcgttgcccggcaccagccgggtccaggcgcgcggcacgctgtccagcagcggccagcgctcgcgatagagcgcgtgatcgggcaggcccagcacttcgaccgattggccccggatctgcgtctcggcgcgtccgcccgagaggaccgcctggacgtcgccgcgctccttcagccagtttcgaatcgcggtgccttgcgcattgtcggacgcgctgatgtagacgtcggcggcgagccgcccctcgagccagccgatgaaggtacggctgaaagtttccaccatggtggacaccccgacattgacggcgagcgcgagcagcagcgccatcagcgcgagcgaaaggccggagagctgctgccggctgtccgcccagaaccacagcgcgagcggccctcgcgcggcgcgctggccggcgaacaggatgatctcgaggaaggccggcaggatcagcgccgcgcccagcatcagcgcggccagtacgccgaaccctgcgatcagcgattgtccgtagtggagcagcagcagcgcaacggcgaatacggcgcaggcggcgaggctctgcagcagcagccagcgccgctgccgctgctgccaggcgcgcggctgcgcggtcgccagcaccggcatcctgatggccttgatcaggctcgtcgcggccgccaccagtgcgcccgcgacgctgatgccgaccccggcaagccaccattcggggcgcaacgtgagctgccccgggatctgcgcgccatagagcccgcgcaacgacgccgcgacgtccggcaggagcgccgcagcgatgaaatagccgcatgcaagcccgatcagtccggcgaccagcgccagcgcgaccagctcgatcaccaggacggtgttgaccagccgcgccgaggcaccgcaggcccgcagcgtccgcagcatcggcagccgctgctcgaaagcgaggccgaccgccgagttgacgatgaagaggccgacgaagaaagacaacaggccgaatgcagtcaggttgagatgaaagctgtcggtgaggcgctcaagctccgtttcggcatccggctcgacccgctgcagttgatcgccgacgacgctggccagcggcgccggtttgcccctgggcttaccgatcagcagccgcgacacttggcccggcttgttgagaaggcgctgcgccacgccgatatcgaccaccagtacgtccggcacgagctgcggcagcacgcgcagcggtggcagttttgcgccgttgctgatcgccggcgccgcgccttccgactcccccaggccgctcagcgtctcccgtgccagtagcgtctggcccggcgcggcaacgaagctgctcagatccgcagcgccaaggcgcggcgcgttgccgacatcagtcggcaatgtcaccggctcaatgccgagcagccggagcgagcgtccgttgatctgcacccgtccctccagcgccggtgacaccggccagcccgcccggcggagtttgacgaacagctcctgcggaaaagtcgccgcattgggcgcgaccagcatcgccgtgcgggcgccgccgaacgtcgccgcagcgcggtcataggcattgcgggcttgctggttgatcgcctgcacgccgctccacagcgccgtcgctgcgatcagtccgaccagcagcgtggcgaactgcatcttgtggcgccgccaatggctgagcagcacggcgagaatccacagcgcgcgtctcatgcgatacgcccggcatgcaaggtgaggtgacggtcgagggtggcagccagatgcaggctgtgcgtcaccatcaggaagccgcagccggtgcgcgcgacgaggtcgcgcgtcagcgccagcacgtcctcggcggtggtttcgtccagattgccggtcggctcgtccgccagcagcagcgaaggctttgtcgccagcgcccggccgatcgcgacccgctgttgctggccgcctgatatttgttctggataacgtttgagcaggctgccgagcccgagtcgctcgacgagctcttttgtccaggccgcatcgtgccggcccgcgatccgggcctggaaggcgagattgtccgccaccgagaggctcgggatgagattgaattgctgaaagaccagcccgatgcggtcgcgccgcaggctggcacgccccgcatccgacagcctggtgacttcgatttcctccagcctgatcgtgccgccatcggcggcatcgagccccgcgatcaggtgcaacaatgtgctcttgccgctgccggactcgccggtcagcgcgacgcgctcgccgtgcctgagatcgagatcgacgccgcgcagcacgtggaccggctcgccggcggaggagaaggtcttggagagatttcggatgctcagcacgatgaatggcgccagacggaattgacggaattgctgcgtagcacacctgctgcggaaatgccgggttgcgttggttgtggagccgttgttagctttcaaggcggccaaatcaaaaaagtgccgaaaaaccattcggggagaatcatgagcgctcagggaacgtcggcggtggcgggcaagtcggccaggacgccaagaggcgcctggaccatcacctttctcctgttcctcttcatggtggtgaacttcgccgacaagatcgtcgtcggtctcgccggcgtgccgatcatgaccgacatgaagctcagcgcagagcaattcggcctgctgggctcctccttcttcttcctgttctcgatctcggccatcgtggtcggcttcgtcgtcaacaaggtgccgacgcgctgggtcctgctggtgatggcggtgatctgggcgctggcgcagttcccgatggtcggcaccgtctccttcaccacgcttttgatctgccgcatcgtgctgggcgccggcgaaggtccggccttctcggtcgccgcccacgccatctacaaatggttccccgacgagaagcgtacgctgccgaccgcgatcctgtcgcagggctccgccttcggcgtgatcctggcggtgccggcgctgaattggatcattgtcaaccattcctggcactacgccttcggcgcgcttggggtcgtcggcctgatctgggtcgcggcctggctcgccctcggcaaggagggaccgctcgaggacacggaggtcctcgccgttgccgagccgaagatcccgtatgtgcagcttctgacctcgcgcaccttcctcggctgcgtgtttgcaacctttggcgcctattgggcgctgtcgctcgggctcacctggttcacgccctttatcgtcaaggggctcggcttctcgcagagtcaggcgggcttcatctcggtcctgccctgggtgttcggtgccaccatcgtcatgctcaccggctggatctcgcaagtgatgatggcccgcggttacaccacgcgcatctcgcgcggcgtgctcggctcggtgccgctgatcatcggcggcctgatcctcgccatgatgccgcatgtgcagggcgccggcctgcagatcgcgttgctcgtcgtcggctccggcctgtgcggcgcgatctacgtggtctgcccgccgatgctcggcgagttcaccccggcctcgcagcgcggcgccgtcatcgcgatctacggggcgctctacacgctctcgggcatcatcgcgcccagcgtgatgggcaccgtgatccagcgcgcaggcagcatgctcgacggctacttgaccggcttcacgatcaatgcggcggtcatgatggcctccggcgtcatcggtctggtgctgctctggccgaacacggaaaagacgagactgacgcgtggtgcgtcggcgcaaagggcggcgctgaaaggtgctatctcgccgacttaggatgctccgctccaggggaaggtgcgatagcacacacggggaaacgcggcgggaagctcgcctgcggccatccctcgagacgcccgcctccggcggaccctcaggatgaggaccacgtgctcagcagtgtcagcggacgcggcgctcgctcagcctcttccgaaagctcatatgcgagtgccatgccttccagggaagggccagcaggcagcctcgctaattcactccctgcgcgccacgaatcagcttgcccggccgccgtcccgtggcctcgccgtgccgccgcgtcaccacgcccgagacgatggtcgcctcatagccgtcgacatcctgcaacagccgccgtccgccgacaggcaggtcgtaatgcaccttgggcggatgcagatgcaggcggtcgtaatcgaacacgttgacgtcggccttgtagcccggagcgataagcccgcggtccctcaggcctaccgagagcgcggtcttgcgtgactgcgccgccaccacgaacgggatcgtgagcttctcgccgcgcttgcggtcgcgcgtccagtgggtcagcagataggtcgggaagctggcatcgcagatgatgccgcaatgtgcgccgccatccgagaggcccggcaccgaccggggatcgagcagcatctcgcgcgtcgcatcgagattgccgtcggaatagttcaggaaaggcacgtagagcatgccgcggccctcgtccgacagcatggcgtcataggcgagttcctccggctgacggccttgcctgcgcgcttgcggccccagcgcgttctccggcggctgctcgtaatcggggggatcaccgagcaggaacatcttgtcgtagttgggacggaagaacagcggatcgtcggtcgccgtcgccgtctcgctcaggatcgccttgcgtacgtcgctctgacgcagcagcgccaatcgttcctgcagcggcagatgcgcgatcgccctgtagctcggatgggtctggaacggattgcgcgacagctcgagcccgagcaggaggccgacgggacgcgccgcgatctgtgccgtgacggagaggccgcgccgcgacgccgcattgatctcgtccagggtctggcgccaacgctgcggcgccttgtcgttctgcgtgatcgagaaggagatcgggcagttcgtgctatcggccaccctcagcatcatcggcaggtcctcgtggatggtcgagaggtccagcacgaactgcagcacgctgcggccctcgcgatgcattgcgccggcgatggccgtgagctcgtcttcgcccgccttcagggtcggcgtgaagtcgccggtcgaggtccgatggttgagcgtgcgcgaggtcgagaagccgagcgcgccggagcgcaccgcctcgcccgcgagctttgccatcgtcgcattgtcctcggcagtcgacggatcgcggcgggcgccgcgctcgcccatgacatagacgcgcagcgccgcatgcggcagctgtgcgccgacatcgatgtcgaaatcgcgcttggcgagccagtccatgtaatcgggaaagctttcccaggcccagggaatgccggcgctcagcaccggctccggaatatcctcgacgccctccatgagctggatcaggcgggtgtgatcatcgggcttgcacggggcaaagccgacgccgcaattgcccatgattgcagtggtgacgccgttctgcgacgacggcgtgatgtcctggctccaggtgacctggccgtcataatgcgtgtgcacgtcgacgaagcccggcgtgacgagcttgccgcgcgcgtcgatctcttcgcggcccctcgcggagaccttgccgacctcgcttatcttcccgccggtgatcgcaacgtcggcctcgaacagctctccgccacttccgtccgcgacattgccgccgcggatcacgagatcaggggtggtgctcatgtgtttcttcccgtcttgttgtgttgtctattttgtcgtcccggacaagcgcgtcaaagcgcacaccgatccgagccccgcaaacgaggggcgaagtttggtgaagactcggagagatcggcttcgcgcgccactactccctgtcgttatgggtccctgcgcggcgacgacagctcagctcctggttacccttgccgcttccgttccgtgaacggcgacagcagcaccgtcgccagcatgaagatcacggacgcgccgaacacccagtgcggtgcattctggtccatgatccagccgaacagcagcggactgacgatgccgccgagattgaagccggtggagacgatgccgaaggcccgtcctgcagcgccggcgggcgctgcgttgcgcaccagcatgtcgcgcgaaggggcgatgacgccggagaggaagcccgccgccgtcattgtggcggtcagagcccagcccggcagcgtgaccagcgcgatcagcagcacgatcgcggcattggcggcaaagcaggccgcggcgacctggccgtgacgctcggtccggtcggcgaggaagccgcctgcgagcaccccaatggcgctggcgccaaggaaagccgtcagcgcgatgttggcggcggagtaggaggcgccgtagccgctcatcagcgccaccacgccgaaattgttgatgccggcgaccgacaggctcagcagcatgaacagcgcagtcagcgtgataagcaccggcgtgatgacggcctgctttggcgcgctctcgctgccgggcttcttcttgtgcgcaccggcatcgggaatgttcatgacgatcagcagcagcgccaccgcaatgccgatcgcgccggaggcgatcagcgcgccggtgccgccggacagtgtgacgagcgcggccacgatcgccggtgcgacggcgccgccgagaaagccggcaaaggtatggatcgagaaggcgcggcccattcgcgcctcgtccatgtgctcggccaggatcgcatagtcggcgggannnnnnnnnnaggcgtagctgagatgcaggccgagcaggatcagcgcggcgccgccgagcgcgagcccggccaagagaatgcgccgcgcgccaaaatggtcgacgagatagccggtcggcgcctgggtcaaccccgataccaccgcgaacacggtgagcgcgaagccgagctcgatatagccgaccccgagctggcccttgaggaacgggaacagcatcgggagcaccagcagatggaaatggctgacccaatgcgcgatcgagattcccgtcagcgtacgcagtgcgctgtccgccttgccttgctgcggtgcggcgagaacgtcgaccattgcagttccgtttcactcccgatggaggcgcaaactatcggggagagcggttatttgtccatgaacgcaggcgcatggcaggtagcgagggcaggtagcgagggcaggggacgacagcaaagcgcggggtgccggcctagaccctcacaacggctcgtcatcggggccgtatcgatcgcgtttcggcgttgcgatgtcgccatcctcgtaatcgtcgtcatcgagggccggcggtggcaccttcggattgttgtccgcctgctgcttctcggcggtcttgtcgtcgacgaatttgggcggctcgctcagcttgccaatggccatggtttttccggatggtgatgctgcatccgctcctatccggaacatatgtgcaggtcctgacctatcgcaagtcagtgcaacaccggtccgccggccttcttccaggcgtcgatgccgccggcgatatgggcggtgttgagaagccctgcctcctttgcagccgccaccgccattgccgagcgttcgccgaaggcgcagaagaagacgacgcggcggccggtagcggcggcgacctcgcgcagcatgccgccgggcttgaggctctcctcgactgagggatagggcgtgtgcagtgcgccttcgagcatgccgtgcttcagccgctcgttggtttcgcgcaagtccaccagcaggatgtcgggccggccgaggatgcggatcgcctcggttgcgctgagcgcgcgcccttccttctcgagttcttcctgatgcagaccgacatgcatgttggcgggcaccgccacgtccatcatcttgggattgggcagcttcaggttcgccatcagctcgatatattcgtcgaccgagcgcacctgcagccgcggattgtagcgcttctcctcgccgatggtggagacggtgtcgcccttgtagtcgtgtgccggaaacaccatcgtctcgtccggcagcttcaagaggcggttgaagatcgagtcctattgcgcgcgcgccgagccgttctggaaatcggtgcggccggtgccgcggatcagcagcgtgtcgccggtgaagacgcggtcgcccatcaggtaggagtaggaatcgtcggtatggcccggcgtgtacatcacgtcgagcgacaggccctcgatcgtcaccttgtcgccgtcggcaacccgcatcgccaccacgtcggccttggtctgatcgcccatcacggtcatgcaatgggttcggtcgcgcaactcgccaagcccggtgacgtggtcggcatgcagatgggtgtccaccgccttcaccagcttgaggtcgagctcgcgcagcaattggcagtagcggtcgaccttctccagaacgggatcgaggatgagcgcctcgccgccgtggcggctggccaacaggtagctgtaggtgcccgaaacgctgtcgaagagttggcggaagatcatggcaggacccggcagtggaactggtttcgaggattttactacggcggaggccaaaaggagaattaattcactgccatgagaaaacaatcggaagattttcattgcgatctgacccgtcattccgggtgatgcgcagcttcgtagcggagtctcgagattcggattcggctctgcgagccgcccggaatgacggcgaggtgcctacggccgcaccaatgtgtacccgttctccgccaggaacaggatttgcccgacgcccacctgcactggcgtcgccgcttggatgaagtcaggccgcttgcccgtttcccgttcgatcgtatcgaccgtattgaggcagatgtcgaagcgcacgccctgtgcgatcaggctctcgacctgcttgcggcgctcgccgccggcgagaagcaggtcgatgccaggaccgaacgccaccacttcgatcgcgatcttgtcgggaccgtaggctttcagcaggttgttggcgacgctcagcaccagggactgcttcttcgcatcgccatcggagagctgcagcacgatcctgtgctcggcgaacggcttgtcctgcagcggcacctgttgtgcaagagcaggcggcaccgctgcccagacgagcagcgccagcatcatcgcgaatttgagctgcagccgcatcatccgcgtcccgcaatccctggattgccctcgacccccttcaacgtcacgccggagccgagtcgctcctgcaacatccggcctgagcgcagatatttgccgacgacgtcccacaccggcgcgccctgccgggtgttgaccgaagcccaacccgccaccttgtagcggtggctggcgctgagcggcttgccgttgccgagcttcagctcggagatgcgagccccgatcgcagcctccggcgtgcaggtgtagctgagaccgccggcgcgcaccatgtcgccgccctgctggtaatacgggtcggcgttgaagagattgtcgcagacgtcttcgagcacatccttgatctcggcgcccgtcatctcctgaacataggtctcgggatagctgatcgcggtctccgccagcagatcctccatggtcatcgcctgtcccgacagcacggtgacgccccagcgaaagccgggagacagcgcgatctcggcatcgagctcggtgcggagcgcagtgcagatcaattcgtccatggatcccgagaaattgccgcggcgatagagcagccggtcgggcgttgcgatcttttccgaccaatcggccacgtgctgcgcacggacccgaccgatcagctcggccatcgccggatcgggcttcagcagctccgaatagaccggcagcagatgatacctgacatcgctgaccttgcccctgtcgagcgcgagatccagcacggccaggaatttcccgttggagccggcattggtgacgagcgtcgtgccgcccgcattcctcacggccatcggctgcggcacggcatcatgggtgtggccaccgaggatgacgtcgatcccggtgacccggcctgcgagcttgaggtcgacatccatgccgttgtgcgacagcaggacgacggcgtcgaccttgtcggcgccgcgcaacgcatcgacatgcttctgcagctcctcctcgcggatgccgaagctccagtccggcgtaaatctcttgggatgcgcgatcgggacgtaggggaaggcctgcccgacgatcgcaatacgatgcccgcccatctccttgatcatcgacggcttgaacacccgcccgctggccttgtcgaaggcgggcgcgtcgttgaacgcggcttcctcggtcaggaacacgttctgcgccaggaactcgcccttgaatcgctcgagattgtcgcgcagcgcctgctcgccataggtgaattcccaatgcccggtcatcgcatcgatgccgagcaaattggcaacctcgaccatgtcgcggccctgcatgacgttggcaagcccggtgccctgccagagatcgccgccatcgaggaggagcgaacgccgctcgccgacttcgccgcgcaagcgatcgaccagcgtcttcagataggcgaagccgccgagcttgccgaagcggccggcggacttctcgaactcgacgcaggtgaaggcataggcatcggcgctatctggccggatgccgaaccgctccaggaaggcgcggccgaccagatgcggcggccgccccgccatctcgccgatgccgatattgacgctgggctcgcgaaaatagaccgggttgagctgcgcatgcgtgtcggtgatgtgcaggattcttgcgttgccgaaccgctcgaggtcgtagatgccggcggtctcagtgccgcgggccagccgcggcagggcgagcgttgcggcggcgaggcctgcacttttcaaaacatcgcggcggcggatcgccatccaagaattctccgcgcctctcgggatcgctaaacggctactgtcccaaacagtctagcggatttccatcgccttccaggcttctttttccgatgtggcctggaaaatcgaggccttcgccagcgcctcggcctccctggcggcggcaacagcacgatcgaaatcgccgccgtcggccgccttcttggccgcggccaatgccgagacggtgacggtccactggttgcgcatgccggccgcctccctggaggccgcttcggcggcggcataggccgccttgtaatccgcctcgttcgccgcgcgcgcggatggcgcaaggctcaaggcaagcagcatggcgagagcaagtgaccgcttcatggccgtgctcccggtcccgagatcggcaggccattggcgacgtaggacaggaagtactcgacgtcgcgatattcgtccgattgcggctccagcggaaccgcgcgggtctggctgttgcaggtcacgaagcggcggctggtggtgcccatgccgctccattcggagcggtagatcggcatcgcgttgaggatgccgagcgccggcgccagggtttcggcgcggatgcgctcgcccgggctctgcacatgacagcttgcgcaggagaagttcatctggccgcgtcgcgtgtagaaataccgcttgccgttctcgaacgccgcaagcgcacggggatcgtcggggatcctgatgtccatcggcttgccgcgcgaggtataggccatgtaggcggtcagcgaggccatctcgtccttgacataggaatagggcgcttcgccgttggcctcgcggcagcggttgagcgcgagctccagcgtgacgaccttgccttccttctcgtcgaaatagggatagttctgccggatgccgatgccgccgttggggaagcagtcggcataggtcttgccgttcttgaacggcgtcgcgaacatctccttgccggcttcgagcgcgaactcgtaaggcgggaattcctccttctcgcgccactgccgcttcatgtcctcgttcatggaataaggaccgttgacgaaatcctcgcgcttcacgttcggaaacttctggaagaagaagttctggaacgccttggcatcggcaacgggatcgaccttgtcggccgcggccacgcgcggaggcgcggccgcgagcgcgacaagtgcggcgcacacggagccgagcagaagtgagaggcggaccttcatcgtcacgcgatcttcgcggtcgtcgtgtccgacgcacccttgttgtcgatccaggagatcttgagctcgtcgcccttcttggcgcccttgaagctgaacttgacgtatgggtccttcgagaccgcagtgccccaattggcgacgaagacgtccttgccgttacattcgaacttcagctcctggatgaagtgcgccggaaccagttcgccgttggggttcttgacgaggccggtgtccatggggtgctggatcagcgcctgcacctcggtgatgtcgccgttggacgttgcgcggacgcgaatgctggatgccatctcgaactcccttcgctcaaccgccgcagccgccgacggtgaccttgacctctttggtcgcgctgtagagcttgccgtccgcttccacgaccgcggtcaatctggtggtcttggccatcttcagacggttggcgacggcagggatcgtgccgtccgggatcttgtagcttgccgcgagcgcattcgggttctcggccacgaagaacgagatcgatgtcaccttctcgagtgacgtcgtcaccgagatcggcaccacgccgccattctcggcgatctccggcgcgtcgagcttgaccttgtcggacggctcggcagtcttgccataaagcgccttgatcgcgtcggcctcgttcttctgcttgaaggcctcttccggatatttgtcgttggccgcagcgcgcgcgggagcggcgccgaacggcagattgccgaggccgagcagcgcgacggaagctgcgccctgcaggatcaggcgtcgcgtcggatgagggccggtggtggtggtcatctcaagtctcctgggcagccggccgtcacagggtctgcaggaaatcaacgatcgcgttgatctcctgttcggtcaaaatccggttccggccaaatggcggcatcatggtcagcggattgcgcttggtctcgtcgaagatgattgcgaccagctcgttgcgatcggggtacctggccttgatatccttcagttccggcccgatcgttcccggcaggtcgccgccttgcatggcgtggcaggtcaggcaattgcccttgctgcggtcgaaagcgagcttccggccctcgatcacggtggactgcgcctccgccgtcgccaccgcagcgccggcgaacagggccagcgcaacaagcaaggcgggcttgcgaggaaagacggtcaaggcatcgtcctgaagcggtatgtcgatgatctcatttgcggaatggttcaaaagcacaaagggcagagcctgacaatcaagactatgcatacggcaaaatggggttaatatcctcggcattgcaactgatgagatagttcgttcatcagccgggtcgggattggcagattattctcggacgttcggccagcatggccatcttttctgtttcgcattttttggggacgtcacttggctgaatatgtcgtcgaatttggcagggacggcggaagggtcgagccggatgggcggctcgatgcgccggccttccatcgcaatcacgagccgatctgggctgcgctggaaaagcatctcgccggcgcgaccggaaacgtggtggaactcggcagcggaacaggtcagcacgtggttcatttcgcgcgccacacgcccggcctgatctggtggccgagcgacctcaaccagcgccacctcaagagcatcgaagcctggcgggtatatgcggctctgccgaacatccgcccgcccctgcggatcgacctcatcgatccccattggtgtccggagatgaagagcgggcagggcccgacgagccttgcagccgtgttctgcgccaatgtcatccacatcgcgccctgggtcgtcgccgaaggcctgttcgccggcgcgggtcgatacttgcgcgccgacggcaagctgttcctctacggccccttcaagcgcgacggcaagcacactgcgctcagcaatgcggtgttcgacacctcattgcgcgaaggcaatcccgaatggggcgtgcgcgacatcggcgacgtcgagagtctcgcgcggggcgcggaccttcgtctcgtcgatacgatcgatatgcccgcgaacaacctcacgctggtgttcgcgcgctagaaggtcgtcgtgcccgggcttccacgttcgccgttcgacacgtcaagtcgtggatggccgggtcaagcccggccatgacgatgtggagacgtccgcgcccctagcgctagtcgccatcccgccacccgatcctctccttcaaaaaccgatagcccagcacctcgaagccggcgcgctccttgttgtccttgccgtagccgtggccgccggctgccggttcgtagagccaggcctcatagcccatcgcctggagcttcgccgccatcttgcgggcatggccgggatgaacgcggtcgtcgcgtcgcgtggtggcgatcaggatcggcggatagggctggccggccttcacattgtgataggccgagtaggtctgcagccactcccattcgtcgggcttgtcgggatcgccatattcggcgatccagctcgcgcccgcgagcagcttggtgtagcggcgcatgtcgatcagcgggatggtgcagaacagcgcaccgaagcgctcggggtagcgcaccagcatgttggtgatgaggatgccgccgttcgatccgccctgcgccgcgatgcgcttcggctgcgtcacgccgcggcggacgagatcggcagcgaccgcggcgaaatcgtcatgcgacagcttcttgcctgcgagccggccggcatcgtgccagcgcgtgccgaactcgccgccgccgcgcaaattggcctgcaccgtcgtgccgccgcgctccagccacagcttgccgagcgaggcgttgtaatacggcttcacggaaagtccgaaaccgccataggcgctcatatagaccggcgcgtcgccgatctctgcggcgggggcgggctggacatagggaatgcgctcgccgtcgatcgagatcgcctcgtgctgggtcaccacgagcccgtctggggtgaacgtcttcggtgcctgcttcagcacggttgggctggcgacgccacgctcgatcagcagcagcgatggcggtgtcagcgggtcctgcacattggcgagcagatcgccgttgctctcggacggatggcgatccagcggccagacgtcgacgaccccgattcccggcaggccgggaagcatctcgcggctccagccggttgtggacggcgtgcggatctcgaagcgcggcttcagctcgtcgagaatcgagaggaccagcttgccggcgacccagaacaggccttgcagcgcccgccgtggtgcgggttcgaacaggattgcgaaatcgcggctgccggcgaggaacgccgaaagcgaaatgccgagcacggtatcggtggcgtaggtccgcccctcgaccgtccagtccttgcgcagcttcatcgcgaaccagtcgccatgcgcctgcatccagatcccggtcggcagatcgagcctggtcgtcacgccagcggcatcgcgcagccagatcgcatgattgaagaagtcgatctggtctatgatccaggttcgcggcgcagtgccggtgtcgtcgacgctgccataaatcatcatgtgatcgggcgttgtctcgatgatcacctgcgcctcatcgacaggctggccgcgtcgccacagccgaacggtccgagcatatcccgagctcgtcgtcatgccctcgccatgcgcgctcgacagcagcagcgtgtcggcatcgagccagtcgacgccgcccttggcttccggcagcgtgaagccgtccgcaacgaatctcttcgtggcgaggtcgaactcgcgaagcgtgacggcatcgctgccgccgcgcgacaggctcagcatggcgcgcgagcttcccggcatggtggcgatctggctcaacagccagtcctcgccttcgcttgctgcgagctggtcgatgtccagcatggtctcccagtccgggctggccttgcgaaattccgccattgtcgtccgccgccacaggccgcgcggatggctcgcgtccttccagaggttgtgcagatcgttgccgcgccggctcacataggggatgttgtccggccggtcgtagatcgcggcgaggatgtcgcggtcgtgctcgaaggttttgccgccgaacgcggcgagcgtcaggctgttctgccgctcgacgaaatcgagcgcctgggtgccttcgatctcctccagccacagccagggatcgtcgtcgggggcggtgagcgtgggcctgtcgtcgaccgacatgaaatgaaactcccggaagtcgcggcggataggatttgatcgaactcaagccgtcaagggtgccgcccggtatcatccgttcgattgcgtcggaggcatggcctgcgcccatttgcgccggttgcttaccctcttgcgccccaccatagtcccgggaatcaacgagagcccctgacgagcccttcgggcgggaatgccgatgatcgatgtgacgtctactgccgaaatcgccgacgacgcccgcgtgcgtgccaatgtggtgcgccttgccgccgcgcaggcattgaccggcgccaactcggcggtgatcttcgcaaccggcgcgatcgtcggcgcgacgcttgcgccggacatgtcgttcgcgacggtgccgatctcgatgtatgtggtcgggcttgctgcgggcacgctgccgaccggcacgatttcgcggcgcttcggtcgtcgcgcggctttcatcatcggcacgggcctcggcacgctcaccggcctgctcggctcgttcgcgatcctgcgcggttcgttcgcgctgttctgcttcgcaaccttcctcggcggcctctacggcgccgtggcgcaatcctatcgcttcgccgccgcggatggcgccagcgcggcttaccgtcccaaggcggtgtcgtgggtgatggccggcggcgtgttcgctggcgtgctcggcccgcagctcgtgcaatggaccatggacgtctggcagccctatctgttcgccttcagcttcctggtgcaggcggccgtcgcgctggtcgcgatgggcatcgtcgccggcgtcgacatgcccaagcccgcgccggccgatctgcacggcggacggccgctgctcaccatcgtgacccagccgcgcttcatcgcggcggcgctctgcggtgcgatctcctatcccatgatgaatctggtgatgacctcggcgccgctcgcgatgcagatgtgcggcctcagcgtgtccgattccaatttcggcctgcaatggcacatcgtcgcgatgtatgggccgagcttcttcaccggctcgctgatcgcccgcttcggtgcgccgaagatcgtggccgccggcctcctgctggaagccgccgccgccggtatcggcctctccggcctcaccgccatgcatttctgggccacgctggttgtcctcggcgtgggctggaatttctccttcatcggcgcttccgcgctggtgctggagacgcaccagccgcaggagcgcaacaaggtgcaggcgttcaacgatttcctggtgttcggcatgatggcgatcggctcgttctcctcgggccagttgctggccaattacggctggtctgcggtcaacctcgtggtgttcccaccggtcgtgctgggccttgtcattctctcgctcgtctcttgggctcgtcgccgcaaggcgcggctggacgcggccatgggcgagtttccggacgcggtctaggctggcgggagcctgtcagcagcgttgatacttcgatcccgctcgaagtgattttcgggtgagggtcggttagatgtcgtcatggccgggcttgtcccggccatccacgtcctgctacgtcgaaggaagagcgtggatgtcccgggcataggcgagcgtgaagcgacgccgtccttcgaacggctatgcccggcatgacggagtaggcggccatgctcgataatccccaacagccccgaattgacgaatcctccctccgttacgaaggctggcgcatcgtcgcggtctgtttcctgctcgccaccttcggctggggtctcggcttctacggccagagcgtctacgtcgccgagctccagcgcgcgcgcggctggccgacgtcgttgatctcctccggcaccacgttcttctatctcttcggcgcgctgctcgtcgtcttcgtcggcgaagccgtgcgaaagtacgggccgcggctctgcctgatcgctggcacgctggcgatggcggccgcggccgttgcgatcggcgcggtgcgcgaaccctggcagctctatcttgccaatgccgtgctcgccttcggctgggccggcaccagcctcggcatgatcacgaacacgatcagcctgtggttcgaccacaggcgcggcatggcgatcagccttgcgctgaacggtgcgagcttcggcggcatcgccggcgttccgctgctggtgatgctgatcggccatgtcggctttgccagcgcgatgtacgccgctgccggagccatgctggtgctgctgctgcccgtcattctccttctcgtcggccgaccgcccgaccgccacggccggcacgcgaccgcgaaggcaagaccgcaatcctcgacgcagatccgcgcatgggcattgcgtgacgtcggcttcctcacggtgacgacagccttcgccctcgtgctgttcgcgcaggtcggcttcatcgtgcacctgatctcgttcctcgatcccgtgatcggccgggagcgggcagctcttgccgtcgccgtgctgacggcgatggccgtggtcggccgtgtactgttctcactggtgatcgaccgcctcgaccagcggctcgcctccgcgctgtcgttcctcagccaggctgcggcgcttctcgtcgtcatcaatctgcacgacgactacgtgctgatcgcggcctgcgcggtgttcggcttctcggttggcaacctcataacgctgccttcgctgatcgtgcagcaggagttcgagtcggccgccttcggtgtgctgatcagcctcaacaccgcgatcaaccaggtcacctacgcattcggccccggcgtggtcggggccttgcgcgattggtccggcggctattcgctgccgttctatctctgcatcgtgctggaggtgatggcagctgcactgatcatggtgcgaggcaagccaggagcaaggctatcgtagcatgggcagagacgcgttgcgccgtgcccacccttcggcatcgcgcttgatgtttcgatgtcccctcatcacactccgtcattgcgagcgtagcgaagcaatccagaattgttcctcagagacagtctggattgcttcgtcgctacgctcctcgcaatgacgggaggagagagcagagttcacaattcacgctgccgcaacaatgcctccacatccagccgcttggtgaacattgcgagctttccatccggtccgaacggccattgttccctcggcttgtcccagtacagttcgacgccgttctggtcgggatcgcgcaagtacagcgcttcgctgacgccgtggtcgctcgcgccatcgagcgcaatgccggccgagagcacacggtgcagcgcattcgccagcgcggggcgcgtcggatagaggatcgcggtgtggaagagccccgtcgtgcccgggggcggcggcgagccgcccttgctctcccaggtgttgaggccgatgtggtgatgatagccgccggccgcgatgaaggccgcgcccgagcccatgcgctgcatcagctcgaaaccgagcacgccgcaatagaagccgagcgcacgatcgagatcggcgaccttgagatgaacgtggccgattcgggtgccggcaggaacggctgggctttgcgacatgtgaatgctcccttgctgaactccaaataggcaaggcccgaggcgagtgctactcgcccgtcctgaaactcatcgtttccgaatgggcggttaagccagctccgacacctcaccttccggcagctcgaactcgaacgtattcagcgtcatcgacaccagcgtgtaatagccgcagagcccgatcacctcgaccacgccgcgctcgccgagcagcttcaccgcctcatcatacaggcccttctcgacgccgtggccttcgtgcagcgacttcgcgaggtcgtagatcatcctggccttggggtcgtcgaagtcgggcgtgcggcggtcgcggatcgcctcgatgatctcaggggccatcccgccggcaagtgcgaggcgcttgtgcgcataccattcgtaatgcgcggtccagtgccgcgccgtcaccaggatcgcgatctccgagagcttggccgggaataccgtatcgaatcgaaggacctcgccgagccgtgtggcgtgacgggccatgtcggggctgttcaaccaggccatcatcggcggcggcggcttgccgcgcttgccggcgatcgattcgtcataggtctggcgctggctctcgttcatttcgccaggcgaaagaagcttcaggcgcattctcgtttcctctttgttttcaagctcgccgtaacggcgactatagccgaatgcgggctgcggaagtggttgaattccgcggagcgttggcccagagtcgccggcaacaagctgaattccgatgcgatggaaacgaccatgagcgatacagaaaccaccgatctcgagaccttccgcaacgagacgcgcgcctggctggaagccaattgtccgcccgaaatgcgcaagcccgcaacatcggatgcggatgtgttctggggcggtcgcaacgcgaagttctcgtcggagccgcagcgcatctggttcgagcgcatgcgcgacaagggctggaccgtgcccgactggccgaaggagtatggcggcggcggcctcagcgccgccgagcacaaggggctgcgcgcggagatggcgcggatcggcgcccgtccgccgctgtcgagcttcggcatctggatgctcgggccggcgctcctgaagtacggcaacgaagcccagaagaaggagcatctgccgaagatcgcagcgggcgagatccgctggtgccagggctattccgagccgaacgccggatccgatctcgcctcgctccagacccgcgccgagagcgacggcgacgacttcatcatcaacggccagaagatctggacctcctacgccaactacgccgactggatcttctgcctggtgcgcaccgatcccgccgcgaagaagcatgacggcatcagcttcatcctgttcgacatgacctccaagggtgtttcgaccaagccgatcctgctgatctcgggctattcgccgttctgcgaaaccttcttcgacaatgtccgggtgccgaagtcgcacgtggtcggcaccatcaaccgcggctgggacgtcgcgaaatatctgctccagcacgagcgcgcgatgatctcgggcatgggcgagcgcggcgtcggccgtccgctcggtcagatcgcggctgacaccgtcggcaccgatgcgcagggtcggctcgacgatgtcatgctgcgcggccagatcgcgcgcttcgacgttgacgaagccgcgctcgcggcctgcgccgagcgcgccgtcgatctcgccaaggcagggcaggcgcatccggcgttttcctcggccatgaaatattacggcaccgagctcaacaagcgtcgccacgagatcctgatgtcggccggcggcgtcgatgcgctggaatgggagagcgagcgctccaagcagggcgcgaagccgcgcgcctggctgcgcaccaaggccaactcgatcgagggcggcacgtccgaggtcatgctcggcatcgtcgccaagcgcatcctggatctgccgggggcgtgagcggcgctctcaccaaatgtcactccggggcgcgcgtagcgcgagcccgcaatccatctgcccgcggaaatgccgtctgatggattccgggcctggcccttagggccatcccggaatgacgacaacgaatagatttcgaacgggaaacacgtacatggccctcgtcctcaccgaagaacaatccatgctccgcgactccgcgcgcggactgatcagcggcaaggcgccggtgtcgcacctgcgccatctgcgcgacagcaaggatcgcgtcgggttctcgaaagagctctggcacgccttcgccgagatgggctttgccggcctcctggtgccggaggacttcggcggcagcggcctcggctatgtcgaggcgggcgtcgtcatggaggagatcggccgcacgctgatgccctcgccctttcttgccaccagcgtggttgcggcctcggcgctgaatcgcggcggcaatgccgcgcagaagtcggaatacctgccgaagattgcaagcggttcgctgctcgcgacgctcgcgatcgacgagggtgcaaaacatcgcccgctgcagaccagtctccaggccgttcgcgcgggcaacggcttcaggctctcgggcgccaaggctctggtggtcgacggccatgtcgtcgacctcctgatcgtcgccgcgcgcacggcgggggccgccggcgagcgcgagggcctgaccttgttcctggtcgacccgaaggccaagggtgttgcgatcgagcgcaccatcatggtcgatgcgcacaacgcggcgcggatcgacttcgccaatgtcgaggtcgatgccgacagcgtgctcggcgaagtcgaccaggccgccaacctgctcgatggcgttctcgacatcggccgcggcgccgtcgctgccgagatggtcggcctcagcgaggaggtctttggccgcaccgtcgaatatctgaagagccgcaaacaattcggcaagctgatcggcgaattccaggcgctgcagcatcgcgccgccgaactctacatcgacatcgagataacccgcgccgccaccatgaaggcgctgcaggcactggacgccgatgttgccaaggccgcatcgagcgtcgccgtcgcaaaggcccgcgccggcaccaccgccacgcgcgcggtgcaggagggcgtgcagatgcacggcggcatgggcatgaccgaccagttcgacatcggcttcttcatgaagcgtgcgagagtctgcgaggagctgttcggcgatgcgaattaccacaccgagcagctggccagggcgcgcgggtattgaggcaagcggcagagacgaggctagagaggaccagcgcgagccgtcatggccaggctcgtcccggccattcacgttctcaagtgctgcaagagcgcggatgcccgggacaagcccgggcatgacgaccaagagtgtggtgcgcgtctacgtcaacatcgtcattgcgaggagcgcttgcgacgacgcaatccaggctgttgccggggaggcattctggactgcctcgcggagcctgtcaccgggccgcgcttcgcgcggacccgttggcgcgcaatgacgacggcggcgagagccgccgttatctcatcggcggtgcgtactgcaccccgcccgcgttccacagctggttcatgccgcgcggaatcttcagctttgacttctcgccgatgttgcggtcgtacatctcgccgtaattgccgacgtggcggatgatgcgcgccgcccagtccttggtcaggccgagcttctcgccgtaattgccttcggtgccgacgaggcgcatcacttccggcttcttcgacttcagcgcttcgtcgatgttctccgaggtgactcccagctcctcggcgttgatcatcgcgtacagcgtccacttcacgatcatcatccagtcgtcgtcgcgctggcgcacgacgggcgccagcggctccttggagatcatgtccggcaggatcatgtggtcgccgggcttggagaggttgagcctgagcgcatagagctgcgagacgtcggcgctgaacgtgtcgcacttgccggtgtcgtaggccttcaccacgtcggcgaggttttcgaacttcacctcttcgtatttcatgttgttgatgcggaagtagtcggcgatgttgagcgccgtcgtcgtgttggcctgcacgcaaaccttgctgccggtcagatccagcgatgtctccttgttgcgcgagcgcggcagcatgaagcctgcgccgtcgtaataggcgacggcggggaaatagagatcgtagtcgagctcgcgcgccatgctccaggtcgtgttgcgcgagagaatgtcgaccttccggctctgcaattccttgaagcgctcgttggcgtcgagcgggatgaacttcgccttgcccgggtcgtcgaagatcgccgccgccaccgcgcggcagaaatcgacgtcgaagccggtccaattcttgttgtcttccgaatatgagaagcccggcagtcccttgttgacgccgcacagcacctcgccgcggcgcactgtgcgcttcaaggtgcgggtgtcgtagaattcatagatgatcgccgcgacggcgaccaccacggcgagggcgagcccgatcagcaggccgccacgaaaagtgcgcatcatgttgctctctcgaaaatcggaaaatgggaattgcaggaggggcggagcatgatcctggagatcatgctcctatccatagccctcagagttcgggcttctgccggatgaccaccttggtgccgatcgggacgcgatcgtagagatcggcgacgtcggcgttgaccaggcggaagcagcccgaggacaccttggtgccgatcgtgtcgggtcggttggtgccgtggatgcggtagaccgtggtgccgagatacatggcgcgggcgcccagcggattgcccgggccgccggccatgaagcgcgggagatagggctggcgctggatcatctccggcggcggcgtccagtccggccactccttcttgttggtgatggtcaccagcccttgccactggaagccgtcgcgccccaccccgatgccgtagcgaatcgcgcggccgccgggctgcacaagataaaggtgacgttcggccgtcgagacgatgatcgtgcccgggggctcggtggtgcggaagtagaccacctgcttctgccattccggctcgagctgatagccgtcatcagcaatcaagcccggctcgtcgccgcggtcaggttgctgcgcgagggcctgcggcgcggacaggatcagccccatcgcagccatgaaaaccccggtcaggcgacgaaaatccgtcatttcaagctctccccgctgccacagcgcaaatcattcggaaccatcaaacctgaggggcaagttcatggcaagttgatggcgcgggcccttggcatgtcacgagaatgctttggctttttgaggcggtcctggcaatgccacaaacgggggatggcgcgaaaagcagtgcttgtcgccatgggtccggtgcctccctcccctgcacaagctagatcttgttgctctccgccgcgattcccagccggcgcacgatctccgtgcccacggcgcgggcctcgacccgcgaaccgatccgcgggctgcgaaaccgtcgtcccgagtgcagacggatcaccacgatgcagtgctcgtcctcggagcggccgcggcgctccaccgtgatcgtcttcacgtcgggcccttcgatgtggtccgcgcggggcgtgccgtcgccccacaatcgctcgacgcgaatatggtcctgccggatgatccagaatgcgccgatcgcgaggttggcgtagcggtagacggccagcccggcgatcacgccgagcggcagcaacaggatatcgacatggctgggcggcaggcctcgccagagcttgtaggcatagggaccagcgcacaaggcgatcgcgatcaacgcgacgatgcggacgtccctcacaggaaaaggctcggccggctcgccgagatgcatctcgggattgcgggcgtcgagcggattgctgggtgcctcgacattggggacctcgaactgtgtgacgatcctgtccacggtgtcgcgaacatgggtcacgtccgagatcggcggcgacgtcaggcgttctcccgatgccagcgtgaagaccagctggaaacgggctttcaccctcttgctgccgggaacctgcaatccgctgatgtcgtgcttcgggacgacacgcgtgcggagctttccgaacggacgctgctgcccgatcaggatctcgttgggcgtgatgatccacaccaccgccggcgccatcatgatgccgacgacgaatcccgcccccaccaggagcgccaccgccgagacgatgatctccagcgtatcgtgcgtgagcaggccgggcgtgaagcacagcgccaccgcggccgcacagccggccatgatcagccgttgcgcgatcgaggagccttcacgaaggcggatgtcggtgctggtggtcgagtcgtccatcgcgggcggctgattccgtcgcccgcgaaactctacgggcgggtccgcggtgtcaagcaacaagggacagcggagacccgccgcgcgatggctgcgcgcgtcagctggcgacgttcagcagctttgccacggtgcgctcgatctggtcgtaactgccttcgccggcgtgccggaatacgatcttgccgctctggtcgatgatgtattgcgccggccaatattggttgcggtaggcgttccaggtcttggaattattgtcctgagccaccggataggcgatgccgtggcgcttcagcgcggcctgcacgttcgaagccgagcgctcgaacgggaactccggcgtgtgcacgccgaccacgacgaggcccttgtccttgtacttggcgtagaggtcgttgacgtgcggcagcgtgttgacgcagttgacgcagccataggtccagaaatcaaccatcacgaccttgccgcggaggtcggccatggtcagcggtttcgaattgaaccagttggtgattccggtgaaatcgggcgcgttctcctggctcgcggcagcgacgcgcaagggtgccgcgccggacacctcgtcgcagacgccggggataacggccccggtgacggtgaagccggtcagtgcggcggccatggcgagcagtttgaaagtcatgaagggttctccggtgaatgaggcgatgatcacaggccgatctggccggtgggatagaagctggtaagccaggccacgatcagcgtgtcgtattggaagtaggcggagagggcgaagccgatcacgacgacgccaaagccctgctgcagccgcggcgatatccgcgcgaggctgcgcacacgcgtggtcgcggcctgtccgccataagcgatcgcgagcaacgggatcgccgcgcccatggcataggcgaccagcagcgtgctggcccaggcaaggttcttcgagcttgcaaccagcgtcaggatcgagccgagcacgggcccggcgcagggtgtccataccaggcccagcgtggtgccgagcacgagaccgccgagcgcgccctcgcgttgcactccgctggatgcgccgagatcgagccagccgttgagccggatcgagagccactcgaacggcgccggccacagcatcaacaggccgaagcccaacagcaggatcgatgcggcctcgcgcaaaacggtcggatcgaagtcgaacaattgtgtgatcgcgccgagcagcagcgcggtcgctgagaacgacatgacgaagccgagcgcgatcatcgccggccgcaaatgtcctgcgcgtccgatcgaagcgccgagcaaaatcggcagcatcggcagcgtgcagggcgccgcgacggtgaagatgccggcaaggacggcgaggctgagttcgagcatcggggcactcgtgagggaagtcacgagcaattcgggcgcgatgcgtcgggcgttacctggcgtcacacgttcgtgacccgcgggcacccaaatacaagacgacccggaggggggcatcccgtccgggtcgttggaggtcttggaggtctaagcaaaaccgtttgcgaggtttatagggcggaagtttttccggctgatgttgtgctttgtttcaattgtttcgtcggcggtaacgcttccgtgtccctggagaggggcagatcgatgcccctatccaattgaattcgttgaatttaggcggcgaagcggtcgacgccggcgcccttaagcaaatcggccaattgcttgcgggcatagaacatccgggtcttcaccgtgctctggggaatgccgatgatctggccgacctcctccaccgacttctcgtggtagtagacgaggttgatgatctcgcgatgtgcgggcgacagcttctgcacgcaggcgcgcaggatggcgctggtgtcgctgcggtcgagcgacgtctccggcgtatcgttaccatcgggaatctggcgcacgtcttcctggtcgatgtcctcgaagcggcgctggcgcattgcggtgagtgccttgaagcgggcgatcgagagcagccaggtcgagacctgcgagcggccctggaattggccggcggtgcgccacacgtccagaaaaacctggctgaccaggtcttccgccgtggtcgcatcgcgcacgatgcgcaggatgaagcggtacacccgcacattgtgccggcaatagaggatgtgcatggccgtccgattgccgtcggcaatgctttcgagaagcatgtcgtccgaagtcgcctgagcggcaacgatgctctggctggcctgggcgttgatggcgatgacgttcggcatggacttggctccccgtagcgccgcaaccgagcggcgtttccttgagccgatgtgttaatgagccaacgtttcgggacgtctgcacgaaaagggaaaaatggtttcgtgcgccgccaaattgtttcgtcagaacagccgggacgaaacattcgaggcaaaaagacgtgcaatttcaatgtgcggaaaatacggggttagggatctggaggcggacggggccgccgcggaacgtatttcggggatttgcgttcggccgagccgtttaccccttcattccgggacgatgcacggcgtcgagccagggtgcgcaattgcgcatctgagaatctcgagagtccgggtccgcccttggggcgccccggaatgacgttaaagccctacgccttctcgccctgcggcgagaacaggtagccgccgccgcggatggtgcggatcacggcgggctttgccggatcgggctcgatcttgcggcggatgcgcatgatgcgcaggtccacggcgcggtcgaaggcttcggcatcgcgcgcattggcgagctcgagcaggcgctcgcgcgacagcacgcgcttcgggttggccgcgaacaccttgagcagcccgaactcggaggccgtcagcggatgctcgttgccctcgtcgtcgcgcaaggcctgggcttcgaggtcgagccatttggtgccgaagcgcaccagctgctccttgtccgatttcgccgccgccgcgtcgggcgcggcggccttggccggcacgctccgccgcagcacggagcggatgcgcgccatcagctcgcgcagctcgcacggctttgccacgtaatcgtcggcgccgagttcgagcccgaccacgcggtcgatcgggctcgcggtcgccgtcagcatgatgaccggcacgttgatgcggctcttgaggtcgcgaatgatcgagagcccgtcttcctcgggcatgttgaggtcgagcaccacgagatcgggcatgctgccctggatcgctgcccgcagcgacttgccgccgtcgcacagcgtcacggtgaagccgtgcatcttgaggtaatcgccgaccatctcccgggccggggcctcgtcgtcgacgatcatgatgtgctggctttgggtcatggtctttgcatcacggcatttcggtcgcggggagggtcatggtgaaggtcgagcccttgccggggccgtcgctgtcggcggtcacctcgccgccgtgcatgtcgatgatgcgcttgacgatggagagcccgagccccgtcgaactctcgccggcggtcggctttgccgacagccgctggaaccggccgaacaggcggccgagatcctcgggcgacaggccggcgccctcgtcgctgacgcgcacgatcgtgtcgctgccttcatgggtgacggtcacgtcgatcctgccgccgatcggagagtacttgatggcgttgctgatgaggttgtcgatcgcttcgcggatgcggtcgatgtcgcacattgtgacgatattgggcggggcggtgacgctgatcgtctgctgcttgttgaccgcgagcggctggttggcctcggcgacctccttgaccagggtggcgacatcgaccggctcgcggcggatggtgatgtcgaaggcatcggccatcgcatccgagatcagatggtcaaccatcgtggtcagtcgcttggtggcgtcgcggatgtgatcgacctgggcgaccacgccggcttccgatgcgccggtcgagatcagctccttcagcatctcggtgcggccgaggatgacgccgagcggattcttcaagtcgtgggcaacggtgcccaggatctcgttcttgaagccgttggcgcgctgcagccgcagccattgcgccgagaggcggcggttggcctgcatcagcgcgcgggtgcgctgggcgacgcggtcttccagctgcgcgttggcgtcctggagctgctggtagaggatcacgttgtcgaaggcgatcgagagccggctggagaagatctcgaccagcgagcggtcggtctcggagagctcgcgctcggcctgcagcagcaccacgacctcgcgtccgcttccggtgcgcaggtagatcacgctgcggtggtcggcgaattcgttcttgcggcgctggaacgccgcctccaccatctcgcgcagttcggggtcgagcgccttcgacgaggtgaagccgatgaagcggctgtagcagccgctgccggcgagcaccgagagctcgggatcgatgccgccgttgtcgcgcaagaccaggatgccggcgcaatcgacgttgagcagcgaggcgagctgggtcagcacgccctcggcgaggcgctgcatcgacttgaagtcgtacagcgtcgaggcggcgtcgatgatgatctccagcccgcgccgggtctgcaccatgcgctcgagctgctgataggagcgcagcgcggcggtcagcgaggtgaacagcttgtctgcggtgagctcggtcttggccttgtagtcgttgatgtcgtactgcacgatcacgcgccgctccggcgcctgacccggctggccggtacgcaggatgatgcggacggtctcgttcctgatctcgttgcggatgtactcgaccagttcgagcccggcgacgtcggtctccatgatgacgtcgagcagcacggcggcgatgtcgctgtgctcggccatcagcttgcggccttccgccgcggaataggccgacagaatctccaggctctggccgttcaggctgtagtccgagagggcaaagcgcgtgccgtcatgcacggccggatcgtcgtcgatgacggcgattttccatttccgggcgttggcatcctccggcgcgataccggtatcgtcgatcaggtggaggacatcgtcctgttcggccattgagaagtcccgtcggtctctgtgctttgcgcgccgcccttggcgatgcggggcatgataatgcgaaaagtagtgccttgtcccagcttggattccagcatcatgcggccgccgagctgctgggtgacgaggttatagacgatatgcaggccgagtcccgtgccgccttcattgcgccgggtggtaaagaaagggtcaaaggcctggcgctgcacgtccggggtcatgccggccccgtcatcgctgaagatgatctcgatgtcctccgtcccgcgcggccgcgccgagatcgtgattgtgccggcgcgcccgtcggcgaaggcgtggttggcggcgttgaggaacaaattggtcaggatctggccgtaggagccgggatagccgtccagcagcagcccttcgggcacgtcgacctccagcgtgatcggcgagcgcttcagcaccgggcgcaggctggcgatgatctggtcggtggcttcgctcaggctgaactgccgccgctcggcgtgcgagcggtcgaccgcgacctgcttgaaggactggatcagctcgccggcgcgctggaggttggcgaccagctgctgcgaggcgtcgcgcgaggattgcacgaactcctccagctgcgagcggcgcaagccgccctcgcccttgagctgggcctcgaagatctcggtgcgccgggcaagactcgaagcaacggtcaggctgatcccgatcggattgttgacctcgtgggccacgccggcgaccagtccgccgagcgcggcgagccgctccgcgtcgatcaggttctgctgggcggcgttgagctcgagcagcgcgctctcggccttttccttggacgcacgcagctcgtcctcggtctggcgcttggcgatcgcgttctcgcggaacacttccaccgcgcgcgccatggcgccgacctcatcgcgtgccttggtgccctgtacctcgcggtcgagatcgccgagcgtgatcgcgcgcatcgctgccatgatctgctgcagaggcaggcgaatcgacagcgcgatcagcacgccggcggtgaggatgatgccgaggaagatcaccgcgatcgacagcacgcggcgggaaatgtcggcaagcgtgcggtcaaacgtctcctgcgccttctgctcgcgctggcgcatcttggtcgagagatcgtcgatggcgccgatcgcctcggcctggctggcgtcgatggtgttgcgcaggagctcggtgcggctggcaagctgctcggacagcttggcaaatccctcgcgcagcgctgcagtgcgggacgcgagccgccgcagggccatcctctggaggtcgttgtcggcgagatcgatcatcacggggatggtcttctcgatcgtctcggtgttgcggcgcgcgtcgtcggccgcgcctgacgacagcgaaagatagtaggaattggccgccaccagcatcgcggtgaaggcctcccgggatttccccagcgagggccagatcagcgcgtcgcgatggcccgtggcgccctcgatgatggagtagaggccggccatgtccctggccgggccctgcacctgctcctcgtaggtcttggcgatggtggcctgcacgctgcgcagctcgccgaaaccgttgaggaagcggtcggtggtgcgctccagctcctcgaccgagcctgcgagcatcgggtccttggcggcgcggtttgtcagggtgcccagcaccgcctcgcgcagcaggaggatctcggcgaacaggtccgggctcggctgattgatgtagcggtgaatcaggttttgcagccgcccggtctcgctttcgagcagcgcgaggatacggtcggactcgcgcacctggcgcacatcgtcccaggccgaccccagcacctgcgcgccgttccagatcatcgccaccaggacgacgacaacggcggagttcagcccggcgatcgacaggatgcgccagcggatcggcactgcccgcaggacgccgacgagtcgcgcgcgcagctgcccgatcgagccgggcggcctgtccgcgtgttcgctatgtccgagcccgggcaagaagctctactccaccttgcgaatacgttcgatcagcgcggccgcggccggatcgcgcccggccttgtcgtagatcgccgtcatcgcctcctcgaacggcctgcggtcgatctccttgatgatggtcacgcccgcgtcctgcgccttgcgctgcgactgctcctcgaggtcgcgccacttctcgcgcatgaaccggctggagcgttgcgccgcctccttgaagatcgtctgctcctccgccgagaggcttttccaggccttgagcgagatcaccagcacctccgggctcatcgtgtgctcggtgagcgtgtagtggccggcatgcttgtaatggtccgtcgtcacgaaagatggccagttgttctcggcgccgtcgatcagctggttggcgagcccggtgagcacctgtccgtatggcagctcgaccggttcggcgccgagcgcgcgcatcatctggctcatcaactccgactgctgcacccggatccgcaatcccttgagatcggcgacagtcttcaccgggcgaacgccattgtagatcgaccgcgcgccggaatcgtagaaggtgagcccgacgaagccgtagggctcgaagctgttcaggatctcgctgccgatgggtccgtccagcaccttctgcatgtgctcgatggaccggaacaggaacggcatcgcgagcacgttcatcgccggaacgaaattgccgatcagcgccacgttggtccggttgaggtcgatcgcgccggcccgggtctgctcgatggtctccttttcctcgccgagctggcgggaatggaacaccttgatctcatgccggccactggagcgctcggcgatcagggcgcccatgtagcgcagcgcctggacggtcgggtaatcctcggcctgggtgtcggcggcgcgaaattcgcgcgcaacggcgcccgtcgtccagacggcaagcacaagcgcgacgaagatcaccccggtccgcgagagttcggcacggctcagcactggcacactcaacccctcagtggtggagtctatggcagatggaaaaggttcaatgcaatctaaagcgttttcaagcgaagtggagaccggttgtcgtcagcaaaacgcgtcagaataggaatcgggagcccggtccgatcggaacggcccccggcagatggtcgagggacggccattccgcgtgattccgcaggccgattgtgcggcgcggccggcgttcattcccggttgaaactgggtatgtcgcgccttaagcagggcagcggcgttttttcgaccgcgggccggaaagagccatcctgatgtcagccttacgcctcttgcagctcgttgccgtccttgcggcgctttcattggccgcccccgcgcgtgccgcgaccgagatcgcgtggtggcacgccatgtccggcgaactcgggcggcagctcgagaagctggcctcggacttcaacgcttcgcagtccgattaccgcatcgtgcccgtctacaagggcaattacaccgagacggtcacagcggcgatctttgccttccgctcgcgcagccagcccgcgatcgtccaggtcaacgaggtcgccaccgcgaccatgaccgcggccaagggcgcgatctatccggtgttcagcctgatgcgggaccagggcgagccgttctcgctgggcgattacctgcccgcggtttccggctactacaccgatgccgccggcaatctcctgtccttcccgttcaattcctcgacgccgattctctactacaacaagaccatgttccgcgacgcgggcctcgatccggacaagccgccgaaaacctggccggacttgggggcggccgcgaagcgcctgcgcgaccgtggcgctgcgtgcggcttcaccacgtcctggccgtcctggatccatgtcgagaatttctccgccttccacaatttgccgctggcgacgcgggcgaacggctttgccggattggatgcgggactgaccatcgacaatccggtgctcgtccatcatgtcgcggcgctcagcgagtggcagaagacgaaggtgttcgactacagcggccgcgggcaatcggccgagccgcgcttccagaagggcgaatgcggcatcttcatcggctcctcggcgacccgcgccgacatcaaggccaattcgaagttcgagatcggctacggcatgatgccgtactggcccgacgtgaagggcgcgccgcagaactcgatcatcggcggtgccaccttgtgggtgctgcgcgaccgtcctcgcgaggaatacaagggtgtggcgcggttcttcgcctacctgtcgcagcccggcgtgcaggctgcctggcatcagaacaccggctatctgcctgtgacccgcgccgccttcgagctgacgcgctcgcaaggcttctacgagcgcaatccgggctcggcgatctcgttcgagcagatcacgctcaatccgccgacggagaattccaagggcatccggctcggctccttcgtcctgatccgcggcgcgatcgaggacgagctcgagcgcgccttcgccggccagaagagcgcgcaggaagcgcttagttccgctgtcgagcgcggcaacaagatcctgcgccagttcgagcgtgcaagtccggagcgctagggacgatctgagcgcgcgcctcgtccttcgagacgcccgcctccggcgggctcctcaggatgaggctaggcagcgccggtgccggtgacaatgctgccgcgcaacagctcctcatctgaggagcccgcaaagcgggcgtctcgaaggacggcccgcaaggacactgtttgcagaatgcaagcccgatgagattgccagacctcaccgacgccgaaagcttccgcgccttccgctccgatgcggcgcgttggttgccggtcgcgctcgacatcgcgcgcagccacgggctcgacgccagcgcgccgcatgtgtttccaaccgggaccaacctcgtcgtcgggctcggcgacgggctgatcctcaagatcttccccccgctcttgcgtgcgcaattcgtctccgagcgcgcctcgctggcacagctcaagggtcgcctcgatctgccgatcccggagatcgtcgccgagggcgtgcgagacggctggcgctatctgatcatgacgcgccttgccggcacgctcggttcggaagtctggccgcagctgccggaagaccagaaggagcgcctgctgcgccagatcggggagaccatcgcgagcgtgcagcgcgccccgctcggcgcgctcgcgcatctcgagccgcgctgggacgaattcatgcgcgcccagatgcagggctgcgaggcacggcatacgcgtcttggcctcgcgcccaaattcctgaggggcctcgacgatctcctgcgcgatgccgccgagctcatcccgatggatgcgccgccggtgatcctgatcggcgaatacattcccgagaacttcttgctcgcctgcgatgacggccagtggtcgctcgccgggctgttcgacttcggcgacgtgctggcgggatggcgcgattacgacctgctcggccccagcgcctccatggcggcgggccggccggggagggtcaaaagcctgctcgagggttttggctatgagaagctcgacttcgtcctcaagcggcgcctgatggccctgatgctgctgcaccgcgccagcgacctcaacgcgcacatctgcgtcgagggctggcaggggagggcgaaggatttggtcgagctgcaggagctgatctgggcgggctgatgactcgacgcgcctcggaatgacgccgatggtgccgctgtatcgcgacgttcgcgaaggatcattctgctgccgcctttcgaatgagcggtcgtgttagtttgcatatattgtgtgcaatatgccgatcattgtatgcaatctaagctgccctccccacgtcgcagtttgcggctttggcggctagatatgagcaatgtcagtggcttatgggctatgtaacgcctcgttaagctctggcacgaaccttgcgaatccggttccaacgaaacattgttttggagcctttcatgaagcgccgcgatttcctcaaatccgtttccggactggccgccggagcggcgcttccggccatgccctcggtgatctcctcggccaaggccgacgcgcgttcggagacactcctgatcgtctcggagggcggccccaacaatctcgacatccacggcgtcggcaccaacgtgcccggctatgaggtgtcctggaactgctacgaccgcctgatcagccacgagatgaagagcggccccggcggggtgccctattacgaccgcgacaagttcaagggcgagctcgccgacgacatgaagatcgacgacatgtcggtcaccttcaagctgaagaagaacgccaaattccacgacggcacgccggttaccgcgagagacgtgaaatggtcgctcgatcgcgcggtcagcgtcggcggcttcccgaccttccagatgagcgcgggatcgctcaccaaggccgagcagttcgtcgtcatcgacgaccacacggtgcgcgtcgacttcctgaagaaggacaggctgacgatcccagatcttgccgtcatcgtgccctgcatcgtcaattccgagctggtgaagaagaacgccagcgagaaggacccctggggcctcgaattcaccaagcagcagaccgcgggctccggcgcctacaaggtggtgaagtggacggccggcaccgaagtggtgatggagcgcaacgacgcctgggtcggcggtcccctgccgaagatcaagcgcgtgatctggcgcatggtgccgcaggccggcaaccgccgggcgctgctcgagcgcggcgatgccgacatctcctatgagctgcccttcaaggatttccaggagatgaaggccaacggcaagctcaacgtggtgtcgctgccgttctccaacggtattcagtatatcggcatgaacgtgaccaagccgccgttcgacaatccgaaggtgcggcaggccatggcctatgcgatgccgtatcagaagatcatggacgccgtgctgttcggcctcggcaatcccatgttcggtgcggccaaggacaagccgaccgaggtcgcctggccgcagccgcacaggttcaacacggacatggagaaggcgaaggcgctgctggccgaggccggttacgccaacggcttcgagaccacgatctcgttcgacctcaacttcgccggcgtcaacgagccgctctgcgtgctggtgcaggagagcctcgcgcagctcggcatcaagaccaccatcaacaaggtgcccggcgccaactggcgcaccgaactgaacaagaaggagatgccgctcttcaccaacgtgttctcgggctggctcgattaccccgaatacttcttctactggtgctatcacggcaacaattccgtgttcaacaccatgagctacaagtcggccgcgatggacaagctcatcgacggtgcgcgcaccgcggcggctgccggcgacaaggccgcctacgatgccgacgtcaagggcttcgtcgacctcgcctacgccgacatgccgcgcatcccgctgtaccagccctacgtcaacgtcgcgatgcagaagaacatcagcggctatcaatactggttccatcggaggctcgactatcgcgcgatggcgaaggggtgaggggatatgggtgaggtgagcacgctcttcaggctccctcccccct

SEQ ID NO: 289 - DNA, 165267 bp, Bradyrhizobium colbertium
  misc_feature (37269)..(37278): n is a, c, g, or t
  misc_feature (90493)..(90502): n is a, c, g, or t
  misc_feature (111609)..(111618): n is a, c, g, or t
  misc_feature (128636)..(128645): n is a, c, g, or t
ggtcgtcctcgacgtcgatcgcgtcctcgagctggcgcccgaaatgatggcggcctgatacggcggcgccgccgccggcggacttgcaactggaagtgccccgtaaggggaggaagcagaggttcacatgcgaacttgtctcgtcgttgacgattccagcgtcatccggaaggttgcgcgccggatcctggaaggcctcgactttcagatcctcgaagccgaagacggcgaaaaggcgctggaggcttgcaagcgcgggctgcccgatgcggtgctgcttgactggaatatgccggtgatggacggctacgagttcctcggccatctcaggcgcatgcccgggggcgaccagcccaaggtggtgttctgcaccaccgagaacgacgtcgcgcatatcgcgcgcgcgctgcacgccggcgccaacgaatacatcatgaagccgttcgacaaggacatcgtgacggcgaaattccaggaagtcggcctgatctgagcgaccgcccggaggccgaacggatccttcggagctatttttcaactgaaccgtttcagtctgagttggtgagtaatgagtgttgcgttcgcaggtaattcgaccacgggctcgtcgcgtgaaacggggccgctgcgggtcatgatcgtcgacgactccgtcgtcatccgcggtctgatctcgcgctgggtcggtgccgagcacgacatggaggtcgcggcctccttgcgcaccgggctcgaagcggtcaaccagctcgagcgcatcaaccccgacgttgccgtgctcgacatcgaaatgcccgagctcgacggcatctcggcgctgccaaaactgctggcgaagaagcgcgatctcgtcatcatcatggcctcgacgctgacgcgccgcaacgccgagatcagtttcaaggcgctgtcgctcggcgcggccgattacatccccaagccggagtcgacgcgcgaagcgtcggcggcggacatctttcaccacgacctgatccagaagatccgccatctcggcgcacggctgcgtcgcaagcccgcggtcgcaagcccgccgctcgcgccggcgagtccggcgcccgcgatgcgtgcaccgtccgtcgcaaggtctgccgcgcctgcaccggctccggccgcaccgtcatcgggggcgctcacgacgcgtgcgttctcgacccaggtaccgaaggtgttgctgatcggatcctcgaccggcggaccgcaggcgctgatggcgctcgtcgccgatctcgggccggtgatcgaccgcgtcccggtgctggtcacccaacacatgccgccgaccttcacgaccatccttgccgagcatctggcgcgctcgagccgccggccggcagccgaggcggtcgacggcgagctggtgaagccgggacggatctatctcgcgccgggcggcaagcacatgcgcgtcgcacgcagcggcggggacaccgtgatcgcgctcgacgacggtcccgcggtcaacttctgcaagcccgcggtcgatccgctcttcacctcggccatcgacgtctggcacggcaacattctctccgtaatcctgaccggcatgggctcggacggcatgcgcggcggcaaggacatcgtcgctgccggcggcagcgtcatcgcacaggacgaggcttccagcgtggtttggggcatgccgggggctgcggccaatgctggcatctgcgcggcgatcctgccgctcaaccagatcggcgccaaggtcaatcgcctgttcgcgggagaccgctcgtgacgccggtcgactacgattatctgcgcaagttcctgaaagaacgctccggtctcgatctctccgccgacaagcaatatctggtcgagagccggttgctgccgctcgcccgcagggcgagcctggaaggcattcccgatctcgtgctgaagatcaggaatggcgacggtcggcttgcgaccgacgtggtcgaggcgatgaccaccaacgagaccttcttctatcgcgacaagatcccattcgatcatctgcgcgacaccatcctgccgagcctgatccaggcgcgcgcggcgcgcaagtcgattcgcatctggtcggcggcctcctcgaccgggcaggagccttattcgatcgcgatgtgtgtgaaggagataggcgcagccttggccggttggcgcatcgagatcgtggccaccgatctgtcgcaggaggtgctggagaaatccagagccggtgtctatagccagttcgaggtgcagcgcggcctgccgatccagcacctgatgaagtattttacgcaggtcggcgaactctggcagctcaatgccgacattcgcgccatggtgcagttccgccagctcaatctgctgcaggacttctctcatctgggcacgttcgacgtgatcttctgtcgcaacgtgctgatctatttcgatcaggacaccaaggcggtgatcttcgagcgcctggccaaggcgatggaagccgacggcacgctgctgcttggcgctgccgaatccgtcgtcggcatcaccgacgcgttccgccccgtcacggagcgtcgaggtctctaccagctcaatcctgcgcgttcaggccgtccgatgggcggattgatgccgccgtcgttgaagatcgccgcggcgcggtgaactctccgtcattccgggctcgcgactttgtcgcgcccggaatgacgagccttcacaaaatcgcatgcggcagaaaccgcgaaccgtttcccgtgatcgggctctcgtcttcgcggatcgataggccgcagggctcgtggttcaccagccagcttccgatcactggatagaaccctgagaaattcggcagcggtgacagcgcctgccgcacgaagccttccgcgccgtagggcccggcctgttcatcgagcggcatgccgcccgacaccagcgtgacgttggcgccttcgcgcgacagcagcggcttgcgcacaaacgagctgccgagctcggcggcgcgcggatcgtcctcgaagaaggccggcagcagattgggatggttcggaaacatctcccagagcagcggtagaatgcccttgttggaaagcaccgccttccacggcggctcgatccagcgtgtcggcgcgctcgcgagcttggcgccgaacgtgtcatggaacatccactcccaaggatagagcttgaaggccagtgcgatgtcgcgatcgtcgatctcgacgaagccgccgggctcgtcgcgccagccgatctgctcgatatcgagcaatttggtcgagagcccggcttggcgcgcggtgtcttcgagataggcgagtgtgccggcgtcttcctcgttgtccgtgacgccggtgagatggatgtggcggctgccggcgatctccctccaggccgcgatcagccgctcatggatggagttgaactgatcggcgcgcggtgggacgatgcgccgttcgatcgcctgttcgagccaggtccattgaaacaccgcggcctcgaagatcgaggtcggcgtatccgcattgtattcgagcagctttgccggacctttgccgtcgaatttgaggtcgagccggccatagaggctgcggtcgtcgcgcttccagctctcggcgatcaggctccagaacgcttccggaatcttcaatcgtcggagatggcgctcatcgccgatcacccgtccgacgagctccaggcacattgcgtcaatgtcactggtcggtgcctcgatgccgcgctcgatctcgtcgagcgtgaagccgtaataggcacgctcgtcccaatagcgctcgccgccgatagtgtggaaggtgaagccgcattgcgctgcggtctcacgccagtcatcccgctcgaggcagctgatgcgctgcatggatcagccgccgccggagaagccgtggccgaacgagccgaagccgccgcggctcacgctgccgtggccggaaacggacgacgttcccgacgaggaatgactggaggaatcgctgttgaagaagctcgaccgcgacgaccagcgcgagctgctgccccccgacgaactgctgctgctgcatgtcgtggtcgtctgctccggcacggctccgggggtgggctcgcagttctgccgcggcatcaaggtgtaggcggtggtgccgaccgcaatcgtgcccatcaccagcagcgcgacatggccggagcgcttggtcggcggccgtgacggcggtggctcggccaccggccggcgcttgccgaactgctttttggcgggtttgtcggccatgatcagtagatcatgctggcagcgttcagcagccccgcggcgagcgaggacaggccgagccagatcgccggcgcaagctcgccggcatcgattcgcgccgacaggttcggcaccggaaccttgacgagatagaacacgatgacctggacgaccaatgcgatcgtcgcccagatcaggcagtccagcacgttggccgaatgcgcgatggcgctgaccagcggcgcgacgaagccgagcaggctgagcccaagtgcgatcgccgcggccggctggttgtcgcggatgagctggaattcgttgtgggcggtgatgcgcgtatagacgaacagataggccacgatcgcgatcagcccggtgcagaaatagaccaggaaggcgggcaggccggcgagtgattgcaggatcatcgttcccccatcgtgcagcgaccattcgtcggcgggaggaggttagcggttcaaatgttagggggtggtgaagctggaacggtacggtcggtgcaatctccctcaagcaggaccgggagaggacgcccccaaaaaacaaaaccccgccatttgcggcggggtccaggctgggaggagcaagccctgcggggcttgccacgtgaacccaggatcaggcggggatgcgctcgtcggcttcgtgcggctcgcgcagcacatagccgcggccccacacggtctcgatgaagttgcggccctcggacgcgttggccagcttcttgcggagcttgcagatgaagacgtcgatgatcttcagctcgggctcgtccatgccgccatagagatggttgaggaacatttccttggtgagggtcgtgcccttgcggagcgagagcagctccagcatctgatattccttgccggtcagatgcacgcgctggccgccgacttccaccgtcttggtgtcgaggttgacgacgaggtcgccagtctggatgaccgactgggcatggcccttggagcggcgcacgatcgcgtggatgcgggccaccagctcgtccttgtggaagggcttggtcatgtagtcgtcggcgccgacgccgagacccttgaccttgtcctcgatgccggcgaggccggagaggatcagaatcggtgtcttgattttcgagacccggagctgcttgagcacgtcgtagccggacatgtcgggcaggttgaggtcgagaagaataatgtcgtaatcgtatagtttaccgagatcgacgccttcttcccccaaatcggtcgtgtagacgttgaagctctccgacttcaacatcagctcgatcgactgcgcgacggcgctgtcatcttcaatcagcaaaacgcgcatgccagttccccatagtcgccgctcctgggcgtcaggtcggccgcattcgcggcactcaacaaaacgcctttgaacaactgattcggatcctgacgacagatggttaacaaactctgattctggaacgcaagtccccaccgtgcaatttttgtcgaatcgccctaaggtcttgcgcgcgaagcagctttcgtcacctagttccgttcaagctccactttaagagacgggcctaaccgactcccgcgactcagccttcttctgaagggaagccacgctcagtgtcaaagacagtgacgcaatgattaatgatgcgggtaaacacgaagttaagcgccgttcagaaatatggcgaaacttaaggttttgaccgtgatgtcccggatgagcagcgcgcgccctttcatgaaggcccaccgatgaaggctttggccgaacagatcggcgacatcgacggcatcaacatatatggccgcgtggtcggcgtgcgcggcctgatggtcgaggtcgccggtcccattcatgccatgtcggtcggcgcgcggctggtgatcgagaccggtgccaaccgtaccattccctgcgaggtgatcggcttctccggcaacaatgccgtcgtgatgccgttcgccggcctcgacggcgtgcgccgcggttgcaaggcggtcatcgccaatgcggccaatcaggtgcggccgtctgcagcgtggctcggccgcgtcgtcaacgcgctgggcgagccgatcgacggcaaggggccgttgccgcagggctcctcgccgatgccgttccgcaatacgccgccgccggcacactcgcgcaagcgtgtcggcgcgccgctcgatctcggcgtgcgcgcgatgaacacctttctcacgtgctgccgcggccagcgcatgggcatcttcgcaggctccggcgtcggcaagtcggtgctgctgtcgatgctggcccgcaacgtcgatgccgatgtcagcgtcatcggactgatcggcgaacgcggccgcgaggtgcaggagttcctccaggacgatctcggagaggaggggcttgcgcgctcagtcgtggtggtcgcgacctcggatgagccggcgctgatgcgccgccaggccgcgtatctgacgctcgcggtcgccgagtattttcgcgacgaggacaaggacgtgctctgcctgatggactcggtgacgcgctttgccatggctcagcgcgagatcggtctgtccgccggcgagccgccgaccgccaaaggctacacccccaccgtcttcaccgaattgccgaagctgttggagcgcgccgggccgggcctcgggataggtgccatcaccgcgatcttcacggtgctggtcgatggcgacgaccacaacgagccgatcgcggatgcggtccgcggcatcctcgacggccacatcgtgatgcagcgcgcgattgcggagcgcggccgctatcccgcgatcaacatcctcaaatccgtctcgcgcaccatgccgaaatcggcggacccgcagttctggccggtcatccagcgggcacgccaggtgatggcgacctatgccgacatggaggaattgatccggcttggcgcctaccgggccggctccagcccggaggtcgacgaggcgatccgcctgcacgagccgctggaggcgttcctgcgccagcgcaaggacgagaaggcgtcactggcggacggctaccgccaattggcgcaaatcctcggcaatttggaaacggaacgctaactttgtcaggtcatcatccgatccaagagagtagcagagccggtcttggcccccatcgggcctgtggggtgaccggtgtcgtcccacgtgcagcgcggggacttctggggagtacgagtcgatgaagtcacgagataccctcatccgcctgaagaagtttcaggtcgacgagaagcgccgcagggtcacccagatcgagaccatgatcgcagacttccaacgcatgtcggtcgatctcgaacgtgagatccagaccgagcaggagcgtgccgggatcaacgatccctcgcacttcgcctatccgacttacgccaaggccgcgatccagcgccgcgagaacctgacccgttcggccgatgagctcaagggccagctcgacgaagccaaggccgcactggccgaagctttcgaggagctgaagaaggtcgagctgctcgacgagcgcgaccaggcccgcgagcgcgccgaagagaacgcccgcgagcaggccgacctcgacagcatcggcctgatgcgtgctcgcatcggcgccgtcgcgtaacggcgccggcaagccagagcaccgagaaatccgcgaacccggacccgcaaggtccgggttttcgcttgtgctgtccacagtgcggcgccgcaccccttggtgctcggctttgccgcgcgctatggtggctggaatgaatgctgtgccagcaacagcggtgcccacctcttccctgggagaggtcggcgcggagcgccggatgaggggtgacggtccgccgtctaccccgtgccccctcacccgatttgctgcgcaaatcgacctctccccgtgtgggagtggtgaagggaagcgacgggccgcttttcagggggctgaatgctgacgccagcagagctggtcgggttgatcgaggcggtggcgaagcgcgatcaggccgcgttcgagcgcctttacgccgctacgcgcgcgaaactctatggcgtcgtgctccgtatcttgcgccgacaggatctcgcagaggaggtcattcaggagacctacgtcaagatctggaacggcgccggccagttcaatccggccctgtcgtcgccgatcacttggatggcctcgattgcgcgcaaccgcgccatcgacatcgtgcgcaagaagtcggaagcctccatcgaggacgagcctcaggcgatggaggttgcggccgagagccccgatccgctggcgcgccgcgagatgaccgaggagctgaagcgcctcctggaatgtatcggccggctcgagcccgaccgccagcggctcgtgctgctcgcctattacaacggctggagccgcgagcaattggcggaaaaattcgctgctcccgtcaacacggtgaagacgtggctccggcgcagcatgctggatatcagggagtgcctcgggctctagaggatgatgagagtggcagagaccagcgcggcaacgacagttcacctctacctgcgcgagaggtgaaggagtgtgatggactacaccgaggaccatatcgcgctcgccgcggaatacgcgctcggcacgctcgatgccgatgagcgtgcccaggtcgagaccatgatggcggtggacgaggcgttcgccggcatcgtgctgtcctggtcctatcggctcagtgccctcaaccagatggtcggctcggtcgagccgcgcccgatcgtgtgggagaacatcagatccgagatcgcgcgcacggcccttgcgcaacagccgtccgcgcccgccgaggctacgcctccgccgcctctgccggaaccgccctcgcccgacaccggagagctctcgacggagagctcgtcatcggccgacgtgcagcgtcctcaagtcgagcctccggcgcggccatctgacgagcctgatgcgatacccgacatcgcgccgcaattcatcccgcaggtgcatgctcccgatctcaacgtcgtccgcgcaccgcagacgccggtcgcggacgatggcaacgtgattcgcctcgagaaccgggtgaagcgctggcgctccatcgcatcggctgtcggtgcgcttgcagccgtgctgctcgtgacgctgtctctccaaatcttcctgcccgaggcgctgccgggcgccttgcgtccggcgccgcgcatccagaccgtcgaggtcaagaccccggccgcgccgctcgccccctccgcgcaatatgtcgcgctgctgcagggccagggcggcggccctgccttcattctcaccatcgatggcgcgacgcgaaatttcacggtgcggaaggtcggcgcgacgccggagccgggcaagagcttcgagctttggctgatctcggacaagctgccgcggccgcgctcgctcggcgtcatcggcgcgagcgatttcaccgcgcgtccgctgctcgcgtcctacgatgccgaggtcgtcaatggtgcgacctacgccgtcacggtcgagccggccggcggttcaccgaacggccaaccgacctcggccccagtgttttccggaaagctgatcgagactgtcccgcccacgcaagcgcaggcgccggcgaagaagtaggtgtcgaccgtccctaggggccgcattcctgtcgctgcggtccattccgccgtcgtatttcgacaagcctggccgaatccgtgcctggtttgaacctctccgcaattgccggcgtcaaatccccggaatttgaagttggcgccgccgatcgcgctgccggagaggggctagaaatcagatggatgcagcgagaacgccgggcatcttccgtcaccaatatgcggggctgccgcacggcgcggccttcgaacattggcgcgagcgggccgtcggctcctgcggcctcgatatcgggccgagccatggcgagagcatcgattgcaggctccagatcagcgtggtcgacaacatcgcgctcgctattcccgaaggcgcctccgcacaatattcccgcacgcagagtcatcttgccgacggcagcgacgacctcgttctgatcgcggcacatgcgggcctcgtcagcgtcggacagaacggccacaccgtcgaactctcgcccgctcagatggtgctggtcgacatgagcgtcaccggcactgtcggccataccgatgagaatcgcttcacctctatccgcatgccgcgccgcgcgctgctcgatatcagtccgcgcgccgaagacaagctatcccaggtgctgagcgacggtgcggtcgccgagaccatcttccgctaccatgcgctcgccgccaaccacgcgccgcatctcgatgcggtgggccagcgcctgaccgcgcagcatatggtcgatctcgtcggcctcctgctcggcaccgatgcagagcacgcgagccgcgcacgcggccgggggcaggcggcggcccgactcgacctcatgcgcgccgacgtgatggctgcgctcggccgcaacgatctctgcctgtccgaggtcgcgacgcgctcgggtctgagcccgcgccaggcgcaacgcctgttcgagcaggccggcaccaccttcaccgaattcgtgctggagcagcgtctgcttcatgcgcgcaagctgctcggcgatccccgcgccagggcgcgcaagatcagcgacatcgcgcattcctcgggcttctccgacctgtcctatttcaaccgcgccttccgcaagcgcttcggcgcgacgccgtcggagctgcgcgaggcgtaagcagcgactgtgacgacgatcatcgggcggcatcgttcgccttgcgtgcaattgctcaccgcgcaaaacatacccagacatgagaaagcgcccgtggggggcgggcgctttccgtagtcgacttggggttggggtcgtctacatatccacgtggcgactttggggggctggtaaagagccgcgtgaattcctgaaactcatgtctcctcagcgaacgagcgaggtgttcgcgctggtgatggtgaccggcttgccggccttcatgacgcgtgcggtctgggtaaggccttcatccgagctcgttgcgcgcgcggtgatgccgaggcccgccaccgcgatgccggcaacgagcgccaccaccacgatcttgaggtgggtcgagcgatctgcgctgtaaatcgagtggttcatggaagcctcctgccgccatctacccgaagtagtcgccagcctgttcaggcaggttcatgcttccggtgcccaacaacctagtattgggtggattcgttcccaaggggcgatcacaagagcgtgaaatgacgtgaaaggccgcgatcagaaaacgctcatcggccctgcattttggcaattatttcaaagctgtaatgtgcgtgccaggggctgtttcggcggttggtggacaaagcgccgggaactcaaaaaccatttgcctgtggctgaaaagcatacggcttcttaaggcaaatcagatgcttccgaccgttttgagcctcgcccttgggtggatttcggcctgcgacagcacggtggtctgggcccggaaccgctccaccagggaccggacgaaaggacgaatggccgcggaggtgaccagcaccggcgcttcgccttctcgggcggcgcgttcgaaggcctcgcgcacggcggtcatgaactccgacaatttcgagggctgcatcgcgaggctgcgctcctcgccctggccgatgatcgactcggcaaaggcctgctcccacttcgccgagagcgcgatcagcggcagatagccggcataggaggtgttctgcgcgcagatctgccgcgcgaggcgggcgcggacgtgctcgaccatggtggctggattgcgcgagaaggcgagcgaatcggcgataccttcgaggatggtcgagaggtcgcggatcgagatgcgctcggcgagcagcagctgcagcacgcgctggatgccggagaccgtcacctgtcccgggacgatatccttgaccagctcgctctgctccttcggcagctccttgagcagcttctgcacctcgccgtaagagagcaggtccgacatgttggccttgagcagctcggtgagatgggtcgagagcacggtcgcggcgtcgacgacggtgtagcccttgagcgaggcctcttccttcaggctggcatcgacccaggtcgcgggcaggccgaaggtcggctcggtggtgtggatgccgggtacctgcacctggccgccgccggggtccatgaccatgaactggttcggccagatcttgccggtgccggcgtcgacctccttgatcttgatgatgtaggtgttggcctcgagctggacgttgtcgaggattcgcaccgccggcatcacgaagcccatctcgatcgcgagcgaacggcgcagcgccttgatctgctcggtgaggcggtcggtgccgtcggggccgttgaccagcggcagcagcgcatagccaagctcgatcttgaggtcgtcgatcttgagtgcggccgagatcggctcttcggtcgcagcggcccccggtacaccgggctgacctgccgcgggcgcggccttggcggcttcttcggccttggcggtgacccggttgcggttgcgcgagttccaggccagcgcgcctgcgccgaggccaagtgcgaggaacgggagcgtgggaatgcccggcagcgccgccagcaccagcatcaccgccgaggacatcgcgagcgcctgcggatagccggagaactgcttcatcagcgccttgtcggcggcaccggagacgccggccttggagacgagcaggccggccgcggtcgagacgatcagcgccggcacctgggtgacgaggccgtcaccgacggtcaggagcgtgtaggtgcggccggcgtcggcgaaggacatgccctgctgcgccacgccgatgatgatgccgccgacgacgttgatgaagacgacgagcagtccggcgatggcgtcgccgcggacgaacttggaggcgccgtccatcgcgccgaagaagccgctctcgtcctccagctccttgcgccgctccttggcgaccttctcgtcgatcaggccggcggagaggtcggcgtcgatcgccatctgcttgccaggcatggcgtcgaggtggaagcgcgcggcgacctcggcgatgcggcccgaacccttggtgatgacgacgaaattgacgatgatcaggatggcgaagacgatgatgccgatgacgaaattgccgcccatcacgaagttgccaaaggcctcgatgacgtggccggcggcggccgtgccctcgtgtccgtgcgagaggatcaggcgggtcgaggccatgttgagcgacaggcgcagcatggtcgagatcagcaggacggttgggaaggccgagaattccaatggcgcctggatgaacaacgatgtcatcaggatcaggatcgagagcgtgatcgagatcgccaggaacagatccagcacgatcgcgggcagcggcaggatcagcaccaccaggatggtgaggacgccgagcgccagcgcgatatcgccgcgcttgaggatggtgacgatctcgctgagggaggggatgccgggcttggcgctgcctacgccctgtcccgccgtgacgtcgaccatggtagctgcctccccgcgcgactgccgtccgcgcgccccaaacgtctgcgcggcggccgatgggccgccgttccgaaagtgaggcaccgcactggcgtccacagggagtcccccgttctaacgcggccgacgacactcgacttcacccggcaatttttgcccggtgtatggttagcaaagggttaacggaggggtagagagagggtgggcccggggttttcggggcgctcgggctgccatccggggcgcccgaagggcgaaccccggaattatcgggccgcaggtggtgtgggaaatggagtccgggctcgtgcccagggggcacgccccggaatggcagagcctacttggccttctgcatcctggtcaccgtatatcccgacgttccttcctcagcctcgaaggtcaccttatcgccgaccttcacttgcttcagcatcgcaggatccttgacccggtagaccatggtcatgggttcctccatgccgaggctcttcgccggtccgtgcctgagcgtgatcttgccggcgccctcgtcgatcttcttcacctcgccgctgatcgcggcgccctcggctgcgagagttgcggtcgcaaggcccatgctcagtgccagtgcagcagtgataccaatgatgcggttcatgatagtctccattgcttacttcacggtgacgtggccgatcatgccgtagtcgcggtgatcggggatcagacaggaaaattcgaacgtgccggccttgctgaatttccagaggatctcggccgtcttgctcggggcgaggcgcactgcgttcggctcgtcgtgctccatgtgcggatgcttcttcatctcctgagcatgcgcgagattctctttggtcgtggcgagcaggaattcatggtcctccttgccgacattgcgcagcacgaagcggatctgctcgccgcgcttcacctcgatccgggcgggcgtgtagtccatctcgttcatcagaatctcgatggtgcgcgcgggcttcttgggattgccgggctcgccggccgaaaaggttgcgtgcccgtgcttctcatgggcaagcgccggcgcggtcgaaagcgcggccagcgcgaggccgagcttgatggcggtcttcatcgtggtctccagtagctggttcatcggaacgctcacatcttcatgttcttcatcggcgcgcccggcttttgccgggccggctctgcggcgggcgccgtgacctcgtaggcgacggtgccttgcgggaacttgtatggcccaggatcgcggtaatcgtcgcgcgcgaggtcctcgcggatcttcatcaccgtgaacatgccgcccatctcgatcggcccgaactggccggtgccggtcatcattggcagcgtgttgtcgggcgcgggcatctccatgttgcccatcgccatgccggtcgagcccatggccattccgtcgggcgcgagcttgccgacggccttggcgagatccttgcgcgacaccccgatgaggttgcgcacatcgtgccccatcgcattcatggtgtggtgcgacttgtgacaatgaaatgcccagtcgccgggattgtccgcgagcacgtcgaacacacgcaccgcgccgaccggcacgtcggtggtcgtctccggatattgtgcgctctccggaatccagccgccgtccgtggaggtcaccgcaaagctgtggccatgcagatggatcgggtggttggtcatggtgagattgccgatccgcacgcgcaccttgtcgccgagcctgaccggcagcggatcgatgccgggaaacacccgcgcattccaggtccacatgttgaagtcggtcatctcgttgacatggggcaggtaggtgccggggtcgacgcgataggtgctcatcacgaagacgaagtcccggtcgacgggccgaaagctctggtcgcgcggatgcacgacgaccatgcccatcatgcccattgccatctgcaccatctcgtcggaatgcgggtggtacatgaaggttccgcttttcttcatctcgaattcgtagacgaaggtcttgcccggctggatgtgcggctgggtcaatccgccgacaccatccatgccgctcggaatgatcatgccgtgccagtgcacggtggtgtattcgggcagtctgttggtgacgaagatgcggagcttgtcgccctcgacggcttcgatggtcgggccgggcgactggccgttgtagccccacagattcaccttcatgccttcggcgaattcccgcaccacgggttcggcgacgagatggaattccttccagtcgccgttcatccggtacggcagcgaccagccgttcagcgtgaccacgggccgatagtcgggcccgctgattggatgcagcggcggctgcatcacggccttgtccatggtgggtgcttccggaatcgaagcggcctgcacacggccgctgatggccgacgcgccggcaagcgcggcgctgcccaagaatcctcgccgggaaaacatgctggcctctctctcagtggccgccggcggcaggcgctgccgcggcgacggtggttggactgtcggcgccggccaccggggcgtagccgccattgacgacgctctgcaaatcggcctgggcgagaaagaatctctgccgggcatcgatcgcgccgcgcaacgacgccagacgctgccgcgcctcggtgagcagcgcgaagatgtcgacttgcatgctggagaaacgcagctgcatctcctcggtgatgatcttgcgcagggggatgatctcgcgctggtaatggctcgcgatgtcgtaggtggagcgatagacgcgataggcatcgcgcgcctcggagcgcacattcacggcacgctcggtcaggcggttgaaggcgaagttgtaggattcgacggcctgccgcacccgcacctcgccgccgtcgaagatcggaatctggaactgcacgtcgaagccgcgctcgcggaacggggctccttccggctcctgcgtgcggcgggtcatgccggcgagatcgaacagcgtcacaaaacgcgtcgcctcggtgaggttgagggccttggccagtgcgttcagctccagccgcgcgatctgcaagtcgatgcgatgggccaccgcatcggcctcgatcgtgggcagcgcttgtggcctgcgcggcagcggcggcagttgatcggggaggcggaagtccagaccggcgtcccacagccccatcaggcgggccagcctttcgcgggcgctcgctgcaacctggcgcgccgttgcgaggtcggcggtggtctcggcgtagaatacctgctcgcgggcctggtcgagcttgttgagagagccggtctcccccagcttgaccgcgagctgagcggtcgattccgccgtcgccttcgcgtccgtcagcagccctaccatttcgttgcccgcgacggcgcgggcataggcgcggcggacgtcggcggcgagccgcagcgtcgccagggcagcgcgcagctgggcttcacggaagcgctcgcgagcaatgtcggagcggaacggcagggtggcgagcgcgaggatgtcgccgacgacctgacgctcgatctcgctggcgccattgccggtgatgcgcgagaccgcgaacacgggattgggcggcaggctctgttcgaccagatcggtctcggccagcgccagctcgttataggcggcttgcagccccttgttgttgagtagcgcgatctgcacggctgtgtctgcggtcagcgtccgcgacaacagctggcgaacgcgtgcgtcgaccgcggcagcactctcggccgttcgcacgaaggcgacgtccttgttaatggtctggcccgtcagctcggcaactgccgtcatcccgctatcgggtgagaatgcgacgcagccggaaacgctgaacgcagtcaggaccagcaggccccgcgccaaatggtgtgccatggcgcgctcctaccgctctcgtttcggctgcggcgtcacattctcgttgcgctcgcgccacgacgccggcgtcgcaggccgcaggctcgtgtagggcgcgatggtcgagcgatagccgacgggcgcgacctttaccgccggatcagccggatcggcgctggcgacctggggcgttgccggcatgcagccggacagcaccagtgtggcgagggccagcaacggccaattgaatcgaaagtgtcgtccacgtgccgcggatgcggcggcggacctcgcccccgaagatgtaaacatgttcatccctgatctggagaccacaggttcgtgcgcgcaaaggcgcgctcggcccgaaatcgtcgcgtcagatcaggcgatggggggacggtagtgcaggggcggcgccgcgctgtgcaggctggccacgatctcgggcgcgcaggcagacatgggctgcactggcgtcgtgacgatgggcagatcggccggcagagcgctgacgcacatcatcgcgcagcatggacccactgttccgtcgccgccatggcgatgctgagcgggtgcatccttctcggccgtctgatgatgggcgtgcggttccgcgtggtcgtccgacgagccgtcatgattgtggccagcttgcatctggtggtgcaccggcacaggatcggcgaggcgtacgtcgtcaagacagggggcagcgccattgccccaggcaagacttgctgctggcgcgagcacgcagaacagataggcgagggcgatgatccgccccaccctgatccgcaacggtcgcgtcaatcgcagcaacattccgccgatatgctctccgcgcggcaggagtgcacacgcagattgcaaactagtagcaaatcgcaccgtcgccaagctccttgttaccgcagtgcaccgcgcatgcccaatatcgcgccacaatgcttgaccctgtgaggatccgcgggccatgttccgggccgtgcacgcgccaaatcatccaggacagacgcctcactcattcagccctgattctcgtcaggcctggatgcggctggttattgcgcttctgatcggctcgatcggcgccgtcggcatgtgggcggtcgtggtcgtgattccgatcgtgcaggccgaattcggcgccacgcgcggcgcggtgtcgctggcttttaccctcatgatgttcggcttcgggctcggcggcgtgatcgccgggaaaatcaccgaccgcttcggcatcgttccggcgatggcgatcagcatcgccttcctcggcgtcgccaacgtgctcgctggcctgtcgagccagctctggcagttcgtcgccgcctacttcctcatcggcctcggcaccgcggcgaccttcgcgccgctgatggcggaagcctcgcactggttcgagcgttaccgcggcctcgccgtgaccatcgttgccagcggcaattatgtcgcgggcacgatgtggccgccgctcgtgagctggggcacgcaggagatcggctggcgctatacccatatcggcatcggcatcgtctgcgtcagcctgatgacggtgctggtgctggtcctgcgcgcgcagatgggcagggacacggtccacgatcatgccaacgcaccgccgccgcgggtcgatctcaagctctccaccaacacgctgacggtgctgctgtcgatcgccgccatcgcgtgctgcgtcgcgatggcgatgccccaggtgcatatcgtcgcctattgcggcgatctcggctatggcgtggcgcgtggcgccgagatgctgtccttgatgatggcctgcggcatcatcagccggatcggctcgggctacctggccgataagatcgggggtatccgcaccctgctggtgggatcgctggcgcagggctttgcgctggtgttctatctgttcttcgacagcctcacctcgctgtatctgatttcggcgatgttcggccttttccagggtggcatcgtgccgagctacgcgatcatcgtgcgcgaggcgatgcccgcgagcgaggcggcgacgcgcgtcggcatcgtgatcttcgcctcggtgttcggcatgtccttcggtggctgggtgtccggcgtgatcttcgatgccaccggctcctacggcgcggcgttcgcgaacggcgtagcgtggaatgcgctgaacatcggcatcgtcgtgttgctgctgattcgctcgcggatgagcgcaatgaagaccggcccgggattcgccacttagtcctgttcaatgcgcgagcaggtcgagaaaaggcgtatcgaccgcgctgacatagaagatgacgaccttggtctctctctccgtccgattgtagccggtcatcggcacgccgggtggttcgaccagcgcctcgcccgccttgatcgtgaggggcggcttgccggccagttccagagtgaaggcgccttcctgcacatacacagtcactgggtaacggtgggtgtgatagacggtcttgtcgccgggcctgaatgatgcggtcatcacccgcaccgattgtttgtcatccctcggcagcccctcgacgacttgctgcagcgccacatgaggtttggcgatgccatgcgcctcgtggctttgagcgatggctgcggcaggagtgcccagcacgattgcggcgccgagggcgaggtgagggcgcatcttcaatctccattgcaaggtcgcggacgcgcagcctaggagcggtcgttcagccgcgggagccgcaacattgcgggtggcggccgcagaagtgcataatccccacatgttcgactggaacgacctcaaatatttcctggcggtcgcgcgccacggcagcaccattgccgccggcaaggcgctcggtctcagccagtcgaccgtgcatcgtcggctcgacgaactggagcggcgactgggccgcacactggtgacccgccagcagagcggctaccgcctgactgaattcggccaggcgatgttgccgtatgcggagcgcgtcgaggccgccattatcgacttcacgcggcgcaccagcgacgtcgagcaggacatgaaaggtgtgatccgcgtcacctgcccggagccgatcgttgcccggctgacccaatccggcctgctcgacgtctttcgcgcgcagcatccctcgctgcgggtcgagttcgtgatgagcgaccgctatctcgacctctccaagggcgaggtcgatgtcgcgtttcgctccggtgacaccgacgaccaactcgtggggcgaaagatcgccgagtcgatctgggcggtctacgccagccgcgactatgtcgaacgacacggcaagcctgagcgcatcgaggacctcgagcggcatctgctggtcggcctggacgattcgctggccaatcaccgcgccgtcaaatggctgaaagaggtcgcgccggatggcaggatgtcggctcgcatcaacagcgtgcttggcctcgtctctgcgatcaagtcgggagtgggcatcggaccgcttccgatcgcacttggcgacgctgagcccggcctcgtccgcgtgctcggcccgatcgcggaattgacgcggagctggcgtatcctgacgcatcccgatctcaggcgcgtgccgcggatcgctgcgttcttcgacttcatcgtgctccagcgcgaggcgttgaagcccatcctgacgggatgaccttcaccgcttccgcttcgcggccgctctcgccggcttggcgacgcgcgtcttgcttttggcaccgggccgcacccgcaagccatcgacgaacacgtcgagcatccgcagcaccgaggactgccatccgggctggtcgtgcatgtagcacatgccgacgagtgccctgagcaggtcctccgggccgagatcgccacgtatctggccggccgcaaccgcgcggtcgagcaacgagccgatcgccttcgtcagccggtccatcgagaatgccgcgagctccgacgagctctggaaggtcagcgccagcgcggccgacatgcccttcttggtggcaacgaactcgacgttggagcgcagccagcgacgcaacgcgtccaccgggtccttggcattcttcaactcctcggcaagctcgctgagctgctcgacttcgcgccggtacaccgcctcgaacagatcctcgcgggccggaaaatgccggtacagcgtgccgatgccgacgccggcgcgtttggccaccgcctccaggctcgcctcgggaccgccggcgctgaacaccgcctttgccgcctcgagcacgcgctcgcgattgcgcatggcgtcggcgcgcggtttgcgggttcggttggtgtggtcgtccatgccggcaatgtagatcacgaattggttagatagaaccctcgccggacccgggcagtgctgcatcgcgttggtacgctggggcttttgacgaattccagattctttccggtgcctcttgttaaacggagggtgcctccgtattttccaccgcgtaccggcccgcatcatgcgggtcgacgcggatcgacggtggccacggcggtggcgcgctgcacgatcacccatgtccaaatctgatcggagccatttatgaaccactccatcagcctcaccgtgaacggtgcgcggcgcgatttcgtcctggacgatccgcgcgtcacgctgctcgatctcctgcgtgagcgcctccatctcaccggcaccaagaagggatgtgaccgcgggcagtgcggcgcctgcaccatccttgtcgacggcaagcgtatcaattcctgtctcgcgctcgccatcagccatgacggcgccgatatcctcacgatcgaaggcgttgcgcgcggggaccagcttcatcccgtgcaggccgccttcatcgctcatgacggcttccagtgtgggttctgcacccccggccagatcatgagcgcgatcggcatgatgcaggaggcgcaggccggcaacgatcccgagcgcatccgcgaatgcatgagcggcaatctctgccgctgcggcgcgtatgccggcatcgtggatgccgtgctcgacgcgcaaggacagatggacgaatccagccagaggcgctccgcatgaagccgttcgattatgtcaggcctgcctcggtcgcagcggcggttgccgctgccgctcagcccggcgctgtctttcttgccgccggcaccaatctgctcgatttgatgaaggggggcgtcagccgtccggaccgcctcgtcgacgtcacgcatctcgatgggctcgatcagatcgagactctcggcgacggttcgttgcgcatcggagcgctggtgagcaatgccgatctcgcgcacgatgctgagttcgcgagatcttatccggccgtggccgaggccctgctgtccggcgcgtcggcccagttgcgcaatgccgcgaccgtcggcggcaatctcctgcagcggacgcgctgtgcgtatttctatgacaccgccagccgttgcaacaagcgcgagcccggcagcggctgcgacgcccgcgacggcgagaaccgcggccatgccgtgctcggctggaccgagagctgcatcgccacgcatccgtcggacttctgcgtgccgctggtcgcgctcgatgccatggtcgagatcgagggcaggggcggccggcgcgaggtcgcgctcgaccaattgcatcgcctgcccggcgatacccccgagcgtgattccgtactcgaacccggagacctcatcgtcgccgtgcgtctgccgcccgccgcgcgcggctttgccgcgcatgcgcgctatctcaaggtccgcgagcgtacgtcttacgccttcgccgtggtatcggccgcggctgccctgcggatcgagagcggcatgattgtcgaagcgcgacttgcgcttggtggtgtcgccgcaaagccctggcgtgcccgcgccgccgaggacgtgctcaagaacgtctcgcccactgccgacgctttccaggaagctgcctggcgtgcgctcacggacgcaaagccgtcaggcgacaacgccttcaagatcgagctcgcgcgccgcatcgtcgtgcgcgcgctgaccctcgccgccgccggcacgcccgcgcgcatccccgcgctgccggcctctccctttgccgcgacatccggagccgaccatgcctgagctcaacctcaccagtacccccgcccatctgcggcacggctcgaacatcggccagccgctgacccgccgggacggcatcctcaaggtcacgggacgggcaacttacgccgccgacaatcatccgcccggcatgctgtttgctgtgatggccgtgtccagcatctcgcgcggccgcgtggtctcgctcgatgttgccgcggccaagcgccatcctggcgtcgtcgatgtcatgacgcatgatcacaagcctcggcttgcgatcgatccggaggtcaagaccaatccgttcgtgttccggatggaggtgctgcaaagcaatgaggtccgctacgccaaccagccgatcgcggtcgtgatcgccgagacgctggaagcggcaacggaaggcgcggtgctgctggcgccgcgttacgaggtgcagtctgcgcgcgtcgggctggatgccggcgaaagcttcgtgccgcccgtcgtcggtgtcggcaaccccgcggagcatcgccacggcgatatcgaggccggcctcgcctcggccgagaagcagatcgatgccatctacgagacgcccccgcaatatcacaacgccatggagccgcatgcgatcgttgcgtcgtgggacggagacaatctttccgtcgacatgccgacccagggcctgatgctgtcgctcgcgcgcatcgccgaattgttcggcattgcgcatgacaagattcacatccgcagcccgttccttggcggcggatttggctccaagggcctgatggccggcccgcaagtcctcggagtcatggccgcgaagctggtcggcaagccggtcaagctggtgctgcgccgtgagcagatgtacggtccggtcggccatcgcgcgccgacccgccagcggctgcgcatcggtgcggatggcgaggggcgcctcaccgcgctcgatcatcatgcgcggaccgtatcgagcacgttcgacgatttctacgagcccgccgccgatgcctcgcacacgctctacgcggcgcctgcgatccgcacctcgcatgacgccgtgcgcgtcaactccggcacgccgctgttcatgcgtgctccaggcgaagcgaccggatcgatcgcgctcgaaagcgcgatcgacgagatggcctgggcctgtggcatggatccgctcgccttccgcctgaagaactatgccgaggtcgagccgatcaccggcaagccgttctcttcaaaagcgctgcgcgcctgctacgagcagggcgccgcgcgcttcggctggaccaaacgtccgctccggccgcggcagatgcgcgacgatgccggcctcctggtcggctggggcatgggcactgcgaccttcccggcgctgatgttccaggccgaagcgcgcgcggtgctccgccgcgacggctcgggcgccatggagatcggcgcgcatgacatggggcagggcgcctggacggcgctcgcccagatcgccgccgacgaactcgggctcgatatcgatcgcgtcgagttcaaggcgggttcgtccgatctgcccgacgccggcatcgcgggcggctcggcgcacacggcaacggcgggtgctgcgatccgcagcgccggtgcggccgtgatcgcaaagctcgccgatctcgcaaccagcgacgagcgctcgcccctgttcggcgccggcaatgccggcgtgatcgcgcgcgacggcaggctgcttcgccgtgacgacgaaagccgaggtgagagctattccgatatcctcgcgcgagcaggcgtcgcggaggtcgaggcccgtggcaccggggcgccgaaccccgcggcgatggaggaatatgcgatgcatgcccacggcgcggtgtttgcggaggtgaaggtcgatcccgtgctcggccaggtccgcgtcacccgcatggccggcgctttcgcggccgggcggatcgtcaatccgcgcatggtgcagagccagctgttcgggggcatgatctggggcctctcgtttgcgctgcacgaggaggccatcaccgaccggcgcaccggccggatcatgaatgccaatctcggcgagtaccacatcccggtgaatgccgacgtgccgccgctcgacgtcatcacggtcgaggaacacgatccgcacgtgaacgcgctcggcatcaagggcgtcggagaaatcggcatcaccggaagtgccggggcggttgccaacgccgtctggcacgccaccggcgtgcgcgtccgtcggtttccgatccggatcgaggaattgctgacgcggcgctgagacggggaggcgacctccccgccgaacgtcagttcaacttcctgcggagagccttgagcgcttctcgctgcagctcgatgtattcggcgatggccttgcgcagctcctgcgagtggaattcgtcgctgccgcgcggaacctcttcgcgtgcggcttcggcatttgcgagtgtggtcttcatggcgtgccccgttaccaagcggccccggagtgcctgggagttcgggaccatgacctcgacacctttgcgcgaggctgctcggctacgacttggataataggaggaacgccgtcggcaggaattgagctggctcaaccgcggccgaattgccgacgtcgttctcccgcgttcatgctgattgaacggctttgacgctggagtcgccgcgcagggtcatcaagcaggggtcatcaaaacgtcggcggcgtgcaggccgagatcacctcgcagggcttgccgcccacgcatcggaagcggtgcgggcggcggctctcgaaataataggcatcgccggggttcaggatgcggcgctcgtcctcgacggtgacctcgagcttcccggagatcacgatgccgccctcctcgccgtcatggacgaggtgaacgcgtccggtgtcgctgccgggctcgtaccgctccttcaggatctggaggctgcggccgaacagattgtcgccgacctggcgataggagatcggcttcttgccgacttcggtcagctcctcggcccggtagaagatcttgcgcctggactccggctccagcgcgaagaactcggcgagccccatcgggatgccgtcgaggatgcgcttgagcgcgccgaccgaggggttcatctggttggattcgatcagcgagatggtcgaattggtgacgccggcgcgcttggcgagctcgcgctgcgacagcttgtggcgcgcccggaggaatcgcagccgtccaccgatgtcgacgctcatgcccttggtcctgtgttgcaggtgttgcggatcgcgcaaatatggaccggcagccccagccagatcaatggcttgcaggttaccagaaaaggacttgttgcggtattacagtcgtggctctgctagcacaccagcaaaggagcgcggccgtgacccttcatcagattccgaacaccatcaagaccgattcgtactggatgccgttcacggccaaccggcaattcaagaaatcgccgcgcctgttctcctcggccgagggcatgtactacaccagcgtcgacggccgtcaggtgatcgacggctccgccgggctctggtgtgtcaatgccggccatggccgcaagcagatcgccgccgccgtcgagcggcagctgatgacgctggacttcgcgccgtcgttccagatgggccatccgctagcgttcgatttcgccgagcgtctcgccgagatcgcgccgaagggcctcgaccgcgttttcttcaccaactccggctccgagtcggtcgataccgcgctgaagatcgcgctcgcctatcatcgcgccaacggccaggccagccgcacgcgcctgatcggccgcgagcgcggctatcacggcgtcggcttcggcggcacgtcggtcggcggcatggtcgccaaccgacgtgccttcacgaccctgctgccgggcgtcgatcatatccgtcacacccatgatctcacccgcaacgccttcgccaaggacctgcccgagcacggcgccgagctcgcggacgatctcgagcgtttggtcgccctgcacggcgccgagaccatcgccgccgtcatcgtcgagccggtgccgggttcgaccgcggtgctgccgccgccgaaaggctatctgaagcgcctgcgcgagatctgcgacaagcacggcatcctcttgatcttcgacgaggtcatcaccggcttcggccgtctcggcacgccgttcgccgccaacttcttcggcttcacgccggacctgatgacgacggccaagggcatcaccaatggcaccgtgccctgcggtgcggtattcgcgagccgcaaggtgtacgacggcatgatgaccggcccggagaaccagatcgagctgttccacggctacacctattcggcgcatccggtggcgtgtgccgcgggcatcgcgaccctcgacatctacaaggacgaaggcctgctcacccgcggtgcttcgctcgcggaatattggcgcgatgcgctgcattcgctgaagggtctgccgaacgtcgtcgacatccgaaattgcggcctgatgggcgcggtcgagctggcgccacgcgacggcgtggtcggcgcacgcggctacgacatgctcgtcgaatgcttcaacagcggcctctatcttcgcaccggtggcgactccgttgcgatgtcgccgccgctcatcgtcgagaagagccacatcgacaagatggtctcgatcctcggcgacgccatcaagaaggtggcctgataattgctcttgcagcggcaagcgtgatgccgcgggagtttgacgaagcgtgaaaattctgatcctcggcagcggtgtcatcggtgtcacctctgcctactaccttgcgcgtgccggccacgaggtgacggtcgtcgaccgtcagcccgagccggcactggagacctctttcgccaatgccggcgaggtgtcgcccggctattcctcgccctgggccgggcccggcgtgccggtgaaggcggtcaagtggctgttgatgaagcacggtccgctggtgatccggccgaagctcgatcctgtcatgtgggtctggctgctcaagatgctgcgcaactgcaccagcgcgcgctacgcggtcaacaagagccggatgattccgatcgcggaatacagccgcgatgccttgcgcgacctgcgccgcgacatcggcatccagtatgacgagcgctcgcagggcacgctgcagctgttccgctaccaggcccagctcgacggcacggccgaggatatcgccgtgctcaagcaatatggcgttcccttcgaggtgctgagccgcgagggctgcatcgcggtcgagccggcgctcgctggcgtaaaggaaaagttcgtcggcgggcttcgcctgccgcaggacgagaccggcgactgccacatgttcacgcagtcgctcgcaaggcatgcgcaggcgctcggcgtgcgctttctgttcaacaccggcatcgatcgcatcgtcaccgagggtgcgcgtgtcagcggcgtcgcgaccagtgccggcctgttgcaggcggacgcttacgtgctcgcgctcggcagctggtcgtcacggctggtcgcgccgctcggcatctcgctgccggtctatccggtgaagggctattcgatcacggtgccgatcaaggacgcctccggcgcgccggaatcgaccgtgatggacgagagctacaaggtcgcgatcacgcgccttggcgatcgcatccgtgtcggcggcaccgcggaaatctccggctactcggacaagctctacgatgcccgccgcgccacgctcgatcattcgctgaccgacctgttcccgcgcggcggcgatctcgccaaggcgacgttctggagcggcctgcgtccgatgacgccggacggcccgcccgtgatcggccggacgcactacgccaatctgcacctcaacaccggccacggcacgctcggctggaccatgtcctgcggctcgggccgcgtgctcgccgacatgctgtccggcaggaagccggacatcgacgtgagtgcgctgtcggtcgagcggtacaagcaccggttcgggtaaggctctgtccccgcgtcattgcgaggagcgaagcaacgaagcaatccagaatgcctccgcggcaagactctggattgcatcgctgcgctcgcaatggcggcgtagacacggcgcggatttcttccacccgccgcgggcgttgaaggcagctaccccgccgccgtcacgcaattcacccacagcaccaccgccttcgcatcttcagccgggttcgaaaaccggtgcggccttcggctggcaaagcgaaaactgtcgccggtcttcagcgaccaggtctcgctgtccaccgtcagcatcatctcgccttcgagcacgaggccggcttcctcgccatcatgcgtgtagagctcatcgccggtggagccgccaggttcaagatgcaccaggaacaggttgagcttgttgtccgcaccggccgggctcagcaactgctttgatacgccggtgcgccagagtttcagctcgggccgctgcagtccgcgcgtcaccacctgatcggaggccgcgtcagcgctcgggctggcgccgaacagcgcggcgatgccgacgccgagcacgtcggcgagggtcgccagcacgcgcagcgacggcgacgacagcccgcgctcgatctggctgagaaacccgatcgacaggtccgtgcgtgcggcgaccgtctccagcgaaaatcgcctgacccgcctgagatcccggatgcggcggccgaccgtaacgtccatcgccggctcggccggcctggcgatggccttggctttcaccttcctagccggctttgcggcggccagtttgcgcattcttttgccaccgctcacgtcaaagcgcttccttcatgtgcatgaaaaccgcttgcatcatccccgaaagtgtgaccaaaatttcatattggtgaaaataggccgaaacggctcggcccgcaacgtctgatcacgagatgcgcgggcggcgccggccagacccaaagggggatgcgatgaagcgttatgtccaggccgcggtcgcggcactcgcgattgccgcaacggtgccggcgtcggcgcaacaggtgctcaaggtcggctcgacgccgacgggcattcccttcaccttcctcgacaccaagaccaacaccatccagggcatcatggtcgatctcatcaccgaagtcggcaaggatgccggcttcaacgtgcagatcgagccgatgcagttttccgcgctgatcccgtcgctgacctcgagcaagatcgacatcatcgcggccgcgatgttcatcacgccgccgcgcaaggaggtcgtcgacttctcggatccgatctacacctacggcgagggcctcgtggttcccaagagcgatactaaggcctacgccacgcaggaggatttgaagggcgagacggtcggcgcgcaggtcggcaccgccttcgtcgacgcgctcaagaagaccggcctgttcgccgacgtgaaggcctacgacaccattcccgacatcctgcgcgacgtgaacaccggccgcctcaaggccggctacgccgactatccgatcctcgcctacaatctgaagcagggcggcttcccggaggtacgcctcgtggacggctacaagcccgtcacggtcggatcggtcggcatcggcgtgcgcaagggtgaggccgcgctgctcggcaagatcaacgcttcgctcaccaagctgaaggccaatggcaccattgacaagatcctgggtaaatggggcctgaaggcccagggctagcggattgctgaaggctgcccgatgaaaggcttttggcgcgacgccgtcgagttcttcccgattctgctgaacggcgtcgcgctgacgattatcgtcacgattggctcgctgctgctttcgacagtgctcggcctcgtctgggcaatgatgcgggtttccggtatcaaggcgctgtcgatgctcagcgccagcctgatcaacgtgatccgcggcatccccattatcgtgctgctgttctatctctacttcgtgatgcccgacctcggtgtcacgctctcggccctgcaggccgcgatcctcggcctcggcatcgcctattcggcttatcaggccgagaatttccgtgccggtatcgaggccatcgacaagggccagatcgaggcggcgcaatccatcggcatgggctggtggctcaccatgcgccgcgtggtgctgccgcaggccgtacgcatcgtgctgccgccttacggcaacgtcatgatcatgatgctgaaggattcctcgcaggcctcgaccatcacggtcgccgagctcgcgctgcagggcaagctgatcgcatcctcgaccttcaagaacaccagcgtgttcacgcttgttgcgctgatgtatctcaccatgagcattcccctgattttgctggttcgtcatttcgagaagcgggccggcaagcgatgatcgagctgaacgacgtccacaagagcttcggcagggtcgaggtgctcaagggcattacggcttccgtcgagaagggcgaggtggtctgcatcatcggcccctcgggctcgggcaagtccacaatcctgcgctgcatcaatgggctcgagagctacgaccgcggtgagatcagcgtcgagggactgaaggtcgaccgggatgcaccgtcgatcgtgaacatccgcacccaggtctccatggtgttccagcgcttcaacctgttcccgcatcgcacggcgctggagaacgtggttgaagggcctctctatgtgaagaaagagtcgcgcgcgcaagcgtttgatcgcggccgtgcgctgctcgcccaggtcggtcttgcggaaaaggccgatgcgcatccgccgcaactctccggcggccagcagcagcgcgtcgcgatcgcgcgggcgctcgccatgcagcccaaggcgatcctgttcgacgagccgacctcagcgctcgaccctgagctggtcggcgacgtgctcggcgtcatgcgcaagctcgccgacgacggcatgaccatggtcgtcgtcactcacgagatgggctttgcccgcgacgtcgccgaccgcgtgctgttcatcgatggcggcgtcatcgtcgagcaggggccggccagggcgctgctcaatcagccgcagcatccccgcacgcaggactttctacgccgtgtgctacatccgctctgaccgggtttctccatgacgcgcctgcctctgccgccctcgctctatgccgatacagccgtcgctccggttgccacgccgccgctcgatgtcgacaagaatgtctccgtcgcgatcgtcggcggcggctatagcggcctctccaccgcgttgcatctggccgagcagggcgtcgacgcgctggtgctggaggcgcaggagcccggctggggcgcgtcgggcaacaatggcggccataccaatcccggattgaagcacgatcctgatcagatcgaagccgacttcggcgccgacctcggccgccggatgatcgacttctcctacggcaccaccaacttcacgcacgatctgatccgccgctatcagatcccgtgcgaggcacgccagaacggcacgctgcgcgcggcctacaatgaagccagcgccgccgcgatcgaaaagaccgcgcagcagtgcatccgccgcggcatgccggtgagttacctgaaccgcgatcagctccgcgacatgacgggcaccgaccgctatatcggcgccatgctcgatacccgcggcggcgatctgcatcccctcagctacgcccgcggccttgcgcgcgcggcgatctccgccggcgcgaaggtgcatggcgaaacgccggcattgtcactgcgccgcgacggcacgcgctggcgcatcgagacgccgcgcgcagtggtgcacgccgacaaggtgctgctcgccaccaacggcttcaccgacgatctctggcccgcgctccgccgcaccatcgtgccggtgttctcttcgattgccgccaccgcgccgctctccgacgcagtcgcccgttcgatcatgccgacgcggccggttctctatgagagcggccacatcactgtctattaccgcatcgatcagcagaaccgtctgctgatgggcgggcgcggcccgatgcgctggatcaagtcgccctacgacgtcgcgtacctcatccgctatgccgagcggctatggccgcagctcaagggctttgcctggacgcacggctggaatagccggcttgccatcaccgcagatcattatccgcatgtgcatgagcccgcggaaagcatcctgatctcgctgggctgcaacggccgcggcgtcgcgctttcgaccgcgatgggcgcgcaactcgcccgccgcctgatcggaggcgccaaggccgagatcgacatgccgatcacaggcatcaagccgatcccgatgcatgcgttctggccggtcggggtgacgaccgccgtgatcgcgggtcgggtgcgagacaggctgggcatatgaagaaggtgtcgccctcaggggcaacgccttcagaaaattgcagacagagcgtcagcagcggccctgcttccacagaccgggcgggcaacccacgccgcgccagccgaccttgcgcccatggtgccatccgaacgacttgccatggtgatgatggcccatcttgtgaccatgtccatgaccatgaccgccgccatggccgcccttggccagcgcagggcttgtcaatgtgaatccggccgcaatgatgagcgacgcggcgagcgcaagtttcttcatgatgtcctccactggggcgagcgcacttgtccgtgcagcgaacggagagccctcaggtaagttcccggcaaatgtggaggtgtcgtgacgctcgcgcagatgcgtaatggcgcgtttgctcaacgcacactcgcattgtccggcacgtgtattcagccttcctccaccgcttcggcccagggctggaagatctcgactgcgccggaattgacgtcgccgtcgcgcataaccacgcttgggcaggcgaatttctgcggcaagatctgcacccggctctcttcatagtcgaagcgagtggccagagcgtcgcgtacttctgctggcaggcgggcatcgccgatcacgaccgcgccctcgctggcgtcgatgcgcggctgatggatggcggcatcgaggtccatgccgaaatccatcgcaaaggacacgagttgcatcaccgacggcaggatgcggcggccgccggaggcgccgacggcaaggcgcttgctatccttcgtctcggcgatgacaggcgtgtagttgcagagacagcgcttgcccggcgcgagcgaattggtggtgcccggcgtcgggtcgaaccacatgatgccgttgttcatggcgatgccggtgtgcggcgtcacatatcgcgagccgaacgacgagagcagtgtctgcgtcaccgcagcgaggttgccctggcggtcgaccacggagaaatgcgtggtgcaggcgggcgccagatattcggcgccgagcgagcgcttgccgtcggcatcgcccatgtccttgagccgctcgccgaaggccgtttgcagggcgagtgcatattcgacataggcggccgcgtccggtgcgcttcccggctgcagattctgctgcaagaggcgcagtgcgtgcgccatggtggggccagccgtgagctccggcgtcgcatacaccttgccgccgcgatacgggatcgccagcggctcgcgcaaatgcgcgcggaaggcggcgaggtcctccaccgacagtgaaccgccatcagccttgatgtcggaggcgatgctcctggcgaggtcaccctggtagaagtcgcgcggtccggcctcggcaagatgagacagcgttgctttcagcgtgtcctgcggcaagcgcgtctcggccttgatcccccatggtgcagtcggtggcagcccgtccttcaggaacgccgcggcgctcgcgggatagcgcctgagatcggcggccgagcccgagatcgtcaccgtcgtccaccaatcgaccagcagaccttcgccggcgagccgagctgccggcgcgaccagatccttccacggcattttggcgtagcggcgatgcgcctcttccataccggcgacaacgccgggcaccgcgatcgaaccgggcccgtggatgttgcgatcgtccttcacccgcggccacgggaagagatcggaggccgcgccttcgccactgagcggatagtcggcagcgcgcaggctctgcggcgcggacatgccgtagtcgatcacctcatagcgattttccttggcgcggtagagcaccattgcaccgccaccgccgatgccgctgttccagggctccagcacattcagcgccatcgtggtcgccacgatcgcgtccacgcagtcgccgcccgctgccagcacctctgcccccacttcggccgctcgccgcgattgtgaggcgacgatgccgcctttcgatgagacggcgggcttgcggatggtttggttgaggctgaactgatgaggcatgatgtcgtcttgatgtctgtcgcggcttcgctgtgttgaaatcgaggctccgcgattggcggagcgggcggacaatggcacattgcagccaatgagaacatcaaaagggagaagcgacatggctggtgtgatgcaggcgcgggatggcgcggttggaatcttgaccctcgacgagccggcaagcctgaacgcgatgaccccggacctgctcggcgcgctcgccgtcgccgtcgccgacatgacgaaagatccggacgttcgcgccctcatcctgaccggagagggacgcggcttctgctcgggccagaacctgaaggcatcggaggcgctcggggaggacatcgcggccggcgtgatgcgcttctactggccggcgttcaaggccttgcgcgagtgccgcgtccccgtggttgttgccgtgaacggcgtcgcggccggcggtggcttcagtctggcgatggccggtgacatcatcgtcgcggcgcggtcggcgagcttcatccaggtgttcagccgcatcgccttggtgcccgatctcggctcgacctggctgctgccgcggctggtcggccggcagcgcgcgctcgagctgatgctgttgaacgagcccctgacggcagagcgcgcccaggagatcggcctggtgcggcaggtcgttgacgacgcgaagctgatggaggaggcgcttggtttggcgcgccgcctggccgagggtccgacacgcgccttggttgcgacgcgcgcgctgatcgaggacagcgagcatgcgacctacgaggcgcagtttcgccgcgagatcgagcttcaggccacgatccgcaagagcgcggatgccatcgaaggccgcaatgccttcatcgagaagcgcaaggcaaggtttacgggcaagtgaggtggagcacttgctcccagtctcgtttcgcccgggcttgacccgggcatccacgtctatccgcacctaaaaacgtggatggccgggacaagcccggcnnnnnnnnnntgaagattggtgaggcttccaatagcgcgcgctcagagcgagcggttcagccggctggcctgatacttggcgcgccatttcgggccaggtccgcgcatgtagtgcagctcggggcggtagggattgcctgcaacgcggatcagcgtctgccatttggtggcgacgaagctcaggggctggcgcagcaggctgactgaagcgatcaacatggcatcacctcaatgcggcttgccgagcatggcggtgaacggaagatcgaagatctcctcgccgtcgtggtcgctgacgtgaatcacccagtcgcgccagtcttcggcacccggcgtctggatcatcgaggtcatgatctgggcggcacggtcccgtgcttcggtcagattggcgacagcggcgccgttatggtcgatcagcgtgccctcggtgttggagcagtgaaaatagacctggaccatatgcgcctcctgtagggagctaccgggatggcaaagcgataccacccgaggcctttgcgaaacattcgggtcaaacccggtaagggaatttacggatattggtcggcaccaaggtcgcgacgggtttcatcacaggcgggtgatgatgaactggacggcgcccaggcggcatggaacaaatctcgccggaattcgggggctgccgtgaaccacctcacgttctggcgtgattgccgacgtctgtacctgtttgcagctgttgtgattggcgcgttgttcggccctgatacggcagcctcctccgagccggtgaggaaaagcggctacgccgtcggctcggagacctgcggcagcggggatctcgctttcccgcgactgcagatcgacatgaaggccggatactgcgccggcctcgtcgccagcgacgaggatcgcctgaagtttccgcgctcgatcgtccaggtgcccggccgtgacctgttcgttgtggccgacatgggcggctggggccgcagcgacggacggctgctgctgctcgatccgcatgcgccccaggggcaacgcttcaaggagctgctgaccgaattggaatatccgttcggtctcgtcatcggtccggacaggaagctgtatgcctcgaccgccgagacgatcttccgattcgatccgctcgccgacagcccgcgcagcacggtcgagaccatcatccgtcacatgcccggccgccgcatcacgctgcccgatggcaccaggatcgacgagagcgcccacccgctcaagcagtttgtgttcgacaagcacgggcggctgttcgtcaatgtcggctcgcacagcgacgattgcatgacgcgtgcgcgggccgcaaagccctgcgccgcggccgaaggcgcctcggcgctggccgcaatctggctgttcactccgcccgcaggcggtgtctttccggcgctgaggcccgacgatcccgacccgcagcacatggtctacgcgcgcgggctgcgcaattcgatggcgctggcgttgcatccgaacttccctgatgcgggctatgccttcctgcaaggcgagaacggccaagatctgcccgacatcttcaaaccgaacgaggagatcaacgcgatcgagcaggggaggcactatggctggccctactgctacgatctgtcgactccgagtccggagttcaggcgcgtgttgcaatcggggccgtacaaatcgctctgcacggcgaatgcgctctacaaggcgccgcactcgctgatgccgccgcacggcgcgccgctcgcgatgctgtattatcgtggcacgaagttcccggagttggaaggcaagttgctggtcggtctgcacggctatcgtccgaccggcagccgcatcctcatctatgaagtcgacgatcgcggcttccccaagccgaagccagcaccggtgcgctatcacgtgagctgcgcggcggatccgacccgcagcttccagaccgacggcggcgaagtcgcggccgcgccgttcgaggagctgatttccggttggcaccgcgtcaacggtgcgcggccgcaaggtgcgcccgtgggcatgaccgttgcggaggacggtgcgatctggctggtcgaggacaagaaccggaccgtgatccgcatcgatcgcgccgcgggcgacgtgccggtgccgctgccctgcgagatccgcagccaggcgatgatcgatcagctcgcggccttcgtggcgagagatgcgcagaatggcgtccggctgacgacgctgcgcaagggcctggtcgagaggcattgcgtgggctgccactcgggtttcggcctcaagccgggtcaatcggaggcagacaaggacgtagccgtgctccgtttcatgctgtcgcaagacggttggatctacccgggcgatcccgatgccggcaagctgcgcacgcggctgcgcgggcgcggggccgagaagctgatgccgccgggcggcgaaagcttgccgaagaccgagccgggctacacacagctgctggacactgcggacctgcttgttgcgaagatggtcccgggcacgcgcatgcggatcaagcccgggccgccgcagcgcaagttcttcggccggaccaaccgggaatgcggcgaaataccggccgccaaggtcgtggtcgtgacacaaaggagcgctgtagacaaacccggcttcagccgattcttccggccggccgatccctatctgaacggcgagtgcaccgacgacgatggctattacatccggcaggactttctggtgcctgtgcagtagcattttgctcgccgcgaccctgccggccgctgccgagaccaagctgttcgagagcgtacaggtgacgcaagcgggcgaatatacgttcggcatcgaagggcctgctgccgacctcgacggcaatctcttcgtggtcaatttcggcaagcccggcaccatcgggcgattgccgcccggcggcacggcatcgcagctgttcacggtgcttcccgaaggcagcgtcggcaacgccatccgcttcgaccggaacggcaacatgttcatcgccgactacaagaagcacaacgtcttcacgatcccgaagggcgcgaccgagcctgtcgcctggtttcactccgaccagatgaaccagcccaacgacatcaccatcgcgcgggacgggacgatctatgcgagcgatccgaactggaagggcagggagggccacatctggcgcatcgcgaaggccgccgacggtaccgtgcaggggcaggtgatgtcggcgccgcgcgcgatgggcaccaccaacgggatcgatctcagcccggacggcaagacgctctatgtcggcgaatccagcagcggccagatctggtcctatggaatccggggcaacgagctcgtcgacgccaagctcgtcaaatcgttccagccggacaccatcgacggcctgcgcaccgacgccaccggacgcctctatgtggcgcgcattctcaagggcgtgatcgcgctgatgaagccgaacggcatggtcgagcgcgagatcgcgctcaaggccaaggagccgaccaacctggccttcggggggagcgacggcaagaccgtcttcgtcacccagcgccaaggcggcttcatcgagtctttccgcaccgaccagcccggccgcgagcactgtctccagcgtgggcgttgctagggtacgatctgcatccggcgcagagccgcgcgacgggtgcggcattcttcttgcttgcatctcgcggccgcggagatcaagactttcgtggcaggtcagaacctgcgaccacggagtgtttgagtgaaagccgtctataccgaactgcatcgcagccacgatccgcaattcttcctggttcgcggcgtggtcaagcgcaccaccgagcagcccgagcgcgccgatcgcctgctcaagggattgaaggacggcaagcatcaactgatcgagccgacgacgttcgggcagggcccgcgcgcgcgcatccacagtccggaatatctgtcgttcctgagcgaggcctgggaggcctggactgcgctcggcgattccggcccggagatgatcggcaacatccatcccgtgcgtcatgccgcgacctatcccacccacatcgtcggcaagctcggttggcatacggccgacaccgcagcgccgatcggtccgggcacctgggcggccgcctgcgccgcggccgacgttgcagtcaccgccgcgcagatggtgatggacggcgaggatgcgacctacgcgctctgccgtccgccgggccatcacgcctatcgcgacatggccggcggcttctgcttcctcaacaacagcgcgatcgcggcggcgcatctgcgccagaagcacgagcgcgtcgtcattctggacgtcgatgttcatcacggcaacggcacgcaaggcattttttacgcccggcccgacgtttatacgatctcgatccatgccgaccccgtcgcgtactatccctacgtgtggggctatgcgcatgagcgcggggaaggacccggcctcggcaccaatctcaacattcccctggccatcggtaccggcgatgacggctacatgcaggcgctggacctcgcgcgcaaggcgatcgagtcgtttgcgccgggcgcactcgtcgtcgcgctcggtctcgacgcctccgagcacgacccgctgaagggactggccgtcaccacgcccggcttccgccgcatcggccaggccatcgcgaagatgggcctgccgaccgtgctcgtgcaggagggcggttatctctctgatatccttggcgccaacctgacctcggtgctgtcgggattcgaagaggcaaggtgagctctcggtcgtttctcccagccaaagcgacgagagagcagcgcccgcaagtatctagaacatcccgctcgcggcgagcgccctgcagacgtgctgcatctcggtctcgtcggcgaccatgtcgagcatgatcgttgtcaggccccccgccgcaaaagtcttcagcttggcgccgatctcctcgtagctgccgaccagatacgggcagtccgcctggaagttcaggaacggcagcagccaatagccattgtcggcaagctcgccgctctgtccctcatagagccgccgcttccacacggagtcgctgttctccacggtgagcgcgagcagctcgcgatcgtcgggattgtcgcggaagcgtgcttttgcagcctgccgagcctcgtcgcgtctctcgcgtgcaagaattccaaagttcaggcccgatacgtccagcccgtgatcgagatcgggcggcagcatctgcatcttgatgcagccggtctccttcgcgacgcgctgggccgcctcggattggccggcgatcaagaattccggcatcagctccgcaggcaggcgcgggcgaagttgcagattgctggcgcggtagaaccgtccgtcgaaattcagcggccgcgggctttccagcaactgacgcatcagcacgacgaattcaccgagtcgaacgtaacgatcggcatgcgactggtcgtcgcccagtccgtgcaaatcgctgatcgccgtccccgtgatcatgttgaggtagaccttacggccgtgcagctgagcgaaggacgagacgaatttggccgccgtgaagggatgcatgtagacgggattgacggcgatcagcggcgaagatcgcgtcgtctctgccaggatgtgctgggccatcgcccatggctcgacgaacacatcgttgccttcgaacagcaggatgccttcgaacccgttgcggtcggcgaactgcgcgacccgcatcagctcgccgacataggtgttgggattgcggttgcgtgaaatcgcgggaaagatacgcagccgccgcggcgtcattcagccgcttcccggagcggccaggcattgcggctgatcggaaggccgccgttcgcacgggagccgtcggcgatcgcgaggcgatgcgacggcgatggcgaacacagcgagaagtgccagccgtccggatcgtcggcgatgtcgggcttgaagctgatctcgatggcctcgcgcgagacctgcatcgcgaagccatcgagcggcaggttgagtccgaaaccccgcgccttgagataggcctccttgagcgtccaaaagtcgaagaagcgctcgatggcggcgggctccggcagtccgcgcagcgcttcgacctcttccggcgcaaagaagcgcagcgcggtggacagcggcgcgacgcgccgcgacacggtttccacgtcgacgccgatggcctcatgccgcgacaccacgcaggcgacgcagccgtcggcatgcgacaggctgaaatgcagcgcggtcgaggtcacgggcgctgcgacaaacggccgcccatagcggccggcgccaaacgcccagtcggagggcgcgacgttggtggcgacctgcgacagcgccagacgcaacatggcatgtgcgaaaatatactgccgtcgatgccgctcgaacttgaagcgatcggcccgggcccgctcgtcggccgagagcaggcgtcggcacgcatcgatcgcgcccggcgcgtcaaaggtctcgatcagcccgacgaagagttcgattctgtcgtccgccatcaatgggcccatagtgtcaggcgaggccaaatccccggttccgagggaagcatcagctgaggaatcaaccaagaggaccctctctagcggttcacccgggcgaattcttgtcgatttgcaggccggtttacaggcgcaagcttgtgcgagaccccaactcgacaagcgagagggatctgcgaagagtcgcacggagtatccgaccgacgaagcctacttcttcttcttggatttcttcttggacccgctcagagccttgaggctctgttcgatttccttcagctccttctggagcttctgcttctcgaaattgagcaggtcttgcagcgccttgcggtcttcctcgttgagcgaggtcttcttcgtaaatttgatgaaacccataacactcccccgatcgaaaataagtccaaatcaaaacgcgagaataatctcgcgcggcgatggcaaataatcaagcagcaacttgatcattcgcagcattgatgcatgaatccgtgctcgttggcgatgttgtcgatcaggctgccttgctcgcgagtaaccggctgagcggtgcgtcgggctgggcggcggctgcagtcagcagcgcgacgagattctccatccactcgccgaccattcggccctcgagcaattcgcgcttgtagttgcatgtgccggtgactccggtcggacgctccttgagcatcagcgacagccagctctggtcgatcggcagcaccggctggccttcacgcgcgatgtcgccgatcgacgctgtcgcgagatccgggagatcgagcggctgacgcaacggattctgcagcgtgaaatacacctggagcagcgaggcgggatctaacccctcctgctccagatggtcggccaggacgttgaacggcagctcctgccgcgcatgcgcgtcgagcacgccttggcgcacccgcgccaaggcctgcgtgaacgacagctccggtgtgaccgtcgtgcggatgagcacggtgttctcgaacggcccgacgattcggtcggtgtccggctgggcacgattggccatggcggtcgcgaccacgatatcggtgcggccggtccgggccagcagcagggccttcagaccggtgagcaggcacatgaacagcgtgccattatgctgggctcccagcgccgagatccggccgatcagttcgcggtcgaggctgactggatggtgaccggtggacgcgcccggggtggattcgccctcgaagacggggcccgctcctcgcagattttccgtccaatcggcagcctgacggcgcgcagcatcggtgccgcaccaccagcgctgccagcgcgcgacctccgaaaaggccgggggcggcttcggcagcggcactgaggaatatccggccagcgccgcatagcggctcgacaagtcctcgaacagcacgccgatcgaccagccatcgacgatggcatgatgaagcgtcagaagcagcacatggtcctcgtcgtgcagccgcaacaaccgggcgcgcagtagcggcgcgcgcgcggcgtcgatcggggtataggtctcctgcttgatcaggagatcgatcttcctgagttcgagcgccttgcgtcgcttgttggtgtgcggatggccgtcaccgatcgtctccacggtcatgacatggccgagggtgcgaggcgcgacgatgcggctttcgggctcatcgccgttccaggcgaacgcggtccgcagcgattcgtgccggcgtacgacatcatcgatcgcctttgcgagcgcggccgaatcgagcgggccctgcagacggaaggcgaagggcaggttgaagagcggcagccccggcagatttcgctcgatccgcagcatttggtcctgcgcgatggaaggcgcaggaagtccgcctgcagccgatcgcggcagggttgcggcaggctcgtgcggcttcgccgccgcggcttcgtcgacctgccgggcgagctgttcgatggtcgatgcctcgaagatggtcttgagcggcagcgatacgccgagcgcgcgggcaatgcgcgccatcgcctgtcccgccagcagcgaatggccgccgaggtcgaagaaattgtcggtcacaccgacccgctcgaccttcagcaggtcgatccagatgtcagagagcaccttttccgtgaaccgccgggccggtacggcagcatcagctgcggatggctcgtggggaggcgccagcagcgcggagcggtcgatcttgccgtgggcattgagcggcatccggtcgaggaacagaaacgcggacgggatggcatggtccgacagcctgcctttcaggaatccgcgcagctcgctggcgctgctccggctgtggggctctgcgacgatatgggcgatcagcttgatgtcgccgctcgcctcgcggcgcggctcgacgatgccggtacgcacgtttggatgttcggcaagcgcactctcgatctccttgagctcgatacgatagccgcggatcttgacctgatggtcggcccggccgaggcattcgatcgtgccgtcggagcggcgtctggccagatcgccggtccggtagagccggcccgcctggcgtgagaatggatcgggcagaaagcgttgccgcgtctgcgcggggtcgttgacatagccgcgaccgacgccggcaccgccgatgcagagctcgccggtcactccgacgggctgcggctgaaggtttgcgtcgagcacgtagagctgggtgttcggcagcggcgcgccgaccggaacggtgccgatcgcgatcgccggcgccttggtcaggcgatgcagggagacgtcgtccgagcattccgacgcgccataggcgttgataagcggcacttcaggacagcgggcgaaccaggcacggcagagctcgacgggcagcggctctccggtcgagatcagcagccgcaactttgagaaggcgcgcagcacaggcgcctcgtccatgcgatccagaatgacgcgcagcagcgaaggcacgatctcgagcaccgtgatgtcctcgcgcgcgatctcccgtgccagcaggatcgggtctcgcacgatcgcattggcgcagacatgcacgcgcgcgccgaccatcggtccggcaaggaactgccagaccgagatgacgaagctctgcggagcggtctgcgcgatcacgtccctggcggaaaggtcgagttcggagatgagcgaagccaggtggttcgacaggccgcgctgctcgatcatgacgcccttcggcgcgccggacgagccggatgtatagacgagataggcgaggctcgaggcgtcgcgctgcgcggcgcgagccggcctggtcgccgccggggcaatcacgtcttcgagctcggccacttcaatgcgctcgaccagcggcgcgagcagggcgtcggccaaggtggactgaggccgtccggtcagcaggatgcgggcgcagctcgatccgaggatggtcgtaagccgggccgccggctggtcgggatcgagattgacgaaggccgcgccgacgcgctgcactgccatcatcgcggcgagcaggtcggccccgcgctccgcaagcagggcgaccacgctctcggcgccgatcccctcgcggctgagccagcgtgcggccgcctggctgcgacgcgccagctcgcgataactcagcgacgtgcttccgtccgacaccgcaatggcgtccggtgtcttcttcatctgccggtcgaagcgttcgatgaaattgccgcgcgcggtgaaattggccggcaggccccgaccttgtgccagcagctgctggcgttccgtcccggtgagaagcggcaggcgcgagatgcgctgctccggatcggcgatgacggccttgagcagcgtcttgaactggccggccatgccttcgatggtcgcagcgtcgaagagatcggtggcgtattcgaagaagccggtgaagcgaccatcggcctcgaccagttccagagtgatgtcgaagcgcgccaccttgggatcgacttccagccgccgcatcgaaaggccgggaaagcgggccgcctcgatcgaggcgttctggaggatgaacatgatccggaacaacggattgccgtcgctgcggcgcgcgatctgcagtgcgcgcagcacctcctcgatcgggaggtcctggttgcggtaggcgtccaaggtcacctgccgcacccgccgcaacatctcgctgaagccgggatcgccaccgaaatgattgcgcaggatcagcgtgttggcgaacagcccaatcaggctctcgctctcgatctggttgcgattggcgatcagcgatcccgtagcgacgtcctcatgcccggtgtggcggaacagcaggcactggaaggccgcgagcagcgtcatgaacggtgtgacgccgtggtcctggctcagcgcgcgcagctcgcccgacaggttcttggagagttcgagatagtgccgcgccccgtgaccgctccagacttccggcctcggcctgtcggttcgcagcggcagcgtggtgacaccgtcgagctgtgtccgccaataatcgagctgctccctggccgccggcgcctgcgcccagccctgctgccagagtgcgaagtcgcgatactggaaggcgggcgcaggcagtgcggcccggtccttcttgcgcgaagcggcataatggacggcgagctcctcccagaacaggcgctgcgaccagccgtccgtgacgagatgatggatgttgacgaccagagcgtggttggttctgtcgaacgacagcaatgtcagcttcagcagcggctcgcgagcgaggtcgaacggatactgcgccagcttgagcgcctcgtgcctgataacagcggcccgcttctgcgcggggcagggcctgagcttgatgcgctcgaaccgcggaggcgacgacagcacgagctgggccggctcgccctggcgttcgatgaagacggttcgcagcgcctcgtggcgcttgcagatggcggtgaggcttgcggacaaagcggcgacgtcgaccgggcccttcaggagcgcgacttcgacgacgttgtaattgcagcgtgtcgaatcgagccgcgaaaggaggtacatccgctgctgctggaacgacagcggtgcgtctgcatctgcggctcgttgccaggccggcagcgctgtctcgcgccggtttgcggcggtgtcgatccgggccgcaagcgcagcgacggttgggcaatcgaagatgtcctcgaaagagaaatcgacgttgtaccgttcgcgcagccgcgagcgcatctgtgtcaccgcgagcgagtccgcaccgagcgcgaacacgtcctggtcggcgccgacctgcggcagctccagcaggccagcccagatctcggcgagctcggtctccatcgcattgcgcggcagccgtatctcgtcgcggctgtgtgctgttgcgatcagctcggccagcgcgttgcgcttcaccttgccgctggcgcctttcggcagcgctgccacgctgcggatcaagctcggtaccttgtagggcgcaagccgctttcgggcgaaccggcgcaattggtcggaagtcacctcggcattcggccgcagcacaacgacggcggcgacgttctcgccgagcttttcgtgcgggacggcgaacacgccggcctccagcaccgccggatggctgagcaggacctcttcgacctccagcggcgagaccttctggccgccgcggttgatgatgtccttgatgcggccgacgatgaagagatagccgtcctcatcgagatagccgagatcaccggtccgaaaccagcccttgcggaacgccgcctgcgtcgccgcatcgtcattgtagtagccgcggctcatgttcggcccgcgcaacatgatctcgccatgggcgccgcttgcgagcgtgcggccggcctggtccatgatcgcgatctcggggcccgcggcgcggccgaccgatccggccttgcgcagctcgaacggattggctgcgacctgcgaggccgcttccgtcatcccgtaggtctcgagcacgggaacgccgaacgtcgcctccaatcctcgaagaagcgcaggcgcgagcgaggccgaggccgagcggatcacgcgcagcgacgacgaacgggcgcggtccgggtctgcttccgccgccgtcagcagggcgcgatgaatggccggcaccgccgtgtaccaggtcggttgcagctcccgcatccagccgaagaaggacgaggcgtcgaacccgtcggtgcagatcacgctggagccggccgccagcgccgtgagaagacccgagatcaggccatgggcatgaaacagcgggaggacgttgagcagccgatcgtgcgacgtgagcgacagcacgtggcccgcgttgtaagcggacaggcagacattgtggtgcgtcagcggcaccattttcggccgcgccgccgtgcctgacgtcaacaggatgaaggcgtcgtcgtcgccgcgcggggcgccgctgggattcgccgctccgatcgccgggccgacgaacgcacaaccgccgagatcgccgaccggccccggcacgaaatcgatcaccgcgatatcgagggccctggcggcgtcgcggctcgccgagttgatgtcggctcgggtcaggagcgccgccaacttcaattcgctgaaatagcgttggagctcgtccgacgtcagttcgggattgacggggacgcaggcgcaacctgaggcgaccgcgatcagcgccagcgcactgtcggcgccgcgtggcagcgcaaccgcgacgcggtctgccggggcgatgcccaggtcgcgcaaggtgccgaccagttgccggatcgatacgcccagtgcgccatagctgagggccggccgtccaggggcaaggagtgcgggcgcaccaggtgtcttgcgcgcgtagaattcgagaaggccgccgatatgcgcgaatatcctggtttcggccgtcgtgccggctgatctctcatctgctccggatgcaatgtccgacaacgccattcccttttgatgcgattgagctattcttccaagaagttagggaatgcgtccagtccgaggtgaagtttgggccccaatatctgtggttgaggggctctaagcccttcgacggagtgatggtcgggcagaatcaccatgctggagaatgagccgggcacgggagaaggcgagctgaaacgctggctcgaaggtatcggcctcggccgctacagcgatctgttcgcgcagcatcgtctcgatctcgacgtcatgggggacctgaccgaacccgatctgatcgagctcggattgccgctcggcgatcgcaagcggctccagcgggcgatggcggcgttgtttcaggcggaaacggcggaatcgcccaccgcagcggtgcgtccacaagcgcgggcggaggtcggtgctgaacggcgccaactcaccaccatgttctgcgacatggtggattcgacgttgctttccacgcagttcgatccggaagacgtccgcgacatgattgccggcttccgcgaaacctgtgtccgcgtggtcaagcactacgagggctttgccgcgcgtttcgtcggcgacggtatcctggtctatttcggctatccatccgcccatgaggacgatgcggagcgtgcggtgcgcgccgggctggaaatcgtgagggcgctgtcgagcgcgcgcgcggtcgagccgcgtggtgcgccgagccattcgccggccgtgcgcatcggaatcgcgaccggcctcgtcgtggtcggcgatctcgtcgggcagggcaccgaggagcgcgactccgcggtgggagaaaccgtcaacctcgccgcgcgcctgcaagccctggctccgcccaatggcgtcgtgatctccgcttcgacgcagtcgctgctgaaggggaagttcgactaccgcaatctgggcgtccacgacttgaagggcatctccgagaagacgcaggtctggcacgtggtgcgcgcctcgcgggtggagacgcgctttgccgcggccatgggcacgcggctgacgcccctcgtcaaccgcgaggaggagatcgcgctgttgatgggacgctggcagcaggccaaggacggcgacggccaggtcgtggtcaagttcggcgagcccggcatcggcaagtcgcgtatcatccaggagatcttcgagcggatatcgggcgaccgccatgggcaggtttcgctccagtgctcgccttactacacctccaccgcgttccatccgttcgtcgagcagctcaagttctcgctcggcctcgatcgcgatgatacgtcagcgctgtcgctggcgagcctcgaaaaagcgatcgctgccgctcatggcgatatcgagcaagtcacgccgctgtttgccgctctgctgtcgataccaacgggggaccgctatccgccgctcgaactgtcgccgcagcagcagaaggatgcgaccgttgtggcgctggtcaaccacttcctcggccttgcacgcgacatgccgctggtgatcgcgttcgaggatttgcactggatcgatccgacgtcccgcgaggtgatcgacctgctggtcgagcgggtacagaaccgcccgatcctggtcgtcatcaccgcgcgcgtcgaattccagccaagctggaacgcccattcgcacatcaccaccctggtcctgaaccgtctgagccggcagcttcgcacgactctggtcgaacgtgtcgccggtcgagagctgcccaaggaggtcgtggaggagatcatcgtcaagacggacggcgtgccgctgttcctggaagaactgacgaagaccgtccttgaatccaacctcctgaccgagcgccacgggcgctatgtgttgtcggggccctggcggcaactcgcaatcccggcaaccctgaccgactcgctgatggcgcggctcgaccggatgggaccgttcaagcggattgcgcagatcggtgccacgatcggccgcgagttctcctacgagacgctgcacgccgtcgccaatacaccggccgagcagatcgaggcggcactcaatcatctggagcaggcgggtttgatcatccgccgcggccatccgccggacgcgctctactccttcaagcacgtgatgatccagaacgccgcgcatgacagcctgctacacagcgagcggcgcaagctgcattccaggatcgcccaggtgctcgtcgagatgtacccggagaagaccgatcgcgaaccggagctgctcgcccatcacctcaccgaatccggccagagcgagggcgctgcgagcttctggctcaaggccggcaagcaggccgccaagagcggcgccaatctggaggcgatcggccatctgcaccgcggcctcgcggtcgtgcaagccaatgcgcgcatgcagggcgcagacgagatggagctcgagctgcgcattgcgctcggcaatgcgctgattgccgccaagggctacgcggtgcaggaagtcgaggagaactatacccgcgcgctggagctcggctatcagctcgacgacgacgaaaaggccttcgctgcgacccgcggcctctgggtctgtcatttcatccgcgcagatctgacccgcgcgcacgaactcagcgtcgagctgttgaggttcgccaagcgcgcgcgactgaacgagcgggcgcagccggcgcagcagaccggatacctgatcgaagcgcaccgctcgatcgcgatgaccatgctctatcgtgggcgctttgccgcatcccagcatcatttgcaccggtgcatcaacctctacagcccggatctgcattccgatctgatggagcgacacggcaccgatcccggagtggtctcgctgtcctatctcggctatctcctgtggttccttggtcgccccgacgcagcacgccagcatagcgagcaggcgatcgcgaatgcggagaagatccggcatcccttcaccctcgctttcgctctcgtgttcggtgcctatctctgtcagcatctgcgcgacgtcgagggcacgcgcgaccatgccaaccgcgcgatgatcatcgccaccgagcacaatttcctgcattggaagcagcaggcggcgatcctgcgcggctgggcgctggctcagctcggcgacgccgacgaagggctccgccagatgcgcctcggcctcgacgagtacgaggcgatggattcctggctggccggctgctggttccgctgcctgctcgcggaagcctatgccaaggttgggttgcgcgaggccgccctgcgcgccctcgatggtgcgctcgcgacggcaaggcgcacgggcgatcattcctacctcgccgaggtccatcgcctgcagggcgagatcacgctgtcggacggtgatccggtctcggtgcaggaggccgaaggtctgttcgagttatccctggagatcgcacgcaagcagggtgcgctgtcctgggagctccgcaccgccgtcagccttgcgcgcctgtcgcttgaaaccggcaagcgcgagcacgcaagactcctgctggtgccgatcgtggccaaattcagcgagggcctttacacggcggacctgaagcaggcgatgcagctcgtcaacgagcttggcgcggatgcgcccgctcgcgagcaggccgatctgtgacatgcgggatattgccgccgcacgtgcgcgctatgtgggattgattgccaggcgcgagctgatttcctcaaagcgcctgctcgatgcgcttgctgccgttccgcgtgaggattttctgccgcgcggaccctggcgcatcaaggacgaggcggcgcgcagctaccggctgacgcccgatgcagatccggtccatctctacgacaatgtgctggtcgcgatcgacgcgcgtcgcaagctcgacacggggttgccgagcctgtgggcgcatttgatcgacatactcgacgtcaagcagggagagcgtgtcgtgcagatcggctgcggcctcggctatttctccgcggtgctgtcgaggatggtcggcccaaagggccacgtgcatgcgatcgaatgcgatgagcggctcgcggcccgagcggggaactatttgcgcggctatggcaacgtcacggtcgtccatggcgacggatgcaaggatgtcgtcgaacccgccgacgtgatcattgtgcatgccggtttctcgcacccgcatccgctctggctgcggtcgctgcgtccgcgcggccgtcttctggtgccgctgacccagcgggatcgcgaaggcgccgcgatcaagatcacgcggaaggccaaacgtttcgaggccgaggcgatccagcagattcgcatcttccccggccaggggcgcggtgtgactgccctcgacgaccgggtcgccgattggtggcagcgggcatcggccccggcaccgctgcgctttcgcggtctcgcgcaagggctgccgtcggatggttaattcttcgtttcattttaccttgattgcgatagcaagtttccaacgctccccattgccgctatgagtgcggcctgatggcaattcttgagcgcgctccatgcattccgttgcactgctgactgccagctatgccaaggatatcgaacgtttctcgctcctcagcgagagcatcgacacctggctctcgggattcacgcggcattatgtgcttgtgaacgacgaggacgtgccgctgttcgcaccgttcgtctccgacaggcgcgttatcgttccggcctcgcgctatctgccgaaatggctgctcgcgctgccgccggcgctgcaattcggcaaccggcgcatctggctgtcgctgctgtcttcaccggtgcacggctggcatatccagcagatcctgaagatcgccggcgtcctgaatgcacctgagcagcgcgtctgcattctcgactcggacaatcttttcttccgcgaattcgacgtccgccaatatgcaggcgccgagaagacgccgctgttcgtcgcgcccaaggcgatcggggcggatcatccgctgcatggcctctggctccgcacggtcgatcagcttctcggtatcgagcagcgctcgttcccggccgacgattatgtcggcaacgcgctggtctgggacaaggacacggtgcgtgcgatggtcggcgccatcaagtcggccacgggcttgagctgggctctggcattgtgccggaagaagaaattctccgaatatctgctttacgggaatttcgtcgcgaattcgccggaccatctggcgagacatcgggtcaccgaagacagcattgcagtctcgcactgggatgacacgccccttgaccgcccggccatcgaagcgatgatgcatgcggcctcccccgagcaggttgcactctgcatccagtcctattcgtcaacctcggtcgaggacatccgcgacgtgttccgtctctcatcgcgcgatcgtcgcagtccgggcctggctcccgatcacgtcggagatgcgcccgcgttcgaaacgccgaagatgcgatagccttcaagcctcgttcgtgaacttgctgatgacgtccatgaacggcttaggcttgaactcgccgtcgagcggcaaggggcggttcggctgcttgtccttgcgggcaaacgtgccgttgatccagctgtagcggtccgagagtccccaggtcaggatcgagcggaccgggccgctgaccgagattgcggtgagaaggtcgtcgacgcgcttggcgacgatggcgtcgcgctccgccggactacccgccagcttctggtcgtcgacgtcgagttcggtgacgagcacatcgagtccccaggaacgcagctcggtaacgaattcggcgagcccgtgcgtgtcgatctcgagctcggcgtgcagatgcgattgcagcccgaccgcgtggagcggaacgccccggtcgagcaaatccatgatgaggttgcgataggccgcgcgcttggcgatgaacgagtctttcgccgattcgatgtcgtattcgttgatcgcgagcttgacgaaggggtccgccgcagccgccgtgcggaacgccagcggaatccagctctgacccagatgctgcgtccagaacgtgtcgcgccggtccttcggactgcgaggattgtccgggatcggctcgttcacgacatcccacgatgtcagcttgtccttgtagtaggacacgacggtgccgatgtggtcgcgataggcgcgctcgacgcccttggtgtccttgatctgcttggtccagtccggaatgtcatgataccaggcgagcgcgtggccgcgcatcgagagatcgttgtctcgcgcgaaatccaggatcgcgtcggcgcgctcgaaagcgaacgtgtgcgcatccggccgcagcatcggccatttcagctcgagcaccggcacaatctgcgtgcaataggtgctgatggcctcgccgagccgcggatccgcttgcagatcccacaacgtggccgcagcgccaaagccgggacgacgctgggcgcgtttcgacgccggcactgcggacgccgatgcgcccgccgcgagggctgcggcgctgccgaggagaaattcgcgtcgatcgagcctgaccacgttgggcgttccttttgcaaccaacgcgccttcgtaccaagcggcgccgtgcaccgcccgggtttcatgttgttgggttaactcggaaccttcggcgcgtgtgtgttacggccgcgccgaacgcgggagatcgcccggaacatggtttcttttcgatgaccggtccgccggttcggcacagggcaaatttaacgctaacgcgcgaaagcggccgcaaggcctcattcgccgcccgatctgcagactaatgtgacattcttgagagatgctgcggcgccgtttcgttcgccgccaggatccgatcggatcgaccacactcgcaagaccgccgccggtcccttgatcgcatgctgaatcgtcatttctcgatctacctggtcgcctacatcctgcccgcggcggtgggcttcttcgccgtcacggcctatacgcggctgctgagcccggcggagtacggcgtctatgtggtcggcatcagccttgcgggcattctgggcgcgatcttcttcgcctggatcaagctgtcggtgtcgcgctatcaggcgatgtcggcggacgtcgattttcgcggcacggcgatcgtggcgttcgccctgacggccgcagtgctctgcgccaccactccgctggtcttcctgttccgcagcgacgtcagcgtcgggctgctgctcgccagcatgttcgtggcgatcatggccaacgcggtcgacgtcggccaggagttcgagcgcgccaagttgcgcccctaccggttcgcggcgatctcgatcgtgcgcagcgtctccagcgtcggcttcggtcttctcggcatctggctcggctggggtggattggggctgctcgccgcgttcggtctgggatcgctcgccggcatcatcatgaatctcgtcggcgaccgcaccaggatcgcacgcttccagcgcagccagttcatgcagctggcgcgctacggcctgccgctgacgctggccggattgtccgttgcggtctattcggccagcgaccggctcatcgtcgcctatctgctcggcaaggatgccgccggcatcttcggcgttgccgccgatctgccgcgccagttcatggtcatgatcgcctccagcgttgccgcggcgaccgtgccgctggtgttccggtcattgtccgagaacaacagcgagacgacgcgggagcggctgaccgaaagcctcgagcttctgctcgtcgtcgtcgcacccgttgcggtgtggcttgcgcttgcggcggaccaggtcgccggcacgctcgtcggcgtcgacttccgcgccggcgtctcggcgctgctgccgatcctggtgctggcccgcctcttcggtatcgccaatcagttctacgtgcagatcagcttccagcttgccgagcggcccttcatgctggcggcgcaatccttcctcacgctgctgatcagcgtcgtcctgatgttcgcgttgatcgccggctatggccttcacggcgcggcgctggcgacgctggcgaccgaggcgatcggattgctcgttgcggtcgtcttgatgcatcgggcccacccggtcccgttcgagctcaatcgcctcgccggcgttgccgtctccgcggccgcgatggccgccgcgatcctgatggcccgatcgcaagcgggcggcaccggcctcgtgccgctcgtcatggtcagtctcgccggcggcctcgcctatgccgccgcggcctggctgctgaatgttgcgaacgtgcgaacgctgtcgctgcgtttcctgcgaacattgaaccgcaaggcgctcggcgtctagcgagggaccatccgccccgctcggccgggacggctgcaccaaaaggtgatccggacattctgccgcagcgatcgagcccagcttcgggccggcctcggccgaagcccgccttccgcctgtgccaaccctcgtatatgagagatttgtcgctcgaacgtaccgaatcccgccacagacggaacgtaaggcggctgcgatttcttaagcaatgattccaatctgcacgtgagcgacaacagcaggctggcagctcgaccgaggatggcatgaaaaatcaactggcgacggcgcaattcaccaaggcgatgcgacgtctccggcctgccggaatggttgcgctcgcgacgcttgccacattcgtgggcgcggcccccgcgaccgcggccaagcagcagcgccaggccgccgaggcggtcgcgccccgccaggccggcgagccgatcatggcgatcgtctcgatcaagagccagcagatcactttctacgatgccgagggttggatcgtgcgcgcgccggtgtcgaccggcaccacgggacgcgagaccccggctggcgtctttgccatcctcgagaagaaccgggagcatcgctcgagcatgtatgacgatgcctggatgccgcacatgcagcgcatcacctggaacggcatcgcgttgcatggcggaccgctgcccggctatgccgcctcgcacggctgcgtgcggatgccgttcggctttgccgagaacgtgttcgacaggacctatatcgggatgcgcgtgattgtctcgccgcacgacacggtcccgaccgatatctcgcatccctcgctgttcgtgcccaagccggaggccatcgcggccgtgcccggccgggccgacaagctctccgccgaggcggaggaggccaccagggcggccgacgaggccaagaaagctgcgtccgccgccgcgaaggaggctaccgcgctgccggccacgctgcgcaagctggggcagcagaagacccgcgcagacgccgagctcgccttcgccgacaagacgctcgccaatgccaagacggatcaggcccgcgccagggccgaggagcggaagcagaaggccgaggccaaggctgccgacgcggcaacgcagctcgaggccgccatggccgcggcgcagccgaagcgcgatgcggtcgccgccacgaaggaagccgcgaaggcggcggcagccaggaaagccgacgccgtcaaggcggcgaccgacgcaaagctcgccggcgagccggtctcggtttacatcagccgcgcgacgcagaagctctacgtgcggcggaacacgcacaagccggcgcccgacggcggcggcgaggtgttcgatgccagcatcgaggtccccgtcaccatccgcaatcccgagcagccgatcggaacgcatatcttcacggcgatggcgaagaccgatacgggcctgcgctggagcgtggtgacgatcgagaatggcgatgaggccaggagcgcgctcgaccgggtcaccatcccgcaggacgtgtgggatcggatcggaccgaccgcgctgccgcgctcgtcgatcgtcatctccgatgagccgctgagcaacgagaccaattaccggaccgagttcgtcgcggtgctcagcaacgaaccgcagggcggcttcatcacgcgcaagccgaccgcgccggccatggtcgccagcgatgacggatgggacaacggcttcggcttcttctacccgcgtgatccctacgtccagcaaggcaatccgcgccgccgcagccagtatcagtattatcagccggcgcagccgttccagcgcggcttctggtaagggacgccgcgcgcttcgcccttgcgctgcgatccctactgtcgaggctccagttgcaagattcggccaagccggcgatcgatcctacgaacggccgccgacttcgcggaccggccgggtgccgtcccagttcatcgcggccagccggaccttctcgaagaacgggcccttggcgccgctgatgtccgagatctcgatcaccgtgcccggatgggcctgcgtgtcgaaataggcaaagcgtcccctgtcgccgccgatctggccctcatggccgatcctgtagccgagcccaagcgccgtgtcgtacagcgcctggtagtcatggctccagtacgacatgtgctggagcccctcctggccggcgtcgagaaactccttgtacagcgaaggtgcatcgttgcgctgctggatcagctcgatctgaagatcgccggaattggctagcgcaatgctcatctccacggcggaatcctggccgcgatggcggaaccaatcggtcttcacccggtccatgtagtaccagggacctacgcccatcacctcgatccagtgcttcatggcggcgtggatgtcccgcaccacatacccgttctggcgcaccgcgccgaagatgcggctcatgcccgcgctccccttctcaacctgctcacttcacctcgatgcccgcgcccttggcgacttgcttccaggccgcgatgtcgcgtgcgttgatgtcgcgttgctcctcgccggggacgaattggggcgtgatgccgagcgccaggagcttctgcttcaccacctcgtcgccgagcgcctccttcaaggccgctgacaatttctgtgcgatcggaggcgcgatgcccgccggggcatacatcgcccaggacagattgcggtcgaatggcacgccctgttccttgtaactggcgacgtcaggcaggctcggcgaacgttcgccgcaggctgccagcgccttgatcgagccgtccttcaccagcggcgtcgcagttgccatgtcgagcgttgcaagcgagatgtggccgccgagcaggtcgccggcgagctttgcgataccgttgaacggcacgtggtccatcttgatgccggtctgctgcatcaggatctccgcgcagaattgcccggtcgaacccacgccccagctgccgtactggatcggctcgcccttcttggccagcgcgaccaggcccttgacgtcgttggcggcgaaattcctggtcgcgaccagcatgatcgaggaggtgccgacgcggccgattgtggtgaaatccttgatgggatcgtagggcagcttcggatagatcgcgggcgccagcacatgggtggtcatgccgccgagggtgatggtgtagccatcattcgcagcggtcgcgaccatcttcgtgccgagcgttccggcagcgccggtgtggttctcgacatagatgctctgccccagcgccttgcccatgctgtccgcaagcagccggccgaccacgtcaccgccgccgccggccgcatagggcaacagcatccggatcttgcgggtggggtaggacgcggggtcctcggcgcgggccggcgccgccatgatcaacgacgcgaacagtgagagcgtgacggtgctgagcttcatgatcgggttcccctcaagcaagaaagagcgttggttggaattgaatgcgagccaagaactcgaccacctgtccgcgccggagagaggtgatcttcggtgccgactgaattgatctcacgacggctaatcctcgaaacgaaagcgataggcatcgccgtgccggaccacgcgcccggcggtcggtgccggaaaatggccggtcagcagatagctcggcgtgtccgcaagctcctccagcagggccatccgggttgcgagcgccgcggccggatcgacgtcggcggcattggacagccagggcgcggcgcactggatcggatgatggatgacgtcgcccgacatcaccgcgtgttcgtggccaccattgaggtggatctgcatgttgcccgccgtatgtcccggcgccggcgcgaaacgcacggccgcatcgcgatcgctgaacacgcaatgatcggtcgcgacgaactcggcaagcccggccgccaccaccggcagcacggaatcctcgaacgagccgtggttcaccggtgtcgccggcgcggcattgtgggcggcctcgaagtgccggtactcgtcccgtcccatcagatagcgcgcgttgggaaaggtcggcacccatcgaccgtcgcagagccgcgtgttccagccgacgtggtcaacatgcagatgcgtgcacatcacgaagtcgacctcttcaggggcaacgccgagcgcccgcatgttttcgagatagggtcggtcgagaccgttccatgccggcacgcgcggccggtgcttgtggttgccgcagcaggtgtcgacgatcgcggtccagctcggcgtgcgcaccagataggagtgatggctcaggatgaagcggccggtctccggctcgatatagcggtgatcgagccagctgcggttctccgcgatcacggcgtcggtgacgttcgcgaatagccagctcttgtcgaaggcaagcgaagggatctcgctgacgagatcgatccgcatgctgccgatcctcacctgccgcatcggctcaattcttcaggagaccgccgaacggcacccagcgagttccgtcgaagcggatgagctgaaggctcgtcatcggcgtaaagcgctcgggcgaattgctcaccgcggtgccgttgataagcatcggcagccgcacgtccttcatggaggtcgcctgcttcatgacattggcgcgggtgagatcgttgcctgatgccttcagcacggtcaccagcgtctgcgcgattgtgtagccatagacgttgagccagtcgctcttgttgccgtccggcatgtacttgtccatgaaggcgagccattccttgtagccggcatcgtccttcagcgcggggtcggtcgcgtccttcaggtacttgcttgagatgacgccggtcgagttgtccttgccggccggctcaagcacgccgctgatcgaggccgagacgttggagatgatggtgaccggcttccagccgatttcgccgatcttgcggatcgcctgtgccgcgaatttcggcgtcgccgcgacgaggacgacatccgcgcccgcggtcttcaactgcaggatctgggtgtcgacggtcggcgccgaggtctcgtaagccgcccgcgcgacgatcgcttcgccgccgtcgagcccttcctccagcgccttcagatagtccttgccgagatcgtcgttctggtagagcacgccgaccttcgcgttggcgtggctcgccttgatgtacttggcgtaggcgatcgcttcgtcgcgataggtcggctgccagccgacggtccacgggaaattcttcgggtcgtcccacttcgccgcgcccgatccgaggaagagctgcggcacctttcgctcattgagatatttgtgcacggcgctgttggtcggcgtgccgacaccgccgaagatcaggagcacctcttcgctctcgaccagccgccgggtctgctccaccgtcttgggcgggctgtaggcgtcatctgcgatgatcatctggatgcgccgcccgttgacaccgccttcgtcgttcaccttccggaaataggcctcggccgatttcgcgatctgcgcgaaggccgagaccggcccgctcaacggcgcggtggtgccgatcttgatggtcttgtcgtcggcgccgggatcgtgttttgcgctttgggcggacgcggtgccggctgcgagcagcggcacaaggatgcaggccgaggccaggcgaagacgggcaaggcgcgccatgaaagatctccccgaaattgctccccgcttctcgatggagcggagttgaaacgcgatgacagcgcccgcactggacttgcgggccacgatcatttcccagcaggatgacgagacgaacgatcgttcgtacggttgactatcgaacgatcgttcgttagtcaagcggcatggctgtccctacctccagcgcggcggacgcggctgcgcccacgacccgcgagcgcatcctctccgaagcgctcgacctgttcgcgcagagcggctatggcggcgcctcgatgcgcgagctggcgcgccgggtcggcatccgcgagagcagcctctacaaccattttgccggcaaggccgcgatcctggaggcgatcgtggccgagcacggtccggccagctcggcgagccggctggaggagccgcgctacaagcagctcgcacgtcaacccgccgcgttctgccggcagttcgcgctcgacctcgtcgagcaatggtccgatccgcgcgagcaccagttccagaaggtcatcaccgccgagcgcaaccgcgtccccggcatccgggccaagttcgccgatcaattctacgcgcgcgagcagagcctgatgacggactattttcgcggctttgcgctcgccggtctgatctcgacgactgacccgcgcgagaccgcacgcctgttcgcggccgggctcatctacatccgtctcgaacattacgtgatgggtgcggcgccttcgccgcgagcaaaggtgatcgaggcgatcgaccgctatctcgccttcttcctgtcgctgatcgcggcaggcaacgacgccgacaacaagaaacgaaagcccaagggagagaaccgtggcaaggctgcccctgattgatccggagacgacgagcggcgacatccgcgcttcgttcgaccgcatgccggtcaagctcaacatcttccgcatgatggctcatgccgaggccaacatgatcccggcgatgcggctcggcaattcgatcctgcacaagcagaagctctcggccgtcaaccgcgagctcttgatcctccaggccgcccagctggagggcggcgcctatgaatggcgccagcacgttccgatcgcgctcggcgtcggctgtacgcaggcgcagatcgatgcggtcgagcgcggcgactacggtgcggccgcgctgagcggagccgagcgtgcgctgctcgagttcggccgcgaggtcgtcgagaacgtccgcgtgcccgaggccactttcgctgccgtgcgaacgcatttcagcgatcaggagatcgtcgaatccattgtcgcactcggcttctacatgatgatggcgcgcctcaccgaggcgaccgaaaccgatctcgatcccgccgccggcatgaaggtctatgacggcggcaagaggccgggcggctgagatggcggaaaccgagagcaggccggaacgctacatccgcccgcccagcgcggaatcatcaggcgaggcgccgggcaggggacgcctcaaagggcgccgcatcctcatcgtcggcggcggccagcgcgtcttcgacgccgccaccgatccgatcggcaacggccgcgccatgagcattttatgcgcacgcgaaggtgcgaaggtcgcggtcgccgatctcaatcgcccctctgccgagcagaccgtcagttgcatcaccgacgaaggcggcgagggcttcgccatcgccgcggacgtcacgtccgaagcggacgttcagcgcatgatcgaggaagcccgtcgcatgatgggcggactcgacggcatggtgctgaacataggtaccttcggcaaggtcgggctcgatgccgtcagtcccgaggagtggaacaggatctacgacgtcaatgtccgcggccccatgctgtgctgccgcgcggcgctgcccaaattcaacgacggcggggccgtcgtcttcatctcctcgatcgccgcgctgaaggccggctcccagatggcggtgtacgattcctccaaggccgcgctcggcggcctgatgcgcaacatcgcccatctcggcgcgcgccgcggcatccgcgccaatctcgtctatcccggcctcgtcgacactccgaacggccgcgaagccggtgccggccgccccaaccgcggcaagggtcatatcccgttcggccgccaggcaaccgcctgggagatcgcctatgccgtgctgttctttctctcggacgaaagcgtctacgtcaccgcgcaggccctcgccgtggatagcgggctgagcgggatgtaaggcctgcagcccggatggagcgaaagcgtaatccggggccgctacctcatcgcgcgagctgccccggattgcgcggagcctgtcatcgggcggcgcttcgcgccggcccgttggctccatccgggctacggacgcgacaaatgagatggtcgagcgagacgttcccgggtccgtaagccatgatgccgagtgccatggccgcccaggtgaggtgaatcggccagccgtcgggcaccgtgagctcgacgatcacggtcatgaacagaagcccgagcgccgcaaaccgtgtgcccaatcccagcaccagcaggatcgggaacatgatctcacctgagcccgacaggaatgccatcatcgtcggtgccggaaagtgatagggcccgcccggcaagtgcagcatgaattcgtcgctgaacagcgtcaccgccgtctcgttgagcctaaggaagccgtcccatttcagtatgcccgagcgccagaacggcacggccagcgcaatgcgcagcacgagctggaccagcgacggctttgcgagcgcctgtatcagacgatttgacttggcgatgagtgctccaggcgacggcaggctgccgccggtgctcatgggttggtctgtgatcacgatcggtctccgtcggcgagcgaggtgaaggcgccggcttcgatcagcccggcgatgttcgcggcaatgtcgaagtcgcttgcagcttccagcgccgccgccgcggcctcgccgagcgggcgtcccgatatcaggcggctcgcgaacacggctccgccgggcggaaggcggcgcacggtgacgtcgaattcaggccgcgtgatcagggcatcttccggcttggaggcatcgatgcgcgtgaccgttgtgttgtcgcggttggccgcaaagatcgtcacggccgcatagcccgagcgcaggcatcgcgccgccggatgcggaatgaacaccagaccggccaaacgatcgggcgccaccgccgagagccgggccggcgacaacggcacggcatcggcggcgtgataggcatcgagccaggcccgctcgatgcgtgcgacgtcggcgagccagggcatggcctgcgcatgctcatattgcgcgatgaagtccgggaaatcgcgaccatactcgaacagcagcggcgatgcaggcggattgctgcgcacgtggaagcgggccatggcgcggaagaagtcggtgcccgtgatgcgttgcaccgccggataaattgcggccagcgcatcgatcaggctgaccgtgacgttgttgcggtagacgtcgtagcgtcggccggcagccttgccgttcgggccggtcacgagcgagggcgtgctgcgtaccggatcgagcagcgccggcgcgaatgcagcggcgaaggacaggttggcctcaggcggcatggcgctctcctgctggcacggcagactgacgccggtcgaggatcgcctgggccgccgtggcttccgcctccaggatcggccaatcgggaatcctgctgtcccactcgatcagcgtcggcacggcaccgcggcgaccgatcacgatctcatagagcttccagactgcgtcggcgaccgggccgtcatggctgtcgatcaacagcagatcaccttcgtcgtcggcttgctcggcatgcccggcgagatgaatttccccgacgcgcgacagcgggaagtccgcgagatagttgagcgccgagaatccgtggttggttgcggagacgaatacgttgttgatgtcgagcagcaggccgcaaccggtgcgctctgccaccgcgcgaatgaattcggtctcgctcatcgaggattcgcgaaatgcgacataggtcgacgggttctccagcagcagcggccgccggatcgcttcctgtacctgatcgatgtggtcgcagacgcaggccagcgtcgcttcggtgtagggcaggggaagaagatcgttgaagaagctggtctcgtgcgtggaccatgcaagatgctcggacaccagcgctggctgatagcgtgcgaccaggcctcggaagcgcgccagatgcgccttgtcgagcggccgcggtccgccgatagacatgcagacgccatgcagcgagagtggatgctcgcggcggatcgcttccagcgcgcgatgcggcgggccgccggcgcccatgtagttctcggcgtggacttcgaaaaagccgcgccgaggtcctgcttcgagaatcgccgggagatgctcgggcttgaagctcgtcccggcgacgccgccgatcggcagtgcaaagcggagcggcatcgctgttggcgaggtgggcctgatcgccgtgctcatcgtgctgctcccttcgcagttcgggccgacctcgcgccggtcgtcacaccggcttcaacgaacccttcttgccgttcggcagctcgatgctggtgcaggtgccgccttgcacgaatttccaggcattaccctggtaatcgacggtcgaggtgccctggcaagtcgtccctggtccggccgcgcaatcgttctggcccttcagcgcgacgccgaagcatttttccttcttggcggcgacggcggcttcggcctcggccttgctcagcggaccggcggcggcaagggtcgcgagcgcggtcgacaccgctccggcgaggacgagggaggtaacggcgtgtttggcagacatcgaattctcctgtttcgagatggcatcgcccttcaggcgattggcgcttcgtctccttcgatcgcgtgcagccggcgttacggacgaggttgctcacgaattcgtgaagacccgttggatcgggcgcacgggcggtgcgcttggagggattagcgggcaggcgccggcgcaaagccaatgccgagcttctatcgagacattagccgccgggcattggtgccgggcccatgattccgccagagaggtaacgaacgcgcaccggcgacgtaggcactgtcagtgcttccggggtggacgcgtaaggcgaaggcagcgatgaaggtcgatcccgaacgacggcttcatgcgatcgcaggggtgacggtcagcatccgcctcgccgtgtctgcgctggtcctgacggcgattctgctgacagccgccctctccagcctgttgtggtggcgtacggcggaggcgaccagccggcagcttgcctccaccatcaacgagcagatcgtggcggcggtgcgcaaggaggtcgcggccatcgtcgacgaggcgcgcgccgcgcacaccgcgatccgcacattgttcctgcagaacgtgctcgacacccgcgaggccgacaagcgcgaattcgtcttcctctcgcaattgcagtcgcaggcgacgatctcctgggtcgcgttcggctggcccgacggctccttcttcgccgcgcacaagctcggcgatcgccgcctggagatgatggaaatctcgctgacggatcatccgggtcagcgccgcatcgacgaatatgacgtcgtgcccggcgacatcgagttcgccaatcgccgcttcgagccgacctcgttccatgttgccgaccaggcctggttcaaatccgggctcagcgcggacgatccgcaatggttcagggtgtcggagcatgcgtccggagaacggccgtcgatcgcctttgccgggccgatcgacgtctaccaggagcggcaaggcgtgcttgccgtcatcatcgagtatacgcgccttgcgcgcttcctgtcgcagctggaggtcgggcgcaccggcacggccttcatcgtcgacggcagcggcgagctcgtcgccgcgccggacaaggacgctgacgaactccatccggcacgtggcgatacgagattgctgccgctcgcgcgccttgcgctcggcaaggccggtgaagcggggcgcaaggaagcctggcgcagtcgcctcacgtcaggcggcgcggcctacgaggtggcgctgacgccgctgccgtttcccggctggtcgcttgcaaccgtgatcccggaggccgagtttctcgggccggtcgagacgacgttgcagcgcctgatccttggcctcgccatcggtgccgtgctcgcagcgcttggctcggcgatgctggcgcgctccgtcatcgccgcgccgctgtcgcgcgtcgtcggcgagcttcgccacgtcgaggcattcgcgctggagcaggtgcgccgtcatccctcgcggctcaaggagatcgcgagcctgtcgagtgcgatcgccgagatggcggccggcctctccgccttccgcaaattcattccggccgatctcgtccgcggcctgctgcgccagggcgtcgaggcgaggcccggcggcagcgtgcaggagctcagcgtgatgttcatcgacatcgccggcttcaccggcctgtccgagcggctgggcgatcgcgtggtgccgctcttgtcgcgctatctcgacctgacctcggagatcatcgtcgccaatggcgggaccatcgacaagttcatcggcgatgccgtgatggcgttctggggcgcgccgcagccgcaagccgatcacgctgcgcgctgctgccgcgctgcgctcgcctgccgcagggcgatcgaacaatcgggcctcgtcgacgatctcggccagccgctccagatccgcatcggcatcaattcgggccgcatgctggtcggcaatatcggttcggagctgcggttgaactacaccgtgatcggcgatgccgtgaacgtcgccagccggctcgaaggcgccaacaaatcctatggcacgcagatcctgatcggcgaagcgacggaacgtctggtgcgcggtgccgtcatcacgcgcgaggtcgacagcatcgctgtctacggacgcgaggagggtctctcggcctacgaattgattgggatggtgaacgagacagcggcggaccccggctggatcgcgaattacgagcgcggcctcgccgcctatcgtgcgcggcggttcgccgacgcgctcgccgacttcgagatggtgttgaagcagcgcggccgcgatcgtccggccgaactgatgcgtgaccgatgccggcagttcgccgcgacgtcgcctgatagcgcctggcgacccgtggcggcattgacgtcgaaatagcgacataaacccgactcgagcttcagcggctgaagtgaaaaccggtggcaaagccggtctgtcccgcgcatgatgtggacatgaaaaccacactgctcaaatccgaacactacacccgctcgccctggaagaacggcggcggcaccttcaccgacatcgcggacgcccaccgggccgatgcgcggcagaaggactgggatagcctggtctggcgttttgcctcgaccccgatcgtggcgcccggcccgttctcctacatgcccggcatcgaccgcttgcagatggtggtgggcgggcgcgggctggtgctgaaatcgcctacgcaggaattcgacgagcgtgaaccttttacgacggtgcgcttcactggcgagctcgagatcgtcaccgagctcgaggccggtccggtcgaggtcgtgaacctgatggcgcggcggggggcggccgagatcgagctcgaggcgcttagggaacccggcgagcggccgctcgccgcgggaacgcatctcgtctacgccgcgcgcggcgattgccttgttcgtcttggccgtgaggatcttgcgatcccgagccagggcacgctgaaggtcgaaacgggggagccatcgcagctcgtcctcgcatccggcctggctgtgctgggatcgatccgcatcgtcggttgatccgcagaagtgcgcagcgattttccggaaggttcaagctcaaacaacgaccgcaagccactgcgtacaaaccgggcaattgggcaggttgacgcggcaatggcgagcacgataactgccccgatgcagaccgccgctcgagggcaggacatgaacgcgcttccgaataacgccgccacacctgccgatggcgtcgtcgactggctcaccaacggcacacgcgacgagcgcttcatcgacgacatcttcgcgcagatgtgcattcgcctccagcaggccggcattccgttgaagcgcgcgacgctgcacgtgttgatcaatcacccgcaatggctgggggcccgcatgatgtggtccgacgggatgcgcaatgcggagatcgcgctggtcgattatgaagttcgcgagcggtccgagtatatcggcagcgccgccagcgaaatccaggatggcgccgaagaggtgcgcgagcggctcgagcaggatcccacgctgggccgcaagcacaccctctatgacgagatgcgggccaagggcctgaccgactatgtcgcctggccgctactccacacgctcggcaagcgccatctcgtcactttcgcgaccgatcggcccggcggcttcgacggtgcgcacattgcgggcctgaagaagctgttgccggtgctggcgctggtcagcgagatccgtatcaagaaccgcctggcgcggacgctgctggagacctatgtcggctcccacgccggcgagctgattctggccggcgccaccaggcgcggcaccggcaccacggtgcgcgcggcgatcatgatctgcgacctcagggatttcaccaagatctccgacaactggccgcgcgacgacgtcatcgatctgctcaacgattatttcgacgcgatgtccgagccgatcgcgcgccatggcggcgagatcctcaagttcatcggcgacggcctgctcgccatcttcccgctgagccagcccaacgcctgcgcgaacctgctgcatgccgtgaccgaagcccggcaggccatggccgcgctgaacgagcggaacaacgggaccggccgcgcgccgctgaattacggcatcggcgtccacgtcggcgacgtcatgtacggcaatatcggatcatcgagccggctggacttcaccgtgatcggcccggccgtcaacatggcctcccgcctcgaggcgctgaccaagaccatcggcaggaaggtgcttctctcgcgcgctttcgccgacctggtggagaacgagttcgcgctggagcatgtcggcgagcacgaggtgcgcggcttcagcaaaccgatcgagctgtttgcctatccggagtgagcgcgaacggccgcaaaacgccgcggctatttgcgctgggtgccgggggcgttcggctcggcctgccgaccgccctggtcttgcctggaaggatcgttgtcgcccgggcgcatggtcgatgactttgccggtgcgctcgcgccgccgctgttgttgtccgcggatgtgttgaggccggaagctcccgcgcctgtcgtcccgccggtcccgctcgaattgatgctcgacccggtcctggatgcgccggtaccgccctgggcgaatgcggcgagaggcgaggcgagcgccgcgacaagcgctgcgagaacgagtgctttcatgtcggctcctgcgggttggggtcaggcggccccggccggtccgggggagggcttgccggggccgccatgtgccggaattgcagaaccccggcgtggcccaatgcgcgggaacccaaggcgttcctatcaagccgtacctatcagcgttcctatttcccgttcggagcgcgcgtgccctcaggccgaccagcgatcctgctcttcctggtgggcgtgctcgttgagccggtcggcgatctcgtccgcaatctgctccgattccgccactgcaaccggctcgcccttgtgcgtcctcagcttgtccttgtcggcctggatcgggaaatcgtcgggcttcagttcgttatccctgctcatggcgcgcctcgcggagtctccgcaggcaaaacgcacgtggaggccgatcgttgcttcaaggatgaagcctcgatcgaccgagccggtcaggccccgccgatggcccgggtgacggtcccgctccccctgcaggtctcgcacggagcgccgtcgatccgccccttgccgttacagtccgggcagacatcctcaccggtgcccgtcgttcccgacggggcttcatcgccgggattgagtgccggctgcgctccggtgctcgcgacttgcgtgtcggacgccttcgtcttggtcatctgcacctcctcgaaaagaccgcaacgcgccttgtcgcaggaagtgccaatcggagttcgcagcgcagtcgagggaaccgcgctgcttgtatcccctacctctccaccgggcccgtccagtccttgaagccgccgaggttgtagacgttctcgtagcccatatccttcaggagcttgccggccagcgccgacctgccgccggatgcgcaatagaggatgacggtcttgcttctgtcgaacgccttgtcgtgatagggcgactccgggtcggcgcgaaactcgagcatcccgcgcgagacgttgacggcgccggcgatcttgccgctggcggcgacttccggcgcgtcgcgaacgtccaccaccagcgtgttgcccttgttgatcatctcggccgcctgctccgaggcgatcttcgggacctccgcgttcgcagcttccagcatttgcttgacactcgttgccatggtttctccgggttttcttctgccgccccgcaagaggatagcacatcgaattggaagtcgctcccggatgagcttgccttgctgaagcgaggggggcggaggcccggttgccaacgcaggaatgtgcgactagcctttgcgaaagcgacgcccaaacggtccgcatcttcatgccgaaattccttcgcatcggagtccatcaatccaacgtctccggatacacgtcgaaggcgtggtgcgtcaggtgcgtcggctcggcggtcttcctgaagtggggcgccgtggaggtgcagggcaccggggccgcgcgcaaggtgtattgggcgcgatcaccgcaggagaagacgatccgctgccgcaccgcgcagcgcgcgcaggattacaccaaggccgcgatcgcacggcgtcgcaatcatcgctacgagccgctgaccggacccatcgcgaaccggcgcccgtccgccgcgcgcaacccggagctcaagcaggcgctcgccaccatcctcatcgtcgacatcgtcggctccaccgcgaaggccgccaagctcggcgatgcgcgctggaccagggtgatgggccattactacgccgcggtccgcaaggaactgaagacgtgcggcggcagggaagtcgtgaccaccggcgacggcgtgctggcgacattccggaagcccgccgccggcatcgcctgcgcgaacgcggtccagaaggcggtgcgcacgctcggcctcgagatccgggtcggcctgcatgccggcgaatacaccatcagcggcggcgaaatggtcggcctcgccttccacatctgcacccgcgtcgcggcgaaagcgcgcggaggagaggtgttggtgtcgagcgcggtgagggagctgatgacggcgcaggcggcggcgagcctgagggatcacggcatgcaccggctcaagggcgtgccggagcggtggcggctgtggcgggtggaggggtgagggcgatcggactctcacccgatcaaacgccaccggccgctcaagcttccgccttcatgttggcgaaacggtcgcgcagataggcggcaaacgagcgccttccctcgtcctggctccagctgtcgatcgcaaggcgaaaggctccgatggagaccatcgcgaccatgcggagtgcggtctgccgcttcggctgcggccacagcgtgcagagcgcgtcgaagaccgcctgctcctgctgcgcgtatttggtggcctcgcgggcgcgaagcgtctcgttggcgcggatgaagcggtcgatctccatcatttgcctgcgggcctgaacgtcctcgtaggacgccgtgagcttgaccagcgcgttcttcaccgcttccagcggcgtctgcttggttgattgctccagaaccgcccgccctatggcgtcggcgagaccgccctgccaggccaggatgatgtcttccttcgacttgaaataatagaagaaggtccggcgcgaaattccggctgcttcggcgatggcatcgagcgtcgtcgcctcatagccgttgcgaaggaagagcctcagcccggtgtctgcgatccgtcgcaacgtttcgcggcgcttttgttcccgcagtccttctctttttggtgatgcgtcgtctccgtcccgttccgacacacaacggcctcattcaaaattacacttagtgcgataaaattccgcatcaagtgcgaaattactgcatgtggggccggccggcaaggctcgaccgggtcaacgcgtccaagaccaagcgaaccggagcaagatgactgcagacagggacggcccggcgaacgaccgggatgccgatgcctcgtgttgcgattcccgtggtgcagagccaggcttgctgcaaccggccgccggaatggaccagcgcgtgcgcagctccggccatatcgagcttctgcgccgccggcccgccggctacgccgtcgtcaccaaccgcccaggcgcgatgcaccggcctcgccgtgcaatcggcagacctcacagaggcctgcagatcaccaccccgacggtacgcgacgcgcgcgccttccattccggcgggcaccgccgggacggcgtcgtgcgcgcctcgcccggggagcgcgacgagcgtcgatttgccgcgcgcagccttgcccgcgcggcgaaggcgatgcggtcgccgtatctcggcaacatcggcatcctcctcctgctctgcgccatctcgttccatccctgcttcgatctggcgaagatcgtctcgaacagcttcctgtgtctcggtgcgaaggccgcgttcgccgcgaccgtcaatctcgtcgtgaacgagtggacgccgacgatccaggcctttctggccggccgcctcttgcgctggatcggcctcagcctgctgctcgcgctgcttccggcgctgaccgtcatccgcgccgggatgctggcgaagctgcgctcgttcgccgcgctcgggcttgttcggctgcgcggcgtcctgaaagcctcgctgcagccgaacaagcgcaatgtgctaccaggccgcgatgcaggcgccgttcacgagaaggtcaacacgcccacgcggcacgaagcttgaaaattacactcagtgtaatttaatgcgccggacgtcacgttgtgccgtgggaggtggcccgatgcccggttggaatgcgagcgatattccgtcacagcgggggcgctgcgccgtcgtcacaggcacgggtggcctcggttacgaggatgcgcttgcgctcgcatgcgcgggcgccgaggtgatcatcgccggccgcaatgcagccaagggagccgacgccgtcgcgcgcatccgctcgcacgagccgaatgcgaacgtccggttcgaatggctcgatcttgcggatattcattcggttcgagccttcggcgcccgattgcgcgccgaacgggacagtctcgacctgctcgtcaacaacgccgcggtgatgacgccccggacccggcagctgacggccgacggcttcgagctgcagttcggcaccaaccatctcggccatttcgcgctaacggccgagcttctcccattgctgcggaaaggcgttcagccccgtgtcgtcaccgtctccagcgtggccgcgcgcagcggagcgatcgcgttcgacaatttgcaggccgagcgtcgctacgagccgatgccgatctacagccagtccaagcttgcgaacctgatgtttgcgttcgagttgcagcggcgcagccgggccttcggctggggcatcaccagcgttgcggcccatcccggcgtgtcgcgcaccgacctcatcccgaatggggccggccggatgagcctccccggcctggcgcggacggccctctggttcctgtttcagccggcggcgcaaggtgcgctgccgacgttgttcgcggcgacatcgccggacattgtccccggtggctattacggcccggacaagttcggggaaacgcgcggctcgccctccgtggcgcgcgtgccgccgcaggccgatgacgacgcggtggcgtctcgcctgtgggatgtctcggcaagattgaccggcgccagcttcgcgacggagtcacatcgcgcccggacgaagacagatccgtgcacttgacgcccgaataccggaaatccacgcgattcatgccgcttttcggcccaaaccggtcccgtcgggcccgccgcggccggtcgacggatggctgccgttttctccacaagccatgtcggaacccaggacggccgttcgtcttgaatccgtgcctcgaaccggagttctgcgtaaatggccccgcgcgccaattggaaaggcttcctgagactgtccctcgtcacctgtcccgtggcgctctatccggccacatccgaaagcgagaagatctcgttcaaccagctcaaccggcagaccggccaccgcatcaaatacgtgaaggtggatgcggacaccggcgacgaggtgccgaacgaggacatcgtcaagggctacgagctggagaagggccagtacatcgaggtgtccagggaagagctcgaggagatcgcgctggagtccacgcgcaccatcgagatcgacgagttcgtcgacaagtccgacatcgacgcgcgctatctgatccgcccctattacatccggcccgacggcaaggtcggccacgacgccttcgcggtgatccgcgagaccatccgcgagatggacaaggtcgcgatcgggcgcgtggtgctgaccagccgcgagcacatcatcgcgctggagccgatggacaagggcctcgtcggcaccctcctgcgctacccctacgaggtccgcagcgagcaggactatttcgacgagatccaggacgtgaaggtcaccaaggacatgctcgatctcgcccggcacatcgtcaaccagaaggccggacgcttcacacccgagaagttcgaggaccattacgagaccgcgctgatcgagctgatcaacgagaagcgcgccggcaaggtgatccggccgaaggagcggccgcagggcgagaacgtcgtcgacctcatggaggcgctgcgccgcagcgtcggcaaggaggccgggaaggaagccggcaagcaggccgggcaggaggccgcgcccgcgaaggcgggcaagccggcgaagaagccgaggaaggcggcggcaggccagaaggagatgctgatgccgatcgcgggcaggaaggcggccgccgccagggactcgtccgcgaagaagccggccgcaggggcgcggcggaagtcggcatgaagcatccggtgacgccggatggacgctacttcgttgaccgcggtcgcctgtggaagccccaaaggccctcgtcgggacactccggacaggcatcgccgatcgaatcgagcacgtcgttgatctccgcgaccgcctgatccggagagacgccgtctggcggctcccggcgcgcaagcgcgagcgcgcgatggcgcgcgtgcgggtcggcacgatccctggcccagccatgctcctcgcattcgcagatcgcgccggcctcctgcagcaattggatggcccagcccctcaaggtgcggatcgccggccgtctctccctggtcatcagcatgcgagatcactcctgcgggacgaatccgtagcgtcgccggatcgttccgggcggttagcacggagcagggattccgaaacggcagggctgggccttgtccacgtgttccgcatgaggggagcgcgcggtgtggcgcagggtcttcatgcgccgcaaggcactcggcggccaggcaggcttcgtctttgggaaccaggcatcgcgcggcgacttatgtcgccatcggttcggaggactcgccatggccattgatgcgttcgccggctccacgccggtgtttctccccgagcagttcttcgtcggccgccttgagggatgggcggtggtcgagagcctcattggcgggctcctgaagcgcgcgacgatcgcggctcatggcgagctggacgcggacaccgatactgtcgtcctgaccgaaacctacaccttcgatgtcggccacagcgacacgctgcgctggacgattcacaaaacgggcgaaggtcggtacaccggccatgaaaatcgcctggaaggtgaagccgccggcgagcaggccggttgtgcattccactggaagtacacccgcgacacgccccagggcgatggcaagtcgttcatgctgaacttcgacgactggttctacgcgatcgatgatcgcgcgtgcatcgtgcgcggcagcgccgggcgcgcgggcatcccgttcgcgacggcgcatgtgacctatcggaggctctaggtctgggcggcacggcctcaggcgtgaccggctcagccttcgaaccgccagttcgccggcacccagcgatagccgacatccgtcttcctgatgttgccgatgcccggaaacgggaaatgaaacccgagcaccggaatgcggtccgccgcggcgcggtcgaacaagcgcctgcgcgactgcaaggcggcgtcgggatcgagatcggggccgggccgccaagcgttgtcgatgttgagcagggggctataggcggcatcggacgtgatcagcaatgattgcgcgccggaatgcaccaggatcgccgacatgcccggcgtgtggccgccggcggcgatcgtcgtcaggcccggcaacacttcgctgcccggccggtacagcacggctgacctggcgaccggcgccacgctgcgcttgatgttggcgatgaaggcgcgccggaagtcttccggcatgggcagccgcgacaggtccggctcgccccggatgaagaacgcaaaatcgtcctcgggaatatagaccgtcgccttcggaaaggcgctcgatccgtcggagcggctgagattgccgacgtggtcgggatgggtatgcgtgatcacgatggcgtcgatgtgttcgggctgcacgccgatcgcctcaagattgcggaacagatgtccgccatcggggccgagtgtttgcgcggcacccgcctcgatcaggattctcctgccgcccttttccagcagaagcgtgttcaggttgagcctgaagctgtcggtcggcaggaacgcatcgctcaaggtcctgccgagctcctccgcctgcgcggtcgaggcgtagatgcgcggattgccgctcagcgtgccgtcgctgacgacggttgccttgatatcgccgatccggaaactgtaatggccggaattggtcctgggcgcaggcgcttgcgcgagcgctgccggcatgcccagcagcggcgtcatcgctccggccgtgctgccggcgagcaggaggcggcggctcatgttcagttgcagtggcatgacggcttctccggcctggcggcgatggacggctgtgtacgcccacctggcgtcatccacaaatgtcatgatagaatttgcattatgcgctcaatggatttagccaaagtcgacctcaatctgcttgtggtgctgcatgcgctgctcgaggccggcagcgtcacgcgcgccgccgagcgtctcggcagcagccagccggcggtcagccgtgcgttggcaaggctgcggcgcctgttcggcgaccggctgatggtgaaggcggcaagcggcatggtgccgacgctccgcgccgaggcgatgcgcgagccgctggcgaacctgctcggcggcgtcgaggcatttctccacaagccgaagttcgatccttccgccaccgaccgcgtctttcgcatcgcgacgaccgattatggcgcgctcgccatcctgcccaatgtcgccgcccgctttgcgcgcgaggcgcccggtgcggcgatcgaggtcgtcggcttctcgcgcgatgtgtttcgcatgctcgccgacggtcaggtcgatttcgtgctgtatgccgataacccggtctccggatcctttcgggcgcgcgagctattccgcgaaagcttcgtgacgctggtcaggcaagggcatcctttgctcaaggagatgcgcggggctagggacgtgctgccgatcaagctgttcacggcctggccgcacatcgtcgtcagcattttcggcgggcagggcgggccgatcgacaccgccttggccgagcgtggctacaagcggcacgtcgcgctgcgcgttccctatttcgcaaccgccgcggtgatcacggcagcgtcggattacctggtgaccatgccctcgcgggccgcccggcagctcgcgccgcggctcggcctcgtgatgctgaagccgccggcgcaggtgacgccctacggctatcgcctgctctggcacgaacgaagccacgacgatcccggcgcggtctggctgcgccggctggtggtcgatggcgtcaagtcgaggggcgctgtggcccaacgcgtaaatgtcagacctggcttctgtcgcagtaactgtacaactatcatcggcatcgcgggatagcttcgatggatcgattgaccgacgtgttgggcggagcgacggcgcatatcggcgcggagtattttcacctgccgatccatggtggcggccctgtctatcgtgagcgcgtttattgctacgagctttatcaccagatgcgtttgcgatggccaaatgaaggtccatttcgcctgaatggtgaagtcgataaggccgcgcatcctatcctgtcggagcgcggtgcgagccacgcaaagcctgatcttttggttcatgggcccggcgatatgggccttaatcacgcgatcatcgaagtcaaatcgctccgcgcgagcgtcaacggcatagagaaggatctcaacacactctctttgtttcggcgagccgtgggctatgagcgggcgatctatcttatatatggaggcgagcgcctcgaccgcattttcgcatggatcgaccggttggcaggccgaattccggccttgcccgtcgtcgaggtctgggcgcaccaagagccgggccgaccggctgagaatctcttcaccattggtcggccgtgaccaattggcttcgccgatccgcaagcccgcggctctctcgctgtgcagaggcgcaaaaacatgtggaccggatgggtgtatggtcgcgggaaccgctcaatatcggcacaagttgcagccagacgtttccacgagacctatctggatcatgtttgagatcacgcgcgacgacattgcggccctgaacgatgaggatttgcgagcgctgattggccgtctttgcgaggccgaattgcgccgcaaggacttgccggtctctgccgtcacgtggggcggcgaccagaccgccaaggatggtgggctcgatgtgcgggttgcactcgcgcccggtacccatatccaaggcttcgtcccaagggcggccacgggctttcaggtgaagaagccggatatgccggccgccgaaatcataaaggagatgaagcccaagggagtgcttcggcctgtcatcgaggaactggccgccgcctgcggagcctacgtcatcgttagctcgaacggctcgacctctgattccgccctaaaaagccgcggcaaagctatggccgacgccatgcagggctgctcggatgctgccaagcttcatctcgagttctacgaccgcagccgcgttgcaagctgggttcgggaccatgccgggctgatcccttgggttcggtcgcggatcggcagggcgttccgtggatggcaatcctacggcggatggtccccgctaccggcgggtgccgacaatacgtaccttcttgatgacaaggcccgcatcaagaccaccggccaaaaggacgacgatgctgacggggtgaccgtcgtcgacggtatcgaccgcatgcgggacgcgctccgcaatccggggcaggtcgtccggttggtcggtttgtccggcgttggcaaaacgaggttggtagaagcgcttttcgacccaatgatcgggacgaaggctctcgacccgtcactcgcgatttatgccgatacggctcatgaacctgacccgcagccacgcggtcttgcctccgaccttcttgcgcaaaggacgcgcgcaattctggtcgtcgacaattgcccctttgacacccatcggcagctcgctgaggtggcgcgcatcgctggttcgacgataagcgttatcacaatcgaatacgatttccgcgacgatcagcccgaaggcactgatgttttctcgctggaaacgtcctcgctccctctcatcgaaaagctcgtgcgagcccgatttcgggacatatcccaaatcgacgcccgcacgatcgctgaattctcagacgggaatgccaggatcgccctcgccctcgcaggaaccctgaagaaaaccgagaccatttcgggtctgaccaacaccgagctgttcacgcgcttatttcagcagcgtcacagccacgatgccaatcttctccagatcgctgaagcctgctccttggtttactcgtttcagggagaggccttggaaggtgagaacgcagagctccccatactgggccggttgattggaaggtccgctcaagacgtatttgcagcggccgctgagctaaagcgacgcgatcttctccagcagcgacgggaatggcgagccgttctgccgcatgccatagcaaaccggctcgcgaaactggcgcttgagaacattccctatcctctcattagggccgaaatcgttgaaggtccctccgaacggctgcttcgctcgttttcgcggcgccttggctatctcaatgacagcaagcaggcgcaggacatcgtgcgaggctggctttccaagaccgggctcctcgccgatgtcttggagctgaacgaactcggacgcgcgatgtttgaaaacgtcgcgcctgtggcaccagaagctacgctctcggcgcttgagaatgtatttgggaatgccgatcggctcactctcttgagaggagggcacctcattcgcttgttgcattcccttgcctatgacacacctctgttcgagcgggcggttcgcctgcttatcgcgtttgcgagcgttcttgaggaaggtagcttcgatggcgaggccgcgagggccacgacgcccctcttttatcccgcgttttccggcacgcacgccccccttgccgtgcgcttgcctgtcgtaaagcgattgttgaagtcagagaagccggtcgagcagtatctaggtatccaggcgcttgaagcactgatgacgacacacaacttcgcgccctatggccagttcgagtttggcgcgcggtcacgcaactatggctatcacccgaaaagtggcgcggaagccggtaggtggtttgaggatgtcctgagcttcgtagagccgtttgcgcttggcgacagcccaatcacggcccgcgtgcgcaagtcgatcgctcataaattccgctggctctggactcatggcggtcggcacgatgccctggagcggatcgccaaaagtatcgctggaggcggcttctggcgcgacggctgggtcgctacgcgtcagacccaccactacgacggcaagagcctgacgaaagaagccgccgagcggcttacgcgcttagaggaatttcttcggccgaaggacttggtcaaccgtgtgcgggcgattgtcctgggcgatcgcagtgggcgcctcacgctggacgacctcggtatcgacgatcaatcggcggtaaaggcgtccgaacgcatgaggcgatccaacatcgcggccgaaaaattaggccgggacgttgccatggatgatgcggcgttttctgcgctgcttcctgaactcgtcagtgctccaggaaatcttagcgaatttggtcggggtctcgcgctggaggccctcgagccccgccttctgtggcgccggttagtcgacgaggttagtcggaccgataatgccaacgttcaggtacttctcggcattctgagtggcctcgaagtccgagagagtgcccaagccaacgctttgctcgacgaagctgttgatgacccgatcttggctccatggttgccgacgctgcagacgggtgtaaccattgacgacaaaggagtcgctcggctgcggcgagctttggatctcggcaaggcgccgatcggccaatatttcagtctcgtgtatggcggcgtttgcgagccgatcccgggacctgcgtttcgagacctcgtccttgccatcggtgccaagcccgacggtaatcgcattgcgctcgaaattctcgccatgcgtcttcattccaacgcgaccgcaaagcgtacgcctttgccggagagtgctgaggcggggcgccaattgctcgtcgatcatcgctttacccgccgaggaaatgccgccgattccgacgactaccggttgggccttgtggcggcagcttcgctcgccggggcggagggggcatcaattacacgcaagttactgcgcgacctaaaagaggccgttgcaaggtatgacgtctcggctggcgagcaggacgacctgcttctcagtatcttcaagaagcaacctgtcgctgcgcttgatgaactcgcgtccggtgaggagaaggaccggcaacgcagtaccgagctcatccaggacatgctgcgtaatcggcaaagcccttcaagcgttgttcctgacgacgtgttacttagctggtgcgaagccgatcctgcccggcgctatccatttgctgccggcgtggcgctgctctactcgcgtccgaacgatcagtcgtcggatgaatggaagcctattgccaagctgctgctcgaacgggctccggatccggttgccgtcttcgaagccatgggccagcgaatctggccgacgagcttcgatggttcacccgcctcgaagttcgaatctcggatgcaactcctcgacatcctcgagcttggtgagaacgccgctctccgcgtggctgtcggcaagttccggggagaactggctgacgaagccgcgagatggcggcagcgcgatttggaagaggattcggcgcgcagtgggcgctttgagtgataggtcgggcaggggagcgataggacgggcctaataagtttctgatcacattggtgggcccggcaggactcgaacctgcaaccagaccgttatgagcggccggctctaaccattgagctacaggccccgccgcgaggcggccgcatcaagggcggccggcaacggtgcgcggttcgtttacagggcctgaggcgggggtgcaatcctcaagcgttttcaaggcgaagcgggtctcggcccgcgtcgggcaatgcgtggaacggggctgatcgagggaacgccagggggtgtgcggaacgcgcggtgcggtgatggccgccgaattcggaatagtcgcattctgccactgttttgcccgacgggtcaaaggatgaggcgttcggcgggtggctgtccgcagtgtttcgccaagcccctgcgattgctcgcgtcttctactgtgcatggggttgttttcgaactttggtcttgagagggcctgctggccccctcaagcgtcgtgccggcgggcgatgccgcgcggccgggccgcggcctagtccaccgagaccccggcgaactcgaccaccttgcgccacttcgcggtctcgtccgcgaccagcttgccgaactcggctgatgtcatcggcttgggaatgccgccggtcgcggcgagcttcgccaccagctgcgggtccttcagcgcttcgccgacggccttgttgagggtctcgatcacctcgggcggcgtgcccttcggcgcggagatgccgtagaagccgaccgattcgaagcccggcacggtctcggcgatcgcgggcacgtcgggcacgctcggccagcgcttcggcgaggtcaccccgagggcgcggacgttgccgcccttcacctgctccatcgccgagggcaggttgtcgaagatcagctgcaccttgttggagatgatgtcggggaaggcgatggccgagccgcgatagggcacgtgcaccatgtcgcacttcgtcatcaccttgaacagctcggccgacatgtgcaccgaggtgccgttgccggacgaggcataggagatcttgccggggttggcgaggcaatagtcgatgaactccttgaccgacttcggcgggaatgcattggagacgaccagcatgttggtgagctgcatgatgctggccaccggcacggtgtcgcgcaggaagtcgaacggcagcttcttgtagagcgaggtcgagatcgcgttgttgggcgcgacgaatagcagcgtgtagccgtccggcggggcgttgaccgccgcggcggcggcgatgttgccgccggagccggtgcggttctcgacgatgacctgctggccgagccgctccgacagccactgcgccatgatccgcgccacgatgtcgacggggccgccggcggagaagccgatcagccagtggatgggacggtcgggataggcggcggaggcgggaggtgtggtgctgaaaagaaccgaaagaactgcaagtccgaaaagaccgcgacgcaacattcgcaacatgacgcctcccattgctttattgtggttggctgcatgctttcacaaaatcgggccgctgcctacaccgtcgcaagtcggtgttgacgccggcccgcgagggacgaccatgagattcgcctgtcccatcctgctcggcgcggcgctgcttgccggccccgccgccgcccaaaccggaggcacggccattccgcccgcgacgaccagccagacgatcagcctgggaacggcgacgcccggcggcggcttcccgctctacggcaatgccttcgccgaggtgatgaacgcggccgatccgctggcgaccatcgttccccgcaacaccaagggcagcagcgagaacatcccgctcctggagaagggcgagctcgatctcgcgctggtcgcgggcgagccggcctatgaggccttcgccggcatcggccgcgcgcccgtgcgcctgaagatcctcactgcgatctattccaaccccggcctgttcgtggtgcgcgccgacagtccctacaggaccatccgcgatctcgtcggccagccggtggccttcggggcgaaaggttcgggcctgccgattctggcgcgctacatgctggatggtctcggcttgaatcaggacgaggacttcaaggcggtctatctcgaccgcgccggcgatggccccgcgatggtcgaggacggccgcgtcgccgcgctctggggcgccggcatcggctggcccggctttgccgcggtggcctcgagcccggcaggcgcgcgcttcatcgcacccgatgtcgaggagatggcgcgcatccgcgccaagcacgggttcctcaagccgctgctggtgccggcgggtagctatcccaagcagaccgcgccgatcgcctcgctgggctcgtggagctttgtcctcacgcgcgaggacctgcccgacgatgtcgcctatcgcctcgcgaagacgctgcacggtgtcgagccggcgttctgccggaagctcgcccaggcctgcgagacgacggcctcgaacacgatcgcggccgcgccgaagacggagctgatccatccgggcgcgatgaaatatttccgcgaaatcggcgtggtgaagtgattatcgcgtaagcaaccgtcattccgggatggtccgaaggaccagnnnnnnnnnntgctacgcaccgccccggaatgacgatcgctttacgctatcgtcacttcttcaccagcgcacacgccgggtccggcggaccgaacgccttgtcgccggagatggtcgtgaggatcttgtaatagtcccacggatatttgctctcctccggcgtcttcacctgcaccagccagaggtcgtgcaccatcagattgtcctcgcgcagtttgccgttgcgggcgaagaaatcctcgatcggcttctcgcgcatcttggcggcgaccttgagcggatcgtcgctgccggccgccttgatggcgttgagatagtgcatcacgctggaatagacgccggcctgccacatcgacggcatcttgttcatcttggcgaaatagcgcttcgaccattcgcgggtcttgtcgtccatgtcccagtagaacgacgtggtcaggagcaggccttgcgccgcctgcaggccgaggccgtggatgtcggtgatcagcgcgagcagcgccgccatctgctggccgcccttgaacacgccgaactcggcgccggtcttgatctcgttcatgttgttggggggaccggcggcaatgccgatgatcttggccttggaggcctgcgcctgcagcacgaaggaggagaggtcgggcgttgccagcggcggccgcaccgagcccagcaccttgccgccattggcggtgacgacggcggaggcgtcgcgctccagcgaatggccgaaggcgtaatcgtcggtgatgaagaaccagctgtcgccgccgcgcttgaccaccgcatccgcggtgccgaccgcgagcgcgcgggtgtcgaacacccactggatcgcgtaaggcgagcagaacttgccgtggaaatccgcggtgccggtggagtgggtgatgaacagccgcttcttctcgttcgcgatgttctgcacggcgaggccgaccgcggagaccggcacgtcgacgatcaggtcgacctgctcgacgtcgtaccaccgccgcgccagcgaagcgccgatatcggccttgagctggtggtcgccgatcacgacgctgatcggcttgccgagcacggtgccgccgaaatcgtcgatcgccatctgcgcggcggtcaccgagccctggccggtcggcgcggaggccgggccgttcatgtcggtgagcacgccgatcttgacgacgtcgtcggacagctgcgccgacgccgcacctggaagcagtgtcgccaaggcggccgctagcggcagtccaaatctggttggattcacgtttgtcctcccctgagccggctcgttggccggtgttgcatccgggtatgcccggctgaattggtttcttttgcaactattcgggggcgggcgtcaacgtcaggccgcgaagcggatctgtcctgcggtcgagggatcgtaaccggtcagctcgtcggcgcgctggcgcagccgccgctcgttcaggaaccggagcaaggcctgcatggcaggacggaaatagctgcgctgccgcatcgcaagatcgaggttctcccaggccagcggcacgaagtcgagcccggccgagcgcgcgacggcgcgcgtcccgatgccgcaatcggcctggccgccgcgaaccagttcggcgagatccgggccggtcagggccggcgtctcgatgcggcgcaagtcccgcgtcgaggcgcccgcccgcttcagcagcacgtcgagcagcatctgcgcgcccgtgccttgttgccgcatcgccatccgggcgccgagcgcgagcacgtcggtgaggccgtgcagccgcttgggattgccctgtggcagcaccaggccctcttcgcggcgcacgaacgcgaccagcaccgcatcatgcaggtccggagcggcccgcagcgcctcgacactggcgtcgccggcgagattgttggaggcatccagactgtggaagtgcaccgccgcagccatcacctcgttgcgctgcaggcgctcgagcccgcgcgcgctgccttcactcatcgatcccaggccggagccggactcgcgcaggctccaatccaggagctcgtcctggctgccgcccacgaccggcggcggctcggcgatcagcatgccggccggacgcgagaggcccgacagcacccagaggtcgagctcgtgccgcgggaagagccactttcccgtcaccttgctgcaggggatcgcaccggttgtgacgagttcgtaaagcttgcgttcgccgagccgaagatagtcggcggcttcgctggtcgtcaggaattccatcctgcattcctatgcaaattcttgcttctttttgacgtccgacgcaggggaaattctgcatttcagattttttgcccgcgggaaccatgcccgatcatctcgccgctttgcaacatatccgcacgtgcgaattttgctttggtgaacgatctcgaaccaacgcgcgcgcgtccaccttcgcgacgttgccgagatttcccgcttgtcggcgcgacaacgcgtcacgagcgcggcgcaatcgaccatcatcatgacgcgtcacaattagggaacccgaccatgcgccgcctgtccgttgcacttgcgcttctctgcgggctcgctgcgggcgtcgcggcgtcattcgcggaggaccgcggcatagtcctcgcctcgacgacggcgacgcaggagtccggcctgctcaactatctcctgccaatcttccgcgacaagacgggcatcgatgtcactgtgatcgcgcggcgcgccgacgaagtgctcgacggtgcgcgacgaggcgaagtcgacgtcgtgctgatgcacgcgcggccccaggaggagaaattcgtcgccgacgggtttgccgtgaagcgctacgacgtcatgtacaacgactatgtgctgatcgggccgaagagcgatcctgccggtgtgaagggcaaggacatcgcgacggcgatgaaggctatcgaagccaagggcgcgccgttcgtcacgcgcggcgatcggtcgggcacccacgccgcagaactcgcgctgtggatcgtcgccgggatcgatatcaccgcggccaagggcccctggtatcgcgaggtcgggccgggcatggcctccgcgctcgatgcggcgcgtgctgcgaaagcctatgtgttgtcggatcgcggcagctggatcgcgttcaaagatcgcggcgatctcgacgtcctcgtggagggcgacaggcggctgctcaaccagtacggcgtgatgctggtgaaccccgcgaagtttccgaacgtgaagaaagacctcgcgcagaccttcatcgactggctgacgtcgcctgagggacagacggcgatcgccgcttacaaggtcgaggggcagcagctgttcttccccaattcggacaggtcgggcggctgacgtccgcatcgccgacggttgccaaaccgggcgatgcatgatccatcatggcacatgacccagcgcctgccgccctcgctcacgccgctcgacaccgcgctcgcggcattgctgcaaagcgttgatgctgtcgcaccggtagaagtgccgctggcagacgcgatcggttgcatcgctgcgggcacgccgccgattgcagcttatccttcgcacggcatcgcggcggcggacggctgggcgctatccgccaacgatctcgtcggcgcgtcctcctattcgccgttgccactgacgatggcccctgcatgggtcgaggtcggcgatgcgatgccgatgggatgcgactgcgtgctcgatgccggcgcgatcgagctgtcggggccgcttcctcaggtgctggcagagggcgtgccgggacagggcgtcaggcgcgccggaagcgacatccccgaatgcacgccagcggccgccgaaggcgatccgatcggtgctgctgatctgctgattgcgagcgtggcgggtctggagaaactcggcgtgcggcggccccggttgcgcatcgtcaacgtgcccggcgcaacggcaacgatggacatgatcgccgggatggcgcgcgcagcggggttggaggtggacacctgccaaacgcgtgcacgcggtgaagcatcgattgccgatgcgcttgatgtgtcctcttgcgatctcctgctgacgatcggcggcagcggcgtcggccgccaggatgccgccatcacggcgctggcgcagcgcggcgcggtgatggcgcacggcctcgccctccagcccggccgcactgccgcggtcggacggctcggccaggtgcccgtcgtcgccttgcccggctcccccgatcatgcgcttgcggtgtggctggcgctcgtgctgccgctcgtggatcgtctgtcggcgcgtcgtcgccacccgcaagtgtccctgccgctcgcgcgaaagatcgcatccgtcgtcggcatcgcagagattgctttgctggcggaggaacatcgtgcctgggtgccgcttgccgtgggcgactggccccttcaagccatcgcccgtgcggacgcatggctgctgatcccggccagccacgagggatttgcggcgggtacgccggtcgatgcccatctcatgcggacatgatatgggtcctggcatgacgatgatcccgaaatcaccagaccgcagcgcgctcgaacaggagcagttcctcaccatcctgtcgcgcgaggaggcgctggcgcgcttcgaggcggcgttgttcccgcgagcgctcctcagcgaaagccgcaagctcgctgctgcgctcggcgcagccctcgccgaagacatcacggcgccgatcgacgtgccgccattcgaccgctccaacgtcgacggttttgccgtgcgctccgccgaccttgcggcggccggcgagggcgcgcccgtgcgcctcgcgccgaatggcgagaccgtccattgcggcaccgcgccgacgctgcaggtggcgccggggaccgcgaccccgatcgccaccggcggtccgctgccgcggggcgccgatgccgtggtcatggtggaacacacccagccggatggaccggatgcgatcgaggtgcgtcgcgcggtttcgccgggacaattcatctcgtatgccgtcttctgcttgaaaaaaaaaagggcgctgctgcgtgccggcaccatcatcggctcgcgcgagatcggcatgctcgcggcttgcggcattgccgaggtgggtgtcgcgcgcaagccgcgggttgccgtgatctccaccggcgacgaactggttcagcccggccaatcgctcggggctgccgacatctacgataccaacggcgccattgtcgccgccgccatcgacgagaatggcggtgaagcggtcttcctcggtgccattcccgatgacgaagcaaagctcgaaccggccatgcgccgcgcccttgcggactgcgacatgctcgtgctgtcgggcggcacctcgaaaggcgcgggcgatctctcccatcgcatcatcggccggctcggcgcgcccggcatcatcgcgcatggcgttgcgctcaagcccggcaagccgctgtgccttgcggtgtgcgatggcaagccggtggtgatcctgccgggcttcccgacctcggcgatgttcaccttccatgacatgatcgtgccggtgctgcgcaggatggccggacagccgccgcgcaccgacgccaaggtgaaggcgacggtgccggtccgcatcgcctccgagctcggtcgcaccgaattcgtcatggtctcgctggtcgagggcaagggcggcctgatcgcctatccctccggcaaggggtctggcgcgatcacgtcttttgcgcaggccgatggattcctgcgcatcgatgccctcgccgaccagatgtcggccgggaccgagaccgaggtgacgctcttcacgccgcatgtgcgcgtgcccgatctcgtcatcgtcggcagccattgcactggtctcgacctcgtgaccgcacagcttgcacatgccggcctgaccgtgcgctcgattgcggtcggcagcctcggaggattggcggcagcaaagcgtggcgagtgcgatttcgcgccgatccatctgttcgacgatcgaagtgagatctacaacgcgccttatctcgtcgaggggctcaagctcgtgccggggtggcggcggatgcagggcattgtcttccgcaagggcgatacgcgcttcgagggcctgaacgcgaaggaagcggttgcctcggcactcgctgaccgcacctgcatcatggtcaaccgcaaccagggcgccggcactcgcatcctgatcgaccgcctgctcggcggtgcgcgtccggagggctactggaaccagcctcgttcgcacaatgcggttgcggcggccgtggcgcagcaccgcgccgactggggcatgaccatcgcgccggtcgcccacgcagtcggactcggcttcatccccttcgcggaagagcattacgacttcgcgttggtgacggctcgcaaggaccgctcggcggtgcaggcctttctcgacgcgcttggctcggacgcggcgcgcgccgcactcgagcgcgcgggtttccggcccgcatagataccagtttggtctgcggccaggacgcctggtcggtgacgctggcagcctgggcggcgacgtcatgaagttgtgtgaccgctgtcgcgaccaagcagcatgagccaagtcatgagcgcgcccacaccgctcaatttccgcaggatcgctgcactcgttgccgcgacgggtacgctgttctggctctacaccttctactacattgcgaatgtcccgcccggggacggcaccggctttcaatggctcgcggttttcccgctcggcattgtcttcggcctgttcttcctgccggcctggctgctggtcgcgatcggccggttgccgcgattcaccaccatcgtcggcctctctggcctgatcgccttcgcgatcatctgggcgcagctcctcaacgagttcgcgaagtcctgagatcgctaggatgcatcgtccagtgctgccagccgttcagcatcggcaatgtcctcgaccgtgttggcattgaagaacggatcgagcggctcggccggccacgtcacggtcgcgagcggatagcgcgcggtccaccgatcgatcttgcggagatcttcgacgaccagggcctggcgcaactcctcgcgcaaggcgactcgccacagcccgatcaccggatgcgactgatcgcctgatgctgctaccgcgagctgcgcgttctcgcgcgcacgcgcctcatgcagtcgcgccacgagatcgcggggcaggaacgggcaatcgccggcggcgctgagcacccattcggtctccggtcggttcgccgcggtccagtccagcgccgcgagaatgccggcgagcgggcccggaaagccgggcacatcgtcggcgaccacctgcaagccgaacgcggcgaaacgtgcgggatcgccgttcgcgttgaggatcagcccactgcactggggcgacagccgcgcaatcacgcgctccagaatggtgcggccgccgatggtgcgcatcggcttgtcgccgccacccatgcgccgggcgaggccgccggcgagcagcacgccgacagtcggcggaacactcgtcctccccggcaattcagtcgtcaccaccttcacccttgcgcttgtgcttggccgactcctcctcgacataagcgaggttctgatcgtaaacgatgcgctcctcgcccgcgagtgcgatgaagcgcttgccgcgggtgcgtcccaccagcgtcagtccgacctgccttgcgagatcgacaccccaggcggtgaagccggagcgcgacaccagaatcgggattcccatgcggacggtcttgatcaccatctccgaggtgaggcgcccagtggtgtagaggatcttgtcgccgggatcgacgccgtggcgatacatccagcccgcgatcttgtcgaccgcgttgtggcggccgacgtcctcggtgtagcagagcgggaccccttcctggcacagcacgcagccatggatcgcgccggcctccaggtagagagaaggcatggtgttgatggtctgcgtcatctggtagagccaggaggtgcgcagctccgccctgggtaacgcgacgctctcgaccgcctccagcaaatcgccgaaagcggtgccctgcgcgcagcccgaggtctgcgtgcgcttcttcagcttggcctcgaagttggtgtgatgctcggtgcgcacgacgacgacctggaggtcgtcgtcatattcgacctcggtgaccacgtcgttgtatttcagcatgttctggttcagcaggtagccgagcgccagatattccggatagtcgccgatcgtcatcattgtgacgatctcctgggcgttcaggtagagcgtcagcggtcgctccatcggaaccttgatctcgaccgtggcgccggtctggtcggtcccggtcacgctctgggtcaggcgtgggtcgtccgggttggggacgatcagcggcacgggggctttgtcgatcttcatcatggccgagaggttagcatgacattcggtcgaggccgatatatgcatggcggcgagagagcgaaatgccgccttgccgtcattgcgagcgcagcgaagcaatctaggaacgccccccagatccaatctggattgcttcgctacgctcgcaatgacggtggagagagcggttccacaagggccggatcgcgtgcccagacggagctggaatgaaagtcatcggccttgcaggctggagcggtgcgggcaagacgacgctgttgacgcggctgattccgcttttcaacgcgcaaggtttgcgcgtctcggtcatcaagcatgcgcatcaccggttcgacgtcgatgtgcccggcaaggattcctggcgccatcgcgaggccggagccgcggaggtgctggttgcctcgtcgaaccgctgggccctgatgcacgagttgcgcggggcggcggagccgcggctgccggagctgctcggcaagctgtctgcggtcgatctcgtcgtggtcgagggtttcaagcgcgagccgcatcgcaagatcgaggtgcatcgcgccgcaaacggcaagccgctgctgttccccgaggataccgggattgccggcattgcgagcgacgtcgcgattgacacaagcctcccgactgtccatctcgacgatgtcgcgggcgccgccgcattgatgctgcgcgcggcgatgccggtcgaggaagcagtggcgaaaagcgcggcgatgcgctgacgaggcaccatggcgcaactgtcggacgattgctttgcctttggcggaccgatgatgtcggtcgacgacgcagtcggcttgatcacgacgcgcgtcaacgcaatcgcggatctcgaaacggttgcgctcgtcgatgcggacggacgcgtgctcgcgcgcgatgtggcagcacctttgccgctgccgcccttcaccaactccgccgtcgacggctatgccgtccgcaacgcagatcttccgaaaagcacggagcaatcgttcccgctcgatggccggatccaggccggcggccgcgcacaggcgccgatcaagcccggccacacggcgcgcatcttcaccggcgcgccgatgccgccggatgcggagaccgtcttcatgcaggaggatgtccgcgtcgatgagtccggcaagatcgtgctgccgccggggctgaagcctggcgccaatgtccgtccggcgggtgaggatattgcgcaaggtcacgtcgcgcttcgtggcgggcagcgtttgcggccccagcatgtcgcgcttgccgccgcattcggcctgacaaggctcgacgtcgtcaggcgcatccgagttgccgtgttctcgaccggcgacgaactggcttcgcccggcgaggcgcgcgcagcctcgcagctgttcgattccaaccgcttcatgctggtggcgatgctgcgccggctcggctgcgaggtcagcgatctcggcatcctgcgcgacgagcgcgcctcgctcgcgagcggcctgaagcaggtcgcaggccgccacgacctgatcctcacgaccggcggcgtctcgaccggtgaggaggatcatgtcaaggcggcggtcgagagcatcggctcgctggtgctgtggcggatggcgatcaagcccgggcggcccgtggcgatggggatcgtcgacggcacaccgctgatcggattgcccgggaatcccgtcgcgagcttcgtcaccttcgtgcatgtggtgcggccgacggtgctggcccttgcgggtagtctgccggagccgctcttgcccatcccggtgcgcgcggcgtttgcttacaagaagaaggcggggcggcgcgagtatgtgcgcgcttcgttgcggcgcgcgcaggacggccggctcgaggcgatcaagttcccgcgcgagggggccgggctgctgtcctcgctggtcgagaccgacggtctcgtcgcgctcggtgaggacatcacgaatgtggagccggggcaggacgtgggcttcttgtcctatgccgacctgctctagaggcactccgttgacgccatcgcttcgtcccgccatgttgcggccatgacccgaacgaccctcgatctcaccgggcttaagtgcccgttgccggccctcaagacgcgcaaggcgctcaagcctttgcagccgggcgatcagctcgaggttcactgcaccgatcccttgtcggtcattgacattccgaacctgatccgagagaccggcgacaaggtcgaaattaccgagcgcaacgaggcgcgcatcgtgttcctggtcgaaaagggcggcgccttgtagaaaggcgaatgttcacgacggcgtggtttgactatgctgcgcctgcggcggaaacggccggagccttcgctgcaatgcgaaagcgcgccgattgttgcggtagatgatctcaaacccaagttctcgaacctaagacatcgggcatgactttctcaacatcgagggcagccgcaagtcccgcggggagccgcgagcccgccatcaagctcggcaagacggctgcagggccggagttcagtgccctggcgcaagcctcgatcctgatcgtcgacgacgagccgggcatgcgcaatttcctgatgcgcacgcttgccccgcgctgcaagctggtggacgatgcggccgatactgaccaggcctcgcgcaagctcgattccaatcggtacgacgtcgtcattctcgacaacatcatgcccggcaagaatggcgtcgactggctcgccgagcagcgcgccgtgggctttttcgctgacgccatcctgatcaccgcctatgccgacctcgacaccgcgatccaggccctgcgcgccggtgcggccgatttcgtgctgaagccgttccgctccaaccagattctcaacgccgtggcacggtgcctcgaccgcgtccgcctccagcgcgagaattatgtcctgcgctatgctttgcgtgcctcgtccgaccgcaccttgctgcgcgacaatctgattggacagtcggcagcgacgctgcgcgtgcgcgagaccatcgcgcgcgtcgcgcgcctgccgacctcggttctgctcaccggtgaatccggcaccggcaaggaagtggcggcgcgctcgatccactcgttgtccgaccgcgccgacaagccgttcgtgcccgtcaattgcgcggctatcccgcccgagatgatcgaggccgagctgttcggacacatcaagggcgccttcaccggcgccgattcggggcgcgagggcctgttcctgtatgcgcatggcggcacgctgttcctagacgagatcggagagctgccgctgccgatgcaaagcaagctgctccgcgtgctcgaggatcgccgcgtccgtccggtcggctccgagcgtgaagtgccggtcgacctgcgcttcatcttcgcaaccaatgccgagctccagaaggaggtcgaaaagggccgtttccgagccgatctgttctaccggctcaacgtgatgcagatccgcctgccgctgctgaaggatcgcggcgacgacgtgcaggagcttgccaccatcttcatgagcaagctgtccgtgcagctcggcatgccgccggtgccgatcgacgcctcggtgcgggcggcgctcgtcagctacgactggcccggcaatgtgcgggagctgcgcaatctgatcgagcggacgctcatcctcggcgccttccccgacgatttcgccggtccccgcaacgacacgcagccggcgcccgccgacagtcttgcggagctcgagcgccgtcacattctcggcgtgctgaaggaggtcaacggcaatcgcgaggaggcggcccggcgcctcggtatctcgcgcaagaccatcgaccgcaaatgcgcgttgtgggatgcctgaagccgccggccgcagcgccgaactggtgcgggggcgctccgtccgctttcgcctgctcgcgatcgcgctgctgccgatgctggtcatcctgccgctcctgctcggcgttgcgatctatcgctggaacgcgaaattcgatgcgaccctgatctccaaggtgaacggcgatctcaccatcgctcaccaatatctcgcccgcatcctggaaaagaccggcgtacagatccgggcgctcagcctgtcggcccgcttccacgaggtgctggcgtcggatgcgcgcggccccctgcaggatctgctcgacgaggcccgcaaggagatcggtctcgattttctgtatctgaccaacggtcgcggggacgtcctggcagcatcgccgccgctacagcatcggccgagaagtgactggccgatcatcaagtcggcactgtcgggcgaggtccccgcgaccggggtcgacattttcgacaatgacgagctcgccgcaatttcgcccgtcctggccgagcgcgcgcgattggacatcgtgccgacgccgaacgcggtgccgaccgaccgcagcaccgagacgcgcgggatggtcgtgcatgcggcgagccgggcgatgttgcccgacggcggcgccgctgcgctggtcggcggcacactgctcaatcagaatctcgaattcatcgacacgatcaacgatctcgtctatcgcgcggcgagcctgcctgagggcagtcagggcaccgcgacgctgttcctggacgacgtgcggatatcgaccaacgtccgtctgttcgagggacggcgcgcgctcggcacccgcgtctcggcggcggtgcgctcggccgtgctgggcgaggggcggacctggctcgacagcgctttcgtggtcaacgactggtacatctccgcctacgagccgctggtcgacagttacggcaagcgggtcggcatgctctatgtcggcttcctggagaagccgttcagcgaagccaagtaccagacattggtgatcatcgtcgcagcgttcgtcgccatcacggccgcgaccgtgccgatcttcctgcgctgggcgtcctccatcttcatgccgctggagcgcgtcacggcgacgatctccgaggtggagcgtggcaacctctccgcccggaccaagatgccggtgtcgggtgacgagatcggtcgcgtcgccgtccatctcgacagcctgctcgaccagatccaggaacgcgaccggcagctccgggaatggaatgaggagctgaacgtccgcgtgcgggagcgcacccgcgacctcgagcacgccaatctcaagctcgaggcgaccaccaagcagctcatcatgtccgagaagctggctgcgatcggggaggtcactgccggcgttgcgcacgagatcaacaacccgatcgcggtgatgcaggggaatctcgacgtcatccgcagcgtgttcggtgccgatgccgacaaggcgaaggtcgagtttcgcctgctggacgagcagatccatcgcatcagccagatcgtgaccaagctgctgcagttcgcaaggccggaggaatatgccggctacgtcgagcgccatgcgccagccagcgtgatctccgactgtctgccgctggtgcagcatcttctgaacaagaccgagatcgccgtggtcagggacgaccgcgccagccggctcgtgctgatgaaccgcaacgagttgcagcaggtcctgatcaatctcatcgtcaacgcgattcacgccatgccggacggcggaaccctgacgctccgctctttcgatgccgagcgcgacggccatccgggcgtcgccatggcggttgccgacaccggcatcgggatgagcaccgaggtgatcgagaagatcttcgatcccttctacacgacgaaacggcggcaaggcaccgggctcggactctccatcagccagacgctgatcgagcgacagggcggccagatcaccgccgaaagccgcgtcggcctcggaagcacgttcacggtctggctgccggaagcctcctgattggacattttgtccgatgaggtccggacattctgtccggcgcagcacattgcgctgcgggaagtcgttgaatcgtcacgatgcgacttctggcacgcgcgttgctcatctcgggacaaggtgtagagggggatgagggcgcgagagcacgactgcaacgctgctggcgaggcgaagggatgtcgccgcgatcagctgcttgctcggcgcacatgacgcgagcgcgcctgcgcattccgcttcgacgcgaaatccgacctgtcatgcgcggctgccgagcacgcatggccggtctcaaatcggtgtgccggcaaggccgcacttgggagggaatgcttatgacgaccgctgataccgttcttgcaccggttggtgctcccggtttgctcgatcgtgaacgcacgatcgcgaccgccggtttcaatcgctggctggtgccgcctgcggcgctgtgcatccatctgtgcatcggcatggcctacggcttctcggtcttctggctgccgctgtcgcgcgcgatcggcgtgaccgcgccgaaggcatgtccggacatgtcgctggtccaggagctgtttacgaccacctgcgactggcgggtcgccagcatgggctggatgtacacgctgttcttcgtgctgctcggcatcgcggctgcggtctggggcggctggctggagcgcgtcggcccgcgcaaggccggcttcgtctcggcgctgtgctggtgcggcggtctcttcctcggcgcgatcggcatctacacccatcagctctggctgctgtggctggggtcgggcgtgatcggcggcatcggtctcggcctcggctatatctcgccggtgtcgacgctcgtgaaatggtttccggaccgtcgcggcatggcgaccggcatggccatcatgggcttcggcggcggcgccatgatcggcgcgccattggcgaacctcctgatgaactatttcaagagtccgagctcggtcggcgtctgggagaccttcgtcgcgatgggcgtcatctacttcgtgttcatgatgatcggcgcattccgctatcgcctgccgccggcgggctggcagcccgagggctggaccccgccgtccaaggccaacgcgatgatctcgaagaacaacgtccatcttaatgatgcgcacaagacgccgcagttctggctgatctggtgggtcctgtgcctgaacgtgtcggctggcatcggcgtgatcggcatggcctcgccgatgctgcaggagatcttcggcggcaagctgatcggcctgccggacgtaggcttcaatgcgcttgatgcaggacagaaggcgcagatcgcagcgatcgctgcgggcttcgccgggttgctctcgctgttcaatatcggcggccgcttcttctgggcctcgctgtcggacaagatcggacgcaagaacacctactacacgttcttcatcctcggcatcgtgctgtatgcgctggcgccgaccttcgcggcgatgggctcgaagctgctgttcgtggtcggtttcggcatcatcctgtcgatgtatggcggcggctttgcgaccgtgccggcctatcttgccgacatgttcggcacccagttcgtcggcgccatccacggccggctgctgacggcgtggtcgaccgcgggcatcattggtcccgtggttgtgaactacatccgcgagttccagcttgcggccggcgtgccgcgcgaccagctctacaacacgacgatgtacattctctgcgccatgctgatcgccggcctgatctgcaactatctgatcaagccggtcgactcgaaatggcacatgaaggacgccgacgttgccaagctgcaggcggcgagcgccagcgcagcagccgcgggaccgcacggctcctacggcatcggctttggcgggctcgatgccaaggcggcgctgttctgggccttcgtcggcattcccctggcctggggtgtgtggaagacgctggagagcgcgatcaagatcttctgatcgcgcattcaccgcgggagagcaccatccgcgcttccgcctagcttggggcgggagcgcgatttgatttcgctatcgcagcataggacgcctttattgatctccggactaattcaggcttccttctgtcagtcggcgtgtcggaccaacgcaagacgtgtccgcgcgcgctccaggggtgcgttgctgcgctcaactgcttccgccagcatgataacctgcttggcatctggcatgccagaagctagaactgcagtcgttctagaaagagacgagatcgggaccaatcgatgagccacgacgtgcatgaggtccgcccgttcgagcatccgggcgaggggcgccggcgcgccaaggccacccctaaagggcgccagattgatccgaccgccgcgcacgagatcgagcttctgcttggcgacaggccgcggcgtcgcgatctcctgatcgaatatctccacctgatccaggacaagtaccgccagatctcggctgcgcatctggccgcgctcgccgacgagatgaagctctcatttgcagaggtgttcgagacggcaaccttctacgcgcatttcgacgtggtgaaggaaggcgagccggacatcccgccgctgacgatccgcgtctgcgattcgctgacctgcgcgatgcttggcggcgagaagctgctcgaggatctgcagagcgcgtccgggcctggcatccgcgtcgtgcgcgcgccctgcgtcggccgttgtgataccgcgcccacggcagaggtcggtcacaacttcgtcgaccatgccaccgtcgccaatgtgataaaggcggccaaggccggcgacactcacgcgcatctgcctgaatataccggctatgaggcctatgtcgccgccggcggctacaggctcctcgatcgcgtacgctcgggcgagctgtcgaaggacgatctcctgaaggcgctcgacgacgcttcgctgcgcggactcggcggcgcgggctttcccacagggcgcaaatggcgcgccgtgctcggcgagccagggccgcggctgatggcgatcaacggcgatgagggcgagcccggcacgttcaaggaccgtcattacctcgaaaccgatccgcatcgcttcatcgagggcatgctgatcggcgcgcatgtcgtgcaggcctccgatgtctacatctatcttcgcgacgaatatccggcctcgcgcgagattctccagcgcgagatcgcaaagctgccgccgggcgggccgacgctgcacctgcggcgcggtgccggcgcttacatctgcggtgaggaatcctcgctgctggagagcatcgagggcaagcgcggcctgcccaggcacaagccaccttatccgttccaggtcggcctgttcgggctgccgacgctcatcaacaatatcgagacgctgtggtgggtgcgcgacatcgtcgagaagggcgccgaatggtggaggggccatggtcgccacgagcgtcatggtctccgcagcttctcggtctcgggacgcgtgaaggatcccggcatgaagctcgcccccgccggcatcaccgtacgcgagctgatcgacgaatattgcggcggcatggccgacggccatcagttctacgcctatcttccgggcggtgcgtccggcggcatcctgccggcgtcgatggacgacattccgctcgatttcggcacgctggagaaatacggctgcttcatcggatcggcggcgatcgtgatcctgtctcagaaggacagcgtgcgcgcagcggcgctgaacctgatgaagttcttcgaggacgagagctgcggccaatgcactccgtgccgcgtcggaacgcaaaaggcggcgctgctgatgcagaagccggtctggaaccgtgccttgctggaagaattgagccaggcgatgcgcgatgcctcgatctgcgggctcggacaggcggcatcgaatccgctctcatccgtgatcaaatatttccctgacgagttcaaggaagcggccgaatgaccaagattacgttcgagctcgacggcaagcaggtcgaggccaatcccggcgaaacgatctggcaggttgcaaaacgccaggggcgggagattccgcatctgtgctattcgccggcgccggactatcgccccgacggcaattgccgcgcctgcatggtcgagatcgagggcgagcgggtgctggcggcgtcctgcaagcgcacgccatcggtcggcatgaaggtgaagaccgagtcggcgcgtgcagtgtccgcgcagaagatggtgatggagctgctggtcgccgaccagccggcgcgcgagacctcgcacgatccagactcgaagttctggcattgggccgaaacgacaggcatcaccgagagccgcttccccgccgccgagcggtggacgaccgacgccagccatccggcgatgcgcgtcaatctcgatgcctgcatccagtgcggcctgtgcgtgcgcgcctgtcgcgaggtccaggtcaacgacgtcatcggcatggcctatcgtaaccacggcgcaaaggtcgtgttcgacttcgacgaccccatgggcgagtccacctgcgtcgcctgcggcgagtgcgtgcaggcctgtccgaccggcgccttgatgccggccgtgatgctggacgacaagcagacccgcgtcacctttcccgacaggaaggtcgattcgctctgcccgttctgcggcgtcggctgccaggtcacctacgacgtcaaggacgagaaggtgatctacgccgagggccgcgacggccccgccaatcacaatcggctttgtgtgaagggccgcttcggcttcgactacatccatcatccgcatcgtctcaccaggccgctggtgcggctgccgaatgcgaagaaggatgccaatgaccaggtcgacccggccaatccgttcacgcatttccgcgaagcgagctgggaggaagcgctcgatatcgccgccaaggggctcgtcaagatccgcgacgagaacggcgtgaaggcgctcgccggcttcggctcggccaagggctccaacgaagaggcctatttgttccagaagctggtgcgcaccggcttcggctcgaacaatgtcgaccactgcacgcggctgtgccacgcctcgtcggtggcggcgctgttcgaaggcctgagctcgggcgcggtgtcggcgccgtttgccgcggcgatggatgccgaagtcatcatcgtgatcggcgccaatccgaccgtgaaccatccggttgcggcgaccttcatcaaaaacgctgtcaagcagaatggcgcaaaactgttcgtgatggatccgcgccggcagacgctgtcgcgccacgccaccaagcatctgcagttcaagcctggctccgacgtcgccatgctcaacgcgatgatcaatacgattatcaccgagggtctgaccgacgaccagtacattgccggctacaccgaagggttcgacgagctcaaggagaagatcaaggagttcacgccggagaagatggaggcgatctgcggtatcccggcgcagaccctgcgcgaggtggcgcggacctatgcccgcgcaaagtcgtccatcatcttctggggcatgggcatcagccagcacgtccacggcaccgacaatgcgcgctgcctgatcgcgctggcgttgatcaccggccaggtcggccgtcccggcaccggcctgcatccgctgcgtggccagaacaacgtgcagggcgcctccgatgccggcctgatcccgatgttcctgccggactatcagccggtcgggcgcgacgacatgcgcagcaatttcgagaagctctggctgcaggatctcgatcccgtccgcggcctgaccgtggtcgagatcatgaatgcgatccacgccggcgagatcaagggcatgtatatcgagggcgagaaccccgcgatgtccgacccggatctccagcatgcgcgtcaggcgctggcgatgctcgatcacctcgtggtgcaggatctcttcgtcaccgagaccgcgttccatgccgacgtgatcctgccggcgtccgccttcgcggagaaggacggctccttcaccaacaccgaccgccgcgtgcaactcgcacgccaggtggtcaagccgcccggtgatgcgcggcaggatctctggatcatccaggagatcggcaagcgcatgggcttgccatggaattattccgggcccggcgacgtcttcaccgagatggcgcaactgatgccgtcgctcaagaacatcacctgggaacgtctcgtgcgcgaaggcgcggtcacctaccccgtcgacgatccggacaagcccggcaacgagatcatcttcaccaccggcttcccgaccgcgaacggccggggcaagatcgtgccggccaaggtgatcccgccggacgagattccggacgatgaatatccgatggtgctgtcgaccggccgggtgctggagcactggcacaccggctcgatgacgcgccgcgcacaggtgctcgaccagatcgagcccgaggcggtcgcgttcatgtcgccaaaggacatgcgcaagaagaggctgatgccgggcgacttcatccgcctggagacgcgccgcggcgcggtcgaggtcaaggtccgctccgaccgtgatgtgccggagaacatggtgttcatgccgttctgctatgcggaggcggccgcgaacctgctgaccaacccggcgctcgatccgtttggcaagatcccggagttcaagttctgcgcggcgcgggctgagcgcgccgagatgcgggacgcggcggagtaggggacgccggaggtgtgaccctcgtctgcgcccacaccgtcattgcgagcgtagcgaagcaatcnnnnnnnnnncgcggtgggatcctggattgcttcgccgtttcgctcctcgcagtgtcggtggtagatatggcccatgtccagggtcaccccagccacgcgagcgctcaccgccgccggtgtcgccttcaccatccacgcctacgactacgatcccgacgccgagagcatcgggctgcaagctgcatcagcactcggtgaggatcccgcgcgcgtcctgaagacgctgatggcgcaggtagacggcaagccggtctgcgtggtcgtgccgtccgaccgtgaagtctcgatgaagaagctcgccgccgccatggccggcaagtcggcgcagatgatgaagccgcccgaggcggaacgcgtcaccggctacaaggtcggtggcatcagcccgttcgggcagcgtaagcccgcgcgcaccgtgatcgagcggagtgcgctcgcgcatgacatggtctatctcaatggcggtcaacgcggcttgcaggtgcggctgaagccggccgatgctcggggcgtcctcaacgcggtcgtggcggatgtgctggcgtgagcgggatggagcggggtcatgaggcggttgcttctgccgtggcttgcggtcctgctcggcatctgtgtcccggctgaggcgcatcaggtcaacctcgtcacggcgcgcgtggcgttgagccccgatcgcgcggtcagcatcgaacttggactgaagggcagcgatgtcgatcgcctgatcggtttgcgtacgtacgaccccaggcaagacgcggtcgatcccgccgcggtcgaagcagccaaatccgccatcctcgcctatatgagcacgcacctagctgtcacgggcggtgccaagccctgtgcggccggagatgcggcgatcctggccgacggcgacggcatcatctatcgcaacggctttgcctgcgctgatgccgccggcgacatcgtctatcgttcgaccgtgttgaccgataaggatccggccgcacgtcaaatcgtactgattgcgcaaggccggtcggaggcgcaggccttgctcgatgcaggcaacacgacagtcacgctttcagccgcgccgccgtcgctgctgtcgacgatgcagcgctatgtcctcaccgggatcgaacacatctttctcggctacgatcacgtcgcatttctggttgccgtggtgctgtgggcaagacggctcattcctgtggtcaagatcgtgactgccttcaccatcgcccattcgatcaccttgtcgctcgccgcacttgacgttctcgtcatcccgagccgcatcgtggagcccgcaatcgcagcctcgatcgtcttcgtcgccgtggagaacttcttctcgcgcgacgtcgacaagcgttggcgcgcggcgtttctgttcggactgatccacggcttcggcttcgccggcgtgcttcgcgagatcgggctgccgccgaacgcagcggcgacggcgcttgccgctttcaatatcggcgtcgaaatcggacaggttgccatcgttgcgatcgcgttgccgatcctccgtttggccgaccgacccagccttgaagaccgttccgaaccggtgagggcgccggcgctggtctacgcgctgtccgcgatcatcggcgtgcttggcggctattggttgcttgcgcgcgtcttcgaggcctaatctcgagccgacaactcccgagacagccctcctgttgaagcccctcgcgacggcatgcggctccttgagcatcacacccacttgagttcgggcgggaggcctgtatagaactagaatataaatagaatgacgttctgtacagcagaataagggaggcgagacgatggaatcgagactggttcgtcacgacaccgatccggtgccgttcgcgccggacgccgtcatcgcagccttcaagacgatcccggacttgctggcacacgacgctgatttgaccgtccgcggacgctggctcgacgtcgactgcctgctcggcccgagcacccagccatttcacgtcgccatccgcgccgggcagatcgtggatatgacgccggcacctgtcctgatgcgcacctggcggttcgcctatcgtgcgacgccggctgcacttgctgcccattggcagcagatgccaccggccggctggcatgacctgctcgcgctgaccaagcgcggacaggcgacccttgaaggggatctgcatcccttcatgacgcatcttcagtatttcaaggatctgctggcgttgccccggcggagcggtttcggaggtgcgtcatgaacggcttcatcgagccgatcgtcgggcgctacgtgcacgtcgaaatcaatggagagatcaaccggatctatttcgaggagaacggcagcggcattcccttggtctgcctccacaccgccggttctgacgcgcggcaatggcgccacttgctgaccgatcccgagttcaccggacatttccgcgtcgtcgccttcgacatgccttggcacggcaagtccaatccgcctgacagccaatatggcaccgagtatcggctgaccaccgcgagctacacggcaaccatccgcgcgttctgcaacgcgctgaagctggagcgcccggtggtgatggggtgctcgatcggcggccgtatcgtgctcaatctggccatcgagcatgcgcgcgagtttcgcgcattgatcgggctggaggccgcggacttccagcaaccctggtacgacacggcttggctgaaccggcccgacgttcatggcggcgaggtctgcgccgcgctggtctccgggctgatcgcgcccaacggcccggaagcctcgcgcgacgagacgctgtggggctacaagcagggtggccccggcatcttcaagggcgatctctatttctatcgcgtcgacggcgatctgcgcgggcgcacctctgacatcgacgtcaaccagtgcccgctttatctcctcaccggcgagtacgatttctcctgcacgccggaagacacgctgcgcaccgccgccggcattcccggtgccaaggcgacggtgatggagcggctcggccactttccgatgagtgagaacccggaacagttccggcgctacatcgcgccggtgctgcaagacatcctcgataagcagaattattgaaagggagcgtagttatgaagttgcgttggatgatggcggcgattctggccgcacaagcgagcactgcgtttgcagccgacaatgtgatcaggattggcgtgctcaacgaccagtcgggcgtgttcgccgacaatggcgggcgcggctcggtggtcgctgcaaagctcgccgcagaggacttcggcaacgagctgctcggcaagaagatcgagatcatttcggccgaccatcagaacaagcccgacatcgcatcggccaccgcgcgcaaatggttcgacaatgaaggcgtcgacatgattgcggacggcgcggcctcgtcggccggctttgccatcctcgaagttgcgaaacagaagaacaagatcttcgtcatctctggccccggctcgtccgacttcaccgggaaatcctgctcgccggtcagcttccacttcaactacgacacctacgcgctgtccaagctcaccagtgacgcgatcacgcgggccggcggcaaaacctggtacttcgtgacggccgactacgctttcggccacgcgcttcaacgcgatgccacgaaattcatcgaggccgcgggcggcaaggtgatcggctcggccgcccatccgctcggcaccgctgattttgcgtccttcctgttgcaggcgcagggctcgaaggccgacgttgttgggcttgcgacgtcgggcgcagacgtgcagaccgctatcaagcaggctggtgaattcggtatcgtcgagggtggccagaagctcgctggtctgctcgttttcatcacggacgtgaactcgctgggcctgaaggtcacccaaggcttgcaggtgacgacctcgttctattgggacctcaacgagcagacccgtgcctggtcgaagcgctacgccgcgcagatggacggcaaggtcgccagcatggtgcaggccggcgtctatagcggcgtccaccactacctttcagccgttaaggcagccggtaccaccgatgcgaccgccgttgccgccaagatgcacgagctgaaggtcaatgatatgtacaacaaggacgttgcgatccgcccggacggacgcgtgctgcataccatgttcctggtgcaggtgaagaaaccggaggagtccaagtataagttcgactattaccgggtcgtcagctccaagccgggcgaagaagtgttccgcccgatgagcgaaggcggctgcccgctggtgaagtaaccgcgtcggccgggcaggctgtacctgcccggccggaagatttcgaggagagtacggaatgtctggttcgattgggttcatcggtcttggcgtcatgggcgagccgatctgccgcaacctgttgcgcaagagcggccgggcggtgctcgcgttcgaccttgccgcggagccgctggcgcggatcgtggacgacggggccacggcggcgaagtcgatcggggatctcgtcaccggcgcagagaccatcttcctgtgcctgcctagcgcgaggcacgtgatgtcggtcttcgagggcattttgccggtgatcagaaatggccagaccgtgatcgatctcggcacctccgatgtcggcctaacgcggtcgttcgccaagcagctcgctgacaagggtgcgctttggatcgacgccccgatcgcgcgcacgcgccaggctgcgcaggacggcacgctcagcgtcatggttggcgccacacccgagcactttgccagggtcgagccgttgatccggcatttcgcaacggacgtcaccctctgcggaggcaccggggccggacaggtgacgaagatcctgaacaacatggttctgttcgagaccgtcaatgcgctggcggaggcggtcgcgatcgccaagcacagcggcgtcgagccgaagctgctgctggagacgctgtccaaggggtcagcggacagctttgcgctgcgtaatcacggcatgaaggcgatcgttgccaaggattttcctctgcgggcgttctccaccgaatatgcaatgaaggacctttcctatgcgctggagcttggcgcgcaagccgggctaaatctgcgcggcgcggcgctgatgcgcaccatcttccaggagacgatcgacaagggcatgggcgatgcgtattttcccgttatcgcaaagctcatcgacccctccggatttccccaataggacacgccatgccttcgcccggcgtcgcagccgtcgaccgtgccctgagcatcctggccgccttcgaggacgcgccggagccgatgacgctcgctgagctcgcccggcgcaccaagatgtacaaaagcacgctgttgcggctgatgacgtctcttcaggaattcggctacctcgtgcagttcgccgacggtcgttaccatctcgggccgacaccgttccggctcggcgcggtctaccagcgcagcaacaatctgcatgatcgcgtggtgccgctgctgcgtcagctcgtcgccgacggcacggaaagtccatcgtatcacgtgcggcatgatgcgaagcgcaggctctgcgtcttccgggtcgattcccaacactcgacgctcgaccgcgtcgaggccggcatgctgctgccgttggaccgcggcgcggccggacggattatcctggccttcgacggggagaagggcgaggcctacgacgagattcgcgagggttgcatcgcagtgtcctttggcgagcgcgatcccgattgcgccgggcttgcctgcccggtgttcggtcctggcggcaaatgcgtcggtgccctgtcgctctcagggccgaagccgcgcttcacgcgggacaatatcaaggcgatggcgtcgctgttgctgagagccgccgtccgcctgacgcgtgcgctgggtggcccgaccgagctgctcgacagtgccttatcggcttcggctgaagatgtgcgtcccgcgcgaggggcgaggcgctagggggcctactgtttctgcagcagcttcagccggcagcgtagcgcctcgcggatatgcgcccgcgcgagctgctcggccttgtcgccgtcgcgcgccgcaatcgcggcgatgatcgcctgatgctcgctatggctggtcgaggggcgtccggtcaccgtgaaggtggtcgggccgagcagggcgatccagtcctgcaattcccgcgacgcattgtcgagatagcggttgcgcgccgcccggcagatggcttcgtgaaaagcccggttgagccttgccatctcggccttgtcggtcttggccgccgcgacgaaagcctgctcgatatccccgagcgcgtcgatctccggggtagaggcgtgctcggcagcgaggcgcgccgcggccccttccatgatctcgcgcatggcatagagctcgagcacctcggaaatgtcgagattgcgcacgatcagcccgcggccaccggctggctcgacgaagccgcgcgcggcgaggcgccccagggcttcccgcacgggcgtgcggctcacgttcagccgctgcgccacttcctcttcgcgcaatcggtcgccggcgcggtagctgccggcctgcagcgcctcgcacagcgagcggaatacggcttcgcccaatgcgacaccgccgccgcgcgcgatcgatccgcttgccttcgccggacgccttgccatggtttccccggggcgcatcctgcccatgcagagatgccggttgctccattctcgtatatctttgtatacaaacgtgcgcaatggcgggtccaggccgcctgcgggtagaatgtctccaactgcgtcgcatcgggcagacggtatgggcagcaaatacgacgtgctggtgatcggtggcggcaatgcggcgctgtgcgcggcgatcagcgccaggcgcggcggcgcctcggtgctcgtgctggaaggcgcgccgaagttctatcgcggcggcaacacccgccacacccgcaacatgcgctgcgcccatgatgccgcgaccgaaatcctgaccggcccctacaccgaggacgagttctgggaggacctgctgcgcgtcaccggcgggcagaccgacgagatgctggcgcgccacatgatccgcgagtccaaggacatcctgaactggatcgtggagcagggcgtgcgctggcagccctcgctgggcggcacgctgagcctcggccgcaccaactccttctttctcggcggtggccgcgcgatgctgaatgcgctctatctcacggcggagcggctcggcgtcgacgtcgcatacgacgccgaggtcaccgacctcgagattgaggacggcatgttcctcgcggcgcgcctcaagcggccgatcaacgggcagaccgagatccgcgccaccgcgctggttgccgcagccggcggcttcgaagccaacatcgaatggctcaagcaatattggggcgaggccgctgacaacttcctcattcgcggcacgccctataatcgcgggtcgatcctgaagattctgctcgacaagggcgtgcaggaggtcggcgatcccacccagtgccacgcggtcgcgatcgacgcccgcgcgccgaaattcgacggcggcatcatcacgcgccacgactcggtggtgttcggcatcgtcgtcaacaagcacgcgcagcgcttctacgacgagggcgaggacatctggccgaagcgctatgcgatctggggccgactggttgcggcgcagcccgaccagatcgcctatatcatcttcgactccaccgtcgtcaccagcttcatgccgacgttgtttccgccgatcgccgggcagacggttgccgaactggccggcaagctcgaactcgatccggccgcgctggaaaagaccatcaccgagttcaacgccgcagtgcggcccggcacgttcgaccacacgattctggatgactgcgtgaccgagggcatcacgccacccaagacacactgggcgcgcaagatcgagacagcgccctatctcgcctatccggtaaggccgggcatcaccttcacctatctcgggacgcgcgtgaacaaggaggcgcggatgctgatgaaggacggcaagccgtccgccaacatgttcgcggccggcgagatcatggccggcaacgtgctgggcaagggctatgcggccggaatgggcatgaccatcggcagcgtgttcgggcggatcgcgggacgggaagcggcaaaacatgcacggaactaggatcttggacgaagccgaccgtctgatgacggtctgcaattcctgccgctattgcgagggcctgtgcgcggtatttccggcgatggaaatgcgccgcgccttctctgacggcgacctcaactaccttgccaatctctgccatgcctgcggcgcctgctacgtcgactgccagttctcgccgccgcacgagttcaacgtcaatgtcccgaagacgctggctgtcgcgcgcgcggaatcctatgcggcctatgcctggcctcaggcgctctccggcgcgttcgcgcgcaacggcctcgtcatcagcattgtcgcagcgctcagcatggcggccttcatcctcggcttcgccgccttgaatgaccggagcgttctgtttggtgtgcacaccggccctggcgccttctacaagttgatgccgcacaatatgatggccggactgttcggtgctgcctttctctatgccgtttttgcgctttttatgagcgtgcgcgccttctggcgtgacatcggcccgcccattgacggccgcgtcgacgggggctcgatcttccaggcgatccgcgatgccggcgagctgcgctatctccatggcggcggtgtcggttgctacaacgaggacgacaagcccaccgaccggcggaaaagctatcatcatctgaccttctacggcttcctgctgtgctttgccgcgacgtcggtggcgacgctgtatcactatctgctcggccgcgaggcgccgtatccgtggtgggacctgcccgtggtgctgggcacgctgggcggcatcggcctcatcgttgggccgatcggtctgttcatggccaagatgcggcgcgatcccgcgctgctcgacgagacccgctacggcatggatgtcggcttcattgccatgctgttcctgaccggcgtcaccggaatgctgctgctcgtcctgcgcgagacaggcgcgatggggccattgctcgcgctgcatctcggcgccgtgttcgcattgttcatcaccatgccctacggcaagttcgtgcacggcatctaccgcttcgtcgcactggtgcgctacgcgcaggagcggcggaccgcggcgtgaccgacggaaccggtcgccgcccctatgccacctcccggtccggcgcggacgcctgctcacgtgccatcgtcgtggccgtgacatagtcggtcttgccggtgccgagcaacggcaccttgtcgaccaccatgattgtcgcaggcacggtgagctcggatgcgccgatcgtcttggcccgagccagcatcgcgctgcgctcggcgtttttttccgtcgtcagcagcacgatgcgctctcccttgcgtgcgtcggggatcgacacggcaaccgtagcggcgtgcggccacagggtcgctccgatgctctcgaccgcggagagggagaccatttcgcccgcgatcttggcgaagcgcttggcgcggcccttgatggtgatgaagccggcagcgtcgatcgaaacgatgtcgccggtgtcgtgccagccttcgggaagtacttcgatcacgccgggattctcggccctgagataaccgagcatcacattcggcccgcgcaccgagaggcgtccgccatcatcgatgccgcggaccgggtcgagtcggctttccatcagaggcgacaggcggccgacggtgccgggccggttggccatcggcgtgttcatggcgagaacgggcgcggtctccgtgacgccatagccttcgaggatacgaatgccgtaccgctccatgaacacctggcgcgtgcgatccttgactgcctcggcaccggcgatcacgaggcgcaaggtgcggaagtcgtaagggtgcgccgagcgggcgtagccggtgaggaacgtgtcggtgccgaacaggatggtcgcgccggtctggtagatcaactcgggtacgatccggtagtgcagcggcgaggggtacatgtagatcggaatgcccgccagcatcggcatcatcattcccccggtcagcccaaacgagtggaacaccggcagcacgttgaacactttgtcgttggcgttggcgtcgacccgcgccagcgcctgcgccgcattggcgaggatgttgcggtgggacagcaccacgcccttcggcgtgccttcggagcccgaggtgaacagcacgacggcgggatcgttggcctggcgggcgacacgcggcgtcgtgccggcgagcaggcccttgatcttgtcggcgacgcctatcgtgtcgcggacgtcctcgagatagaccacgcgcgcctccgcggagatcgcggtcatcagcttgtcgagcttgcccttctcgatgaaggccttcgaggtcagcacggtcctgacctgcgcggccttcatggcggcgagcacgttgaccgggccggcggagaagttgagcatcgccggcacacggccgatgttctgcagcgccatgaacactacggcaacgcccgccgagttcggcagcagcacgccgacattctcgccgacggcggtgccgctctcgagcttgcggctcaggacctgcgcgccgagaatcagcttgcgataggttagcctggcgccgagcgcgtcctcgatgatgaccttgccggtgtcgcggtcgcgatgggcatgtccgagcgcttcgaacagcgtgtgatcgagcatggcgttcttcacgagggcatcgatcatgacgtcctgcagtgcggcgccggcggcattgcggcgtgccttgcccttcagcgtttcatcgaccgggagcttgaccggcggcaggatggtgacggtcacacgcggaaaccaggaccgcttgatctggctgctgttgagatagctgagataagagcgttgcgcgccttcgatgcggaccggcacaaccacggcatcggccttgtccgcgatcatcgcggtgccgtcatacaccttcatcaacgatcccgagacggtgatgcgtccttccgggaagatgacgactggctcgcccgcggcgacgagcttgatcaggtcgcgcgcggccagcggcttgctcggatccatggtgtagtgcctgaccgcgcgtaggaacggcttggcccaccaggctttggcgataccagtatcgaccgcgaagctcgcgtcgatcggcagcacggcatgcagcagcgggccgtcgatcaggctgacatggttcggcgcgatcagcatgcgcgtgcccggaggcggcaggttttctagtccgcgcacctccgtacggaacagggcgcggaacagaagcccgccggcatcgcgcacgccttccttgccccacttcgtgagcacgaaccacaccgcgccgaagctggcgacgccgaggccgaaaaagatccagccgacatggagcccggccgcctgcaacagcgcgacgaacagcgagccgaccaccatgaaggcggcctgcagcacgttgccggcggcgatgatgcgggcgcgttcggaaggttgcgaccaggcctggactgcggcaaaggacggcacaacgaagaggccgccgccgaatgcgaaggcaacgaagtcgaccagcatacgcaggccgccgaacgaggtcgcaaagccgagcgcagtgatctcgtgccccttggcagcgacaccgatggcccaggcgagatcgagccccgcaaatcccatgatgatggcgccgatcggcaccagcgcgagattgggacgtacgtggctcaggcttgcggcaaacagcgagccgatggcgatgccgatcgcgaagatggcaaggcacagcgtcaccacgccctcggtgccaccgacgacgtccttgaccagcgccggcagcagcgacagcacgatcgcaccgaccagccagaaccaggagacgatcacggtgccgtcccacaggcgatggtcggcgtagagcgtcctgagcaggctcatcgtcgaggtccatggattggcatcgacggggagatcgggcgcggagggcgtcgtctgcggaatgcgggcggcaaacgcccatgacagcagcgccagcgcgaccacggcggaggcgacccagcccatatgtgcggagccggccacgaactggccgccggcgacggtgccgagcaggatggccatgaaggtcgcgccttcgaccagcgcgttgccagtcgcgagctcgccgagctcgagctggtccggcagcatggcatatttcaccggcccgaacagggcggcgatggtgccgaacagcgcgagcgctgcgaacagcagcggcaccgaatgcaggaagaagccggcagcggcaaagcacgcggcgaagatctcgacgaatttcagccgccttgcgacgacggatttgacgtatttgtcggcaagctggccgccgagcccggacaggatgaaataggggaagatgaagacggcgcctgcgaccgtcaccagcgcatcgccgtggctcgtcgccgcgctgtaaagcaggatgatgacgagcgcgttcttgagcacattgtcattgagcgccgaaaagaattgcgcccagaacagcggcgcgaaacggcgtgacgacatcaattccctgatcatgactagtcctgttcttggaaaggcggcttgaggttgttcaatcgtcgggaggcgtcacgaccggaagcggaccggatcaacctttgccggacacgaatgtcgccggcctggtctgttcctcgtcctccgatcctgttggtcgacaagtggtctcgttaggttcgcaattatgtgctgtggcggctgcagaagatcgcatgatcgggatatcgtgccgcgatgagaaagctaaaccgcgtccggtgaagtccgcccgatccgccgcgaccgtcgggacgtggtgagtgcccccttgcaccggggctgcgcattcgagcagatcggaatgtcccggctgcgcgcctcaggtcagatgggcaaggcggcggaagggcgagaagcgaccgagcaggctaaaccggcgccgctctcggcgggctcgggcgcggctcgcccgccacatccggaaggtcgcccgacgctgctcgaggacgccggcaacgtcgcaggtattggcgacgcggttgatgggcgccgtcgcggcgttgagggcggcgcggcacagaccggtgacgagagccttggcgtcgtcgacgaaggtgacggcgatatcaacagcgagggtttgcattttgcaggtctccaggttaatttgaacaatgttcacgtgagtagctcgaaaatgaacaatgttcaagacgaatcgccacgcgataagaaaaaactttggcggcggctccaaatcgtggagatcgcccgcggcatcatctcagctaagggactgagatcattgaaggttcgggacgtcgcggaggccgccggctgctcggtcggcagcgtctataacgagttcggagacttcgatggggttatcctgaccgtcaatcgggagacggttcaggcgctcacggcgcagctccggggcgttcctgccgaagatcccgttcgccagctctatggcttggccgcgacctatctcgatttctttgccgagcacgccaatctgctgcgctcgctgttcgagcatcggatggaggacgaccgtccctacccggacgatattcttcagatggtgatggatgccttcgcgttgatgcatccacccctggtgcggctattgccggatgccgatgacgtgaagatcgcgttgctgtcgcgcacgctgttttccgccgtgcatggcatcatctcgctcggcctcgaggagcgcatggtggccgtgccgccgcagatgctgcgccagcagatcgaacagtttgtcgacactcatctcacgggcctcgggattctgccccggagctgacaacgagctacttaagcgcgcgccggctcgcggagccgtgccgcaacaacgaccacatcaggtctcccgccctcgacctgaacgctgttgcgtcccttttccttggcgcggtagcaggcggcatccgcgcgccgcatcgcatcttcgagcgtggtgttgcggtcggtgatgcaggcgacgccgatgctggcggtcacggaaaagcagcggtcgccccaggcgaaattgaacatctcgagcgatctgcgcagacgctcggcgatatcgacagcctcgtagggcgggcagcgcggcaggatcaggcagaattcgtcaccgccgagcctagccacaagatcatgtgcatgccggtcctgctgcaggaggcgcgagacctcgcagagcaggcggtcgccggcaaggtggccacagttgtcgttgacactcttgaactggtcgaggtcgagcaggatgaggccgaacgcacccgccgcggcatcgtccagctcgctttgcaggcgggcctcgaaggcgcggcggttgaacagaccggtcagcccatcgtgcgacgcctgccaggccaggcgctctttctcggcatgcaaggcgtgttcgaacgcctgccgttgcagcaccaaacgccgcgtatgccagatcagaagcaggatcagcgtcgctgcggtcaggaagttgatgcaggtcagcgtcaacttgatcgcgcgggagccctcgccgaggacggtggagaaccgctttgcatgcaccgtgaattggctgttgagctccgagagccgcgacgcaagaaactgcaggcgatcgtctgcaatggggccgttttccagttcggaccggatgagctcgccgaacacgctgagctccagcagcatgggatcagtggcggcccattcgctgatcgcttcctggaggaagctgacacggttgaagtagcgaaacagccagatcagtcctggtacgtcatcgggatggttgccgccctgcaggaagccgatgcgggcggcctcgacgtcgacgggatcgcgctcgagcgcccagcgcgcgaactcgtcgccgatgggaacggcaagcgaggcttgatactgcgcgaacaggctggcctcgcccgagtgcagatagcggttgaggaaatagacggcgttcttttgcgaacgcgaccatagcgcttcgcccgccacataggcgcggaccgacgacatcacctcgagactgaatcccgcgatcgccgcctggagcacgacgaccatcacgaaaggcgagacgagcttgatgacgtgaaggaagctgtgtcgctccgctgacgtcgctgttctgcgaaacaccttattccccaagccgatcaacgatcgcagcgaagcgttgcgcctgcaacacgaagtagacgagatggttgcttaactcgatctgaaaggtgcggaagactccgtcagagggtgaagccgtcgtgaagcaggcgcaagcaaatcgcttcaaatgcgggtgaactgggactgctgggggtgacgatccgataccgcgcatcccctgtgcgcggctgcctcgatcgagagaattggtggggtgctacaccatcaccggcttgcgcacgcgacccgcgtcgccgaacacgcgcaggtaacgctcgatctccgatggaaggccggtcgccttctccggattgtcggagagcttgacggccggatggccatcgaccgacgagaccttgcagaccagcgagatcggatcgaggttgaacgagccatccggcgtgcagccgacgaagtcgttggtgaggttggtgccccagccgaaggagagccgcacgcggccggcgaagtggtgataggtctcctcgatcgagccgacgtccatcgcgtcggaaaagaccagcagcttgtccttggggttgcggcccttcctctgccaccaggcgatgatctcttcgcctgcctggatcggcggcgcgctgtcgggacggaagccggtccagtcggcaacccattccggcgcatcgcgcaggaaggctttggtgccgaaggcgtcgggcagtgcgatcaggagattgccgccataggtctggcgccactggtcgaggatgcggtagggcgcccagcgcagttcctcgtcgtccctggcgagcgcggcagcgaccatcggcagttcgtgcgcgttggtgccgatggcttcgagatcgttgtccatcgcgagcagcacgttggatgtgccgatgaaggacggacccaggccttccttcaccgcctcgacgcaccagcgctgccagagaaagccgtgacggcggcgcgtgccgaagtcggagagccgcaaattctcgagcttgcgcagccgttccaccttggtccacagcttggccttggcgcgggcatagagcacgtcgagttcgaagcggccgcggcccttcattgccgcgcgcgagcgcagctcgttgatgatcgcaagcgccggaatctcccacatcgtggtgtgggtccagggaccgtggaaatgcagctcgtactggccctcgaccttgcgcagctcgtactcgggcaggcggaactccgccagccagcggatgaagtccgccgagaacatgtgggtcttgccgtagaaggtgttaccggccagccagatcagctctttcttggtgaagcggatggtgcgggcgtgatcgagctgagcgcgcagctcaccctcgtcgatgatctcggcgagacgtacatggcgcgagcggttgatgaccgaaaaggtcacctgctgatccgggtagtcttcccgaatcatttgtaacatcaatagcttgtagaagtcggtatcaagcaggctgcggatgatgggatccagccgccagctgtgattgtaggtccggctcgcaatgtcggtcactgtcatgaagggattttagcgcgggggccgtcccgcaaccagtgggtttgcggaggggcggtcttgtcgaacgcggcaccggctatcacggcttggcggccgtcgccgcgacggcctccagctggctnnnnnnnnnncggtgggccgggtccttctgataacgctggtgccagaccatgaacatcggcagctcggccagggtccgcgtgcgagacgccagcgggatcggcgcttgcgcaaacccgcgcatcacgccggctgcgagcaggctcggcatgctcgcaagcatctgcgacccccgcaggaaggacggtacgccggagaagctcggcaccgagatcgcgatatcgcgatgaagcccgtttgctgccagccggcggtcgaaatcgagccgttcgttgtcggtatagaccaccgtgacgtgacgtgccgcgagataggcgctgcggctggccggtgccgaacgggcctttgcatcgtagtagcacacgtaatgatccctcagcagccgcttctgcacgatgtcgacgccggacggcggcagcggagtgatcagcagatcgcagcggttctcgcgcagcatcgcaggtgaaggcgattgcgaggggatcacgcgcaggttcaggctcctcacttgcgcggcgacgtggtcgaagaagcgcggcagcagcaggtcgcgctggaaatcattggcggcgatcgtcagcgacagctgggcctgcgccggcgcgaagctgacgccgccggcaaagctgcgcatctcgtcgatcagcgcgcgcgccttcgtcgcgagggcctgggcatgcgccgtggcgacgatgccgcggccggatttagcgaacagcggatcgccggcaatccgccgcagcttgttcaacccgtggctgaccgccgactgcgtcagccccagacgtgtcgcggctgccgtcaccgatccctcctccagcacggcgaggaatagctcgagggcatgtccgtcgagggccaaatgatcgatttccttcatgtgattcattataattcatctatttaccttgagaatagagggtcccatcatctcccgataaccacgcccgcctccgggctcccagggagagacaacgtcgatgaacgcccaggcgccagcggccttgcgggatccccgcctcaacagccccgagccttttacgcccccgctcggcgatggcggcttcttccagcgcgatcgttccatccatccgccggcgcatgcgcccggttacaaatcctcggtgctgcgctcgccgcgccagtcgctgctgtcgctggaaaactcggtttcggagatcaccgggccggtgttcgggcacaatgatctcggcccgctcgacaacgatctgatccgcaactacgccaaggacggcgaccccatcggcgagcggatcatcgtgcatggccgcgtgctggacgaaaccggccgcggggtgccgaacacgctggtcgagttctggcaggccaatgccggcggccgctaccggcacaaaaaggacacctatctggcgccgatcgatccgaatttcgggggctgcggacgcgcgctcactgacgaaaccggctactattatttccgcaccgtgaagccggggccctatccctggcgcaactatgtcaacagctggcgcccggcccatatccacttctcggtgttcggctccggcttcgcgcaacggctgatcacgcagatgtacttcgaaggtgaccccctgattccaatctgcccgattctgacgacgatcccggacaaggatgcgctcggccgcctggtggcgccgctcgacctcaacgcctccagcccgttcgattcgctcgcctaccgcttcgacattgtgctgcgcggccagcgctccacctatttcgaaaatcgcaccgcggggaactgagccatgccgcagccgctcaattatctcaaggaaacagcctcgcagaccgccgggccctacgtccatatcggcctgatcccggccatggccggcttcgacatcttcgagaggaatttctccaatgtgctggtgacgcccaacagcaagggcgagcgcatcacgctggagggcaaggtgctcgacggcaccggcacgccgctgcgcgacgttctgctcgagatatggcaggccaatgcggccggtcgctacaaccatccggcggaccgttcggcgggcgcactcgatgagggctttcgcggctggggccgcgccgggtccgacttcgacagcggcctcgtcaccttcgagaccatcaagcccggcgcgatcaccgacaaggcgggccgcaaatgcgcaccgcatatcaatgtctggatcgtcgcgcgcggcatcaacatcggcctcaacacgcggctctacttctcggatgaagaggccgccaacgccgccgaccccgtgctcaacctgatcgaacagccggtgcgccgcaagaccttgatcgcaacgcgcagcgagcgcgccggcaaggtcgtgtacgccttcacgatcaatttgcaggggccggaggagacggtgttcttcgacgtgtgaagcctcacgcctcttcgccatggagctgcgcgcggaaggcgcgcggcgataggcccgtggctgcggcatagacccggctgaaataggcggggtcctcgaagccgagcgcgtaggcgatcgtcgagatcggcaggttggtgtagacgaggttgcgccgcgcctcgcggatcagccggttgaggatcaaatgcgaggcggtatcgccggtcgcccttcgcgtgatccggttgagatgcgtcgacgtcaccgacagcgccttggcatagtcggcgacgctccagcgctccagatgatgctgctccagcagcgcctcgaagcggcggaacaggctggattcggcagtgccgttgccgccgctctcccctgagagcgcgcgcgccacgagcccgatcatggccgaggacaaggcgcggagcacatgggcacggccgaaatcgcgcgcggcgtgctcggcgaagatctgcttcatcgtggcgcggatctgcggcgtgccgcgcaccacggcggatcgtgacaatgcgccgcgcaagccctcggccgcgagcagcgcctcatccaggatctcggcggcgatggtcaacacccagccctgagtgtccggtacgaaacggaagccgtgaacgtggccgacaggtacgttgacgatttgcatcggcctcaagggcaccacgcgcccgtcgagcgtcgcttcgccgccgccgcgctcgatcagcaagacctggtgcagccgggcatgacgatgcacggccagcgtccagtcgtgcagcaccgaacgggatgcgatggtctcgcagtgcacgacgtcgggcaggtcgccggactcgccgaacaaattgtacacccggatcgccggggcaggggctgtgcttctcatgttcgaatagtacaagacaaaggcgaaaccctccatccgtctgcagcgcaaagtctgcaaaaaagtgccgacgggaggacgcaataatgaaagttcaggtctgtatcatcggcggcgggccgtccgggttgctgctgtcccagctgctgcatctcaagggcatcgacacgatcgtgctggagaaatacagccgcgatcacgtgctcgcccgcatccgcgccggcgtgctcgagcacggctttgccaagctgatgcgcgaggcgcggtgcggcgagcggatggaccgcgagggggagatccaccgcgggttcgagatcgcccatgacggcgtgctctccaagatcgatctgcacaagcactcaggcggcaattcggtgctggtctatggccagaccgagctgacgcgcgacctgtacgaggcgcgcgaccggctcggcggcaaggtcgtgcacaatgccgaggacgtaacgccgcatcatctgacatcggatcgtccctacgtcacctaccgctcgaacggcgaaacgatccgcatcgattgcgactacatcgtcggcgcagacggctttcacggtgtcagccgcaagtcgatcccgaaggacgtgctgcgcgaatacgagaaggtctatccgttcggctggctgggggtgctgtcgcgaaccaagccggtatcgcccgagctgatctatgtgaagcacgagcgcggctttgcgctgtgctccctgcgctcgcaggtgctcagccgctactacatccaggtgccactgacggacaaggtggaggattggagcgacgatgcgttctgggccgagctgaagcgccgcctgccggaggaggtcgccggccgcctgattacgggaccctcgatcgagaagagcatcgcgcctttgcgcagcttcgtcgccgagccgatgagttatggccgcctgttccttgcaggcgatgccgcgcacatcgtgccgccgaccggggcccgcgggctgaacagcgccgcttccgacatctactatctctaccacgccttgctcgcgcattatcagggcggcgacgattccggtctcaaaggctactccgccaaggcgctcgcgcggatctggaaagcgcaacgcttctcctggtggatgacgatgctgctgcacagctttcccgaccggctcgactacgaggatcggctccagcagacggagctggactatctgctctcgtccgagacggcgcagcgcctgcttgcggagaattacgtggggctgccgttctaggcggtcgccccgcgtaccctccaagggagggcaagggggcggctactttccttccagcgtattgaccggcgtccagtccggcggcggcggcgtctcggctagcgccttcgctcgcttggcgaacattgccgaggctggatcggactccgccagccgctcgaacgtattcaccgccttcgcaaactctctggctcgccagcaggcaagaccttccgcatacgcggcagctgccttcgtctgctcggtgctctccgcaccgctctccgccagcggctcgaacaccctgattgcttcgccgcgtccctgaaccctgatcgcgtcgagctcgcgccaggcgaaggtgtcgccggtctgcgccttggtgctctcagaggccatgatggctgtgccgtaatatttgttggccccctccagccgcgaggcgacgttcacggtatcgctcatcacggtgtagttgaagcggcgccgcgagccgatattgccgaccacggcctcgccgctgttcagtccgatgcgatgcgatatgtcgtggccggcgaaggcgggatgggctgcgttgagctcagccagtttctcgtggcatttcagcgcggcgcgaaccgcgttgcgcgcgtgcgcgggatcgtcggccggcgcgccgaacatggcgacgatggaatcgccgatgtacttgtcgacgtagccgccatgattctcgatgatgtcggtcatggcggacagatattcgttcatcagcgtcaccagctcgcccggggtcatggtctcggcaatggacgagaaaccgctgaggtcggagaagaacatggtgacgttgcgcatctcgccgctgagcgccggcatcttgccggaggcgaccatggtctcgatgacctcgggcgcgaggtagagggcaaagctcttgcgcagaaaacgctcgtcgcgatcggccagcacgaagcggtagccgatcatgatcgcgagcgcggcaaggccggccagagccggctcggccagcggcagcgccaaggcgtgcacgaaggcgctgacggtgacggccccgtagacgagcgtgaggccgaaccaggccatcagtgcggcgccgggcgcgagcatgcaggctgcgatcgcgacgacggcagcgaatgcgatcgtgagaagggaccgcccggggaagccgagctcggtcacggcgtcccgctcgatcagatttcggaccgcagcggcgtgaacgaacacgccggccacgtcgctgcgggccttctgcgcggcgcctgcaggtgaggggatggcacagcgcggcgccggggtcccgtcatatccgccggagagacgcatcgaggtgagcttgcggtcctcgaagttgaggacggtgccgagcagaacgaccttgccctcgaaggcacggcgaaagaagtcgtggtcgcctttttcgacgcaggctcgcagatcggcgaaggagtaggtcggaacgtcgcggctaaggcttcgaaaattcagcgtcagcgtgttcggcacgacgcccgggatcgcatagccggccagctcggccttaccggatggcgccacctcgaccttcgcgccgagtgcgcgcgcggcgagttcgacggccatcgccggcaccggcttgccgtcgatggagaaggtgagcggcatccgccggatgacatcgtccgcatcggtgtggacgttgagggcgcggatgttgtttcgcaccgccacccgttgcgcctggtagggccgctccgggtggtcgttgctcaggacctcgccgagcacgagcttgccgctgtcggagatttgtcggagcgcgatcaggtagtcccgatcgaatcccctcatgcgcgagccgagcggcccgtcgccaaacggaatctcggacagctcgatcgagcttgggaagatgacgtcgtagccgatcaccttggcgccgccctcactgatgctgccgagcacgcgcccaatctcacgtgtccaggtttgcgtcggcgatcccttgaagggtggcgtcgcgtaagtctccccatcgatcgccactacgacgaccggcgaggcggcgggatcacggcggtcgccaatggtcttgccgcgcagcgccgtgaggaggtcgagagagaggccttgcagcgcctgaagcggcggcgatgtgaagactgcgcccgcgatgagcgcagtcaggtatgccgcaacgatgtcgcgcctgccgatccgccgcatctcccgttgctgggccgcctattcgagccgcagcaggcggccgacgatcggcgtcggcgaagaggtggcgctggcatcgatctggaaggcgtagcgcttggcgccgaggatggcgagatagcttcctcctggggtcagcgacttcccggctttggcaaagtcgtagaacttgccacggaccatggtttcgctcctcagcggcacggtgatcgtgggttccttgccgtcggtgcgctcgatgaccagcgtgctcccgctcttcgcctgcaccagcggggcgacgccgtagagcgtcggcagcttggacggggggcccttggcgtccgaccgcacgttgcggaaggtcgttgcggcgctctggttcgcctggcgttccgacagctttgccgcattggtatcgcagggcaccttctcccgcttgacctcgcccagctgcacggtgctctgctcagtgccgaccagaacaacgccttcgctgatcgtctcgcgctcgcatgatttgaggtagctgagcgtgatgctggccttgggcccgagcttgatgatctttcccgctgccacatagtccatgaaggcgatgccgtcgacctttccttggacgtcctcgacgatcgcggcaggagtctccgccagcgcgggggccgcaaggcagaaggcaccgaggacggcgccgatcaggcttctcatgggaattctcatccaattcgacgatgcactaccggcccgtcccggttcgatgcttacagcagggtgccccaagcaagtgtgaccagaatcactcttagttgttggtgccactttagcaggaacaggttcaaaccggcgaccagagaaaatggagccggggcaagaagttggtcggttcgtcatgtcaggcggtcggggctgcctcggccgaatgatcctccaccgggcggctctcggccgcactctctatatcaggaacgagaggggccccgcttttctgaagaggcgtctcaccggcggcgatcccgaccacctcgtcccagcgcgacaggaacgcctggacgcaggccgggtcgaactgcttgccctgattctcaatcaggtagttgcgcgccatctcgatcgccatcggctccttatatggccgccgcgtcgtcagggcgtcgaagacgtccgcgacggcgaccacgcgggcggcgaccgggatggcctccgccttgaggccgttcggatagcccgcgccgtcccagcgctcgtgatggctcgcggcaatttgcgcaccgagccggatcagctcgcagctggaatcggccagtattcgttcgccgatcgcggcatgcgtccggatcaccgccatctcgtcctcggtgagcctgcctggcttgagcaggatattgtcggggatggcgaccttgccgacgtcgtgcagaggcgcggcgagatagatgtcgcggcaaagccgggcgggcaggccgagctgttcggcgatcacgcggctgtagcgcgcgactctcagggtgtgctcgccggtatcattgtcgcggtattcgaccgcgagcgcgagccgcaggatgatctcctcttcgcgctcgccgagctttcgcgttgctgctgcgacttcgctggccaggtgcgcggcgcggtcgttgagcttgcgcacggctgcaccaagctgaatcaaattccgcaggcgcaccgtcatttcgaggctttgtggcttcttcggcaggaaatcggttgcaccggcctgcagcgcttccatcttgatgtcgtcggtctggcgcgaggtgaccatcgcgatcgggatgtcggcgcagccgggaagcctgcggaagctgcgaatgaagctgatgccgtccatatgcggcatctcgtaatccaccagcaccagatcgaagacgcgcccccgcgcgcaagccagcgcctccacgggatcgaggaaggcggtggcctcgaccagaccttctgcctcgatatgacgtttcaggaagttgaggacggagcggctgtcatcaaccagcagcgcttgggtcagcattggtggcgggggctctcttcactgccaaagacacgagacccagccataacccgggcgaatttaacgcgaagcaaatgcgcggaaacagtgccggcgcggaggcgtcgcctgaaatttcggcaggttgtgcccgcggcatgaagttgcgcgaaatccctgaggatgtgacccgtagttgtacggaccgccgcgttagggttttgctcactcgattcgcgtcaaacgtgtagcgaagttttagcaaaggcgaatgcagcgatgtcgctcaattccacggagccaaaatggtcgttgcggttgcccgctgattgcagcatcgccgccattcgcagcgtctatgacctcattcgcgaggcgttcggccgccaggagcggcttgagatcgactgctcgaacgtggacaaggccgatgtgacctcgatccagcttctgctgtcgaccgccaagaccggcgaggcccagggccgccccgtggtcctgacctccttctcgcaatctctgcgcaacacccttcgccgcgccggctttgccagcgaagcgatgatcgatcagcacttcccgcaaaagaaagatggcacctgatggccacgattctcaccgtcgacgattcgcccagcatccggcagatgatcaaggtcgtgctcgagccggccggtcacaacgtgatcgaggccggtgatggcgcccaagggctggccaaggcgcaagccggcaagctggacctcgtgatcaccgacctcaacatgccggtcatgaacgggctggagttgatccgcgcgctgcgcaagctgccgaacgctgtcggaatgcccatcgtattcctgaccaccgaatccaatgacacggtgaagcaggaagccaagagcgccggcgccaccggctggatcaccaagcccttcaaacccgagcaattgctggccgtggtcggcaagctggtgcgcgcatgagtgtgatggatccgaccgagatctttcgtcaggaagccagcgaacttttcgaggttcttgaaggatcgctgctcgatctcggtctacgtcccgatgaccgcgaactggtcgattccgcctttcgtgccctgcatacgatcaagggctcgggcgccatgttcggcttcgagaaggtcgcctcgttcacccacgaattcgagaccgccttcgatcgcgttcgcaagggcgagatcaagccgacgcaggagctgatctcggtcgcgcttgccgccaaggactatatccgagcgttgatcgaggatccgcagtcgaccgacgacattatcggcgaagccatcctcgacgatctcaagcgcttcgtctcggccgacacgcccgccgttccggtcgtcgagatcgccggggcgccgccgctggcgccagtggagagcaagcgggccggctggcacctttatctggaattcgaatcccatatcctgcgcaacggctccaatccgctcgatctgctggaagatctctgcaagctcggtccctgcttcgtggtgcctgtcaccgacggcgtcccgtttctcgatgagatggagccagaggattgctatctgaaatgggacgtcaagctgcacgcggcctgcgacaaggacgcgatcgacgacgtcttcatgttcgttcaggacgagatgaggctgacgctgtcgccgctggagcaggtcgaagcgcccgcgccggctccgttgctccagcttctcgacgaagagcccgcgccgccggccgagacggccgcggtggtggcggaggcggctcccgcgcccgttgccgagcagcccgcaaaagcagagcacaaggccgaagctgcaaccgagccgaaagccgagatcaagcgtgaagcgccgcccgcccgccgtgaggacgccaagcaggagcggggtatcgccacggtccgcgtccaggccgagcgcctcgacgagctgatggaccgcgtcggcgagctcgtgatcgcccaggcgcgattgacccagctcgcggcctccggctccgacctctcgatcaagctgatcgctgaggaaatcgagcgtcttgcttcttctctgcgcgacaccacgatgggtgcgcgcatggtgccgatcggctcgctgttcggccgcttccgtcgcctcgtgcacgatctgtcgcgggatctctccaagcccgtcgaattcgtcacctcgggcgaggataccgagctcgacaagaccatgatcgagtgcctggctgatccgctggtgcacctcatccgcaatgccatcgaccacggcatcgaagacaccgccacgcgcgctgccaacggcaagaccgagcagggccgcatcgagctcgccgccgtccattccggcgcgcaggtgctcgtcaccgtgaaggacaatggcggtggcctcaacacggcgcgcatccgtgcgaaggcggaagagcagggattgatcgcggccggtgccgtgctcagcgatcacgagatccaccagttcctcttccacccgggcttctcgaccgcgcagacgatctcggcgctgtcgggccgcggcgtgggcatggacgtagtcaaacgcaccatcgagaacatgcgcggctctatcgacctgtcgaccaggccgggccagggtaccaccgtgacgctacgcctgccgctgacgctcgcgatcatcgagggtctgttgatccgggtcggcgaaggccgctacatcattccgctctcggcggtggaggagtgcgtcgagctgaccgcggaggacgagcgttcgcgcggccgcaacttcctcaacgtgcgcggcaatctcgtgcccttcctgcgtctgcgcgagatcatgtcctcgtcgggcgcacccgaccggcaccagaagacgatcatcatctccacaggcgaaacccgggtcggcctagtcgtcgaccagatcattggcaatcaccagacggtgatcaagtcgctgtccaagctgcattcggacgtcacgatcttctcgggcgcgacgatcctgggcgacggcacggcggcgctgatcctcgacgttgcgcagctggtcacgctggcgcagtcccaggtcgaaaaacagcacatcagcgaggcggcatgatgaacgagggggtggcgggcgagcatcagtccggcgcgatgcaggtcgtgatgatcggtctcggagaggaaaagttcgcgctcgatgcgggcctcgtgcgcgaaatcatcgatcccgttcccgtgaccaaggtcgcgggcgcgcgcgcattcgttccaagcgtgatcaacgtgcgcggcaatgtcattccgctcgcggacttgcgtatccgcttcgggatgccgcagctggatgattctgccgatacacgcatcgttgtcatcgagctcgatctcgacggggagccggttctggttggcgtaaccgcggacaaggtctacgaggtcacagagatctcgcaagccgacgtgcagcagacaccgcgagtcgggatgcactggaagccggagttcattcgcttcatcgcgaagtggcgtgaagagttcgtcatcgttccgaacatggaacgcattctgaattgaagtcggtctgtgaaagactgtgggggcttgggggctcgatatgcggttcactatcaaggcaaagctggcgtgtgcgttcggcgtgatcattctgttgtcaggagtcacgggcggactggcatatctgaagctcgcgcaacaagtcgaggtttccgcggatttcgtcgtgcgcgccgcgcgcatagataaggccggagagctgcagaacaacgtactctatcagaccagggctgagcgagacatcatactcgcggcaagcgatgcggagatgctcaagctggtcgacgaaatcaagaagcatcgctccgaggcgacccggcttctcagcgagatcaaggccacggcgtcggatgccggcaagcatatgctggacaaattctcggcggcctacgacaagatgaatgccggcgaggacgctatgctcagcctggcattgaagaactccaactatcggggcgcccaattgtggacctctgatggagcgccggttctgaagcagtggaacgacgttctcgatgcctctcttgccgaattgaatcgtttgacggcttcgcccgagaagagcaacgcgcttctagctatctatgccatcaggctggaaggagtgcgtctacaacggcaggtcgccctgtcgttctcggcgtcgagcatggaggagctcaatgccgcgatcaaggcgatcgcggacgagcaagaggcactcaaggtcgcactcaagcagggcgccgctcccatgtccgcggtcggcttgtcgtcgacgaacattgtcagctacacggatcgtctcttcaatgtcgtctcccgcgtggtcgagatcgtgaaagaaggcggcaacataaaggcgtcggcgatggccgcggtcgaaggaagagcaaatgcggccgaggcaatctccacatcgggcgagtatatcagcctggtgaagaagcagatggcggaaatgtcggcggcatccgcgcaggaggcaggtcaggccaagattcttctggtcagcgtcatcggattgtcactcctggttggtgcgacgtccgcgatcatgatggcccttagcatcagccgtggactgtcccgcgcggtcaaccttgccggagccgtcgcaaacggcgatctgagccagacaatctcggtcaagagcaatgacgaaatcggcgacctcgttcgttcgctgaatgcgatggttgagaagctccgacaagtcgtgtcggaggcactcactgctgctcagaacgtatctgccggcagtcaggagctgtccgccagcgccgagcagctgtcgcagggcgctacggagcaggcgtcctcggcagaagaagcctcgtcctccatggaggaaatggcctccaacgtgaagcagaatgccgataatgccaaccagaccgaaaagattgccgcacagtcggcgcgtgatgccgagtccagcggtagtgccgtcggccgtgccgttcacgcgatgcagaccatcgccgaaaagatcacgatcgtgcaggagatcgcgcggcagaccgacctgcttgcactgaacgcggccgtggaagcggcgcgagccggcgagcacggcaagggtttcgcggtggtcgcgtccgaggtacgcaagctcgccgagcggagccaggcggccgccgccgagatcggcacgttgtcgaccgagacggtgaaggtcgcgcaggaagcgggtgaaatgctgtccaagctggtgcccgacatcaagaagacggcggaactcgttcaggagatcaccgccgcgtgccgcgagcaggatgtcggctcggcccagatcaatcaggccatccagcaactcgacaaggtcggccagcagaatgccagtgcatccgagcaggtctcctcgacttcggaggaactggcctcgcaggccgagcagttgcaatcgacgatctccttcttccgtatcgatgacgccgcgcgcaattcgaaggctgctcctcaggaggtcgaccgggccgttggtcaacttcgcgccaaggctgcgaagatggcggccgctgatcgccgcggcagggcgcccgttgccaagccggcacgagcgttgaaggtcgccggtggcggtggtttcgctttcgatatggatgaggtcggcgacgatcgggacgccgagtttcagcgatagacgctcctccgggacgcgggcagtcgcgctcgcgttccttccaaaatcagaccaggtcgaactcaagggacttgaaacatgagattcaccgtcaaggcaaagctcgccagtgctttcggcctcgtcatcgtcctgtccatgattgccggtggcgtcgcctacatgaaattcggtgatatgatggcgacggccgacagcatggtccttcgcgccaagcgcatggaaaaggccacccagatcgagagggacattctgctccagcttcgggccgagaagaacgccatcctggcgaccggcgccgatgtagaacagtttgccgcagacgccgccaagcgtcgtgagcacgcgacgaagacgcgggacgaagtgcacgctctggcgagcgaagccggtagaaagctgctcgacaacttcgccgcaacctacgccaagatgaacgcgtaccaggacgagacgatccggctggcaaggacggataaggcgaaggcgacggagcgctcgatgaacgagggccgcaaggtcgtcgcggatgcgctggagtcgatgagcgcttacgtcgagaatacgaagacacagatgagcgatcaggccgtccacgcgcaagaggaggggcagaaggcacagttcatgctgatgacgctgatcggcgtgtcgctggtgatcgcgatcggggctgctttgtggatttcgatctcgatcagtcgtgcgcttggcggcgcagtgggtcttgccaacgcggtcgcgatgggcgacctcagccagaatgtcgaggtcaagagcaacgacgaggtcggcgatctcatcaagtcgctgaacgcaatgactgcgaacctcaacgcgacggcggcgatcgccaacgaggtcgcgcaaggcaatctggccgtcgaagccaagcgtctgtccgacaaggacactttgggacttgcgctcgaacgcatgatcgcgagcctgaatgccagtgcggaggtcgccaacgagatcgcgcgcggcaatctcacggtcgaagccaagcggatttctgacaaggacaagctcggcgtcgcgctggaaaccatggtgcagaggctccggcagatcgtgtccgaagccttgaccgcggctcagaacgtctcggccgggagccaggagctgtccgcaagtgccgaacagctctcgcagggagcaaccgagcaggcctcatccgccgaggaagcttcgtcctcgatggaggagatggcttcgaacgtgaagcagaacgcggacaatgccaatcagaccgagcggatcgccgcacaatcggccaaggacgcagaggcgagcggcgcggccgtcgggcgggccgttcaggcgatgcagaccatcgcggagaagatcaccatcgtgcaggaaattgcgcggcaaaccgacctgctcgccctcaacgcggcggtagaggccgctcgcgccggcgagcacggcaagggcttcgccgtggtggcctcggaggtgcgcaagctcgccgaacgcagccaggcggcagccgccgagatcggcactctctcgactgaaagcgtgaaggtcgcccaggaagcgggcggcatgttgtccaaactcgttcccgacatcaagaagacggctgaactggtccaggagatcacggccgcctgccgcgagcaggacgtcggcgcggctcagatcaaccaggcgatccagcagcttgacaaggtcggccagcagaatgccagcgcgtccgagcaggtatcttcaacgtcggaggaactggcgtcgcaggccgagcagctgcagtcgacgatctcgttcttccgaatcgaggaaggcgggaaggccaaggctgctccgcaggagatcgagcatgccgtcggtcggcttcgcgccaaggcggcgaagatggccgcagccgatggcggcgccaggaggccggctgtcaggccggctcgcgccctgaaggtcggcggtggcggctttgcctttgaaatggacgacgccgacgacgaccgcgacgcggagtttcaacgctaaacggtccgaacgggcctctctcgaacctcttgatcgaatggacgcatcatggccgcaacctcgcaatacctgacgctcgggctcgccggcgagacgttcggcatcagcattcgcaatgtccgggagatcctcgacatgcggccgatctcgcgcctgccgcatgcgccgagcttcctgctcggcatgatcgacgtgcgcggcagcggctatccgatcgtcgacctcaggaccaagctcggcctgccgaacgtggccgcgaccgaggcgacgcgtatcatcatcctcgacgtgccgatgaaggaccgtctggtcggcgtcggctttgtcgccgactgcgtgttcgaggttaccgacatcgatgaacaggcgatcgagccgatcccggaagtcggcggaaaatggcagtccgactatgcggctggaatcggccgcaagggggagaagttcgtcgtgatcttcgacctcgccaagttgatggccaacgacgaggttccagaagtccgcgacaccgtcccggatgcgttctgcgccgcctgaatccgaaagagcgaagcgtgatcacacgtaagcaccccaattcgaaccaacgagactgacatgagattcaccgtcaaggccaaactcgcgagcgcgttcggcgcagtcatcattctctcgatgattacgggcggggtcgcctataagtctctctccactttgaccgagcagcaggagcgcatcgtcgaccaggcctaccgcacgaaattggccgccgacgtcatgagtgcaatccaggcgcaacagcgcgccgaaagccgcatgatccaggcggtctcggacaaggacactcaagacaattacaatgcgatgctgacccgtcgcgagaagatgctcaagctcaacggcgagctctacagcaaagcaagcgaggccggtcgccgcttgcttgatcaggccgccggtccgatcaagcgcatgaacgagttggaagatcaggctgccaagtttgcgctgctcaactccaatcaccgggctgcgcagctgtggaagtccgaaggacaggtcgcggtcaagaatctggacgcgatgttggatgcagcgctcgcggagctcggcggcaacggctccgagagccagcgtgctgctgcgttgctgacagcccgcgccgaggtcgcgaggctcgcgcgctcgatcgtcttgacctattcgacctcgacggcgcaggaagcagatgcggatgtgaaggagaccatgcagcggctggccgatctcaaggcatccgtggctcaagcgagtcaaccgggcgcgaccaatgccatcaatgcgcagctggatcgcctgacgaacgtcgtggagaatgttacgcgtcttgccctggaagccggcaacctgaaggcggcggccatcgccagcggtgaaggccgtaaggccttcaatgaggcgctggatgccatcgagcaatatgtccagagaaacgagaagcagatggccgaggtcgcggaggagggtgccagggacgcggccttcgcaaagatgctcttgatcagcatgatctgcgccgcactgttgatcgcaatcgctgcggcgacctggatcgcgctcaatatcagccgtgggttggcccgtgcagtcggtcttgccaatgcggtcgcggtcggcgatctcggccagaagatcagcgtttcgagcaacgacgaggtcggcgatctggtatcatctctcaacgcgatgaccgccaatctgaacgccactgcggcggtcgcgaacgagatcgcgcaaggcaacctcacggtcgaagccaagccgctgtcggagaaggacacgctgggcctcgcgctggaacgcatgatcgagaagctgcgccagatcgtgtccgaagctctcaccgcggcgcagaacgtctcggccggcagccaggaactgtccgccagcgccgagcagctgtcgcaaggcgcgaccgagcaggcctcgtccgccgaggaggcatcctcctcgatggaggagatggctgcgaacgtgaagcagaacgccgacaatgccagccagaccgagaagatcgcggcgcagtccgccaaggatgcggaggcttccggtgccgcggtcggccgcgccgtcagcgcgatgcagaccatcgccgagaagatcacgatcgtccaggagatcgcgcgccagaccgatctgctcgcgctcaacgcggccgtggaagccgcgcgcgcaggcgagcacggcaagggctttgcggtggtcgcctcggaggtgcgcaagctcgccgaacgtagccaggcggctgcggccgagatcggcactctctcgaccgacaccgtcaaggtggcgcaggaggccggcgccatgctctccaagctggttccggacatcaagaagacggctgagctcgtcgaagagattacagcagcctgccgcgagcaggacgtgggctcggcccagatcaaccaggccatccagcagctcgacaaggtcggtcagcaaaacgccagcgcatccgagcaggtgtcctcgacctccgaggaacttgcctcgcaagcggagcaactgcagtcgaccatcgcctatttccgaatcgaccatggctcgattaagcaggcatcggagccgatcgaccgcgcggtcaatcagctgcgggccaaggctgccaccatggcggctgtcgagcgtcccgcgaggaagccgcaggccaagccggcgcgcgccgtcaaagctgccggcggcggtttcgccttcgacctgaatgagggcgaggacgatcgagacgccgatttccagcgctaggacctccggaacgggtccgccctcggtcgagcccgctttctgtcaacgcataggatcaagatggcccttatggcccgacattcagtgcaggcggcccttccggacttgggccatcgttcatgatgcccgccatccaagataccgccgtgcatctgtccgaccgccacttccggaccatcgccgaactcatcgaggggcaggtcggcatcaagctgccgcagggcaagcggctgatgctggaggggcggctgcacaagcgcgtgcgcgcattgaacttctccgacctcaatgaatacgtcgagagcctgttcgagggcgatcatttcgacaccgagcttacgcatctcatcgatgtagtaacgaccaacaagaccgacttcttccgcgagccccagcatttcaccttcttgcgggatgtcgcggtccctgccttgctcaagtcgcatggacggaagaacgcgaatctgaaggtctggagctcggcgagctctaccggaatggaagcctacacggccgcgatggtgttggacgacatgacgcggaacggctcgcgctttcagtatcgcatcctcgggacggacatctcgacggcggtgctgcgcctcgccaagaccgcgatctatacccgtgacgtgctcgctccggtgccggagcctttcgtgaagcgctatttcctgtcgtcgcggaacaaggccagcggtgaggtgcgggtggtgccggaattgcggcgcatgacgcatttcatgaggatgaacctcatggacaagtcctatcccgtcgatcgcgacgtcgatatcatcttctgccgcaacgtcctgatctatttcgagcgcgagactcagcgcaaggtcgtcgagcaattgtgcagccatttgcgtccgggcggttatctgctggtcgggcattcggaatcgatgattcacagcgcggtgccgggtctgaagcaggtccagcccaccatcttccaggtttgatcggagcgccgccccaaatgccgaaggagaaagttcgcgtactgatcgtggacgattcggcgtcggttcgccaaatcctgctgacgatcctgagtgaggatcccgagatcgaagtgatggccacggcatccgatccgttcgttgccgccaagcggctcgagaaggagctgcccgacgtcatcattctcgacctcgagatgccgcgcatggacggcatgaccttcctgcgcaagatcatggcgcagcggccgattccggtgatcatctgctcctcgctcacggaggagggatcgagcgtcatgttcgaggcgttcgaagcgggtgcggtcgacatcgttccgaagccgaagatcgacacgcggcaggcactgctcgaatgctccacacggctgcgagaggccgtgaagtcggcagcccgagcccgggtgcgtccgcgtgccgcgcgccgggagatcgagaagaaactgacggccgatgccatcatccctccgccggtgcagggcaaggtccgtccgacgacggaacgcatcgtgtgcatcggcgcctcgaccggcggaaccgaagcgctcaatgacgtccttgaaatgctgccggcccactgtccgccgatcgtgatcgtccagcacatgccggcaggcttcaccgcggcctttgccaggcgtctggacagtgtctgccagatcagggtcaaggaggccgaggacggcgagccggttctgccgggctgcgcctatatcgcgcccggtgcccggcacatgctgctccagcgcatcggcgtgcgctatcagatcgcgatcaaggacggcccgccggtatcgcggcatcggccgtcggtcgacgtgctgttccgctcggcggcccagcatgcaggcgccaacgcgctcggcgtgatcatgaccggcatgggcgatgacggggcgcggggaatgctggagatgcgcaagctcggcgcctcgacccgggcgcaggatgaagagagctccgtggtgttcggcatgcccaaggaagccatcgcccatggcggcgtcgagaaggtcgtctcgctgcaccagatcccgcgcgaaatcatgctctggtatcaggccgggcaccccgcggtggcaggttgaccgcgatgtccgtgattccggccagcacgctcaccgaggcgatcgccgcgatcgagaacgtctcctcgcgcatcgaggacgtgttcgcgcgcgtcggtcacgagcttggacgcgggcatctcatcttcaaggagctgaaccagggcctcgcggcgctttcctccgagctctcgggtgcggagatcgaaggagctgcgaccgcattgcaggagatcgccgcgcggctcagcgagctcgcccaggcgctgccggccgagaccgccctgctggagacgatcggcaagagcacggcggaggcgtccgctttgctcaagccgctgttcaagcacatccagatgatcaccatcatcgcccgcagcgcgcgaatcgaggccgctgcgctcgacggcgaccgcgagggctttctcgccttcacgcaggaggcctacgatctcggcaaggccgtgcagggcgcgatcgagggctgcgcgcgggatcagcagcgcctgtctgaagcggtcgccaccgcatgcggccggcagcgggacttcgagagccgctaccggaatcaactggcggcggagagcgtcgagctcggctccgcctattccgggttgcgcgatcagcgcagcaacagcggccatctggccgatctcgccagctccagcaccaggaagatcgccgaggcggtgggcagcgcgatcatctccctgcaggccggcgacagcacacgccagcgtctcgagcatgtctcgcacggtcttggcctcgcctccggacgggctccgagcctcgttcccggactgatggcgggcgaggacggcgcgcgcgcgatttgtcagttgcaggcggcccagctcagggatgctcaacgcgagttcagcggcgacatcggccagatcgttcgcgcgctgaccgccatcctgcacgatgcgggcagcgtggtcggccatggccgcacgctgatcggcggcgaggacggccgttcgtcgtcgttcctggcgcgcatcaagcagacgctggcgcacgcctcgaacctgatcacgacctgcgagggcgccggccgctcggtcgacgaggcgctcgcgatcgtcgaggatacgctgatgaagtttcgtcaggcgatcgcagggctcgccgaggcgaccgtcgacatcacgctgatcggaatgaatgcgggcctgaaggcaagtcatctcggcagccgcggcagcgccttcgtggttattgcgaacgagctcaaggccaccgccgaccaggtctcggcgggggcggggcgcctgaggcccgtgctcgacgccatcgagcgatcggccggggaattgaagatcctccgcgtgcagggcgatcccacgcagctcgccaagctcgaaccgcagatcctccaggcgctgcgcgaggtcgaggccggcaacgagcggctcggcaagctgatgggccggctcgtcaatgaaggggcggaattcgagggactcatcacgtcggcgcaaaatctgatgacgacgctcggcgaaggctccgcggcgttgccggcggccgcggcgcggctcgagaccgcgagcgcgggcgcgcagaagccgcagccgcaagcgcaagacgaagcgatgctcgacgagctgtttgcgcgctacacgatggagcgcgagcgggacgtccaccggcagtttctgcaaacgctcgggctgacgtcggtcgccaccacgcgccgtgtcgaagtcgcggaaactgctgacgacggcatagaactgttctgaagtccctgcgcgccgtctcgtgcgccgcagaaattttgatcgattggttttgcagggcgttaaccgtggcggaatgctcgccgtctcggtcattgttgcgcctcacacttcgttgcagatacgcatgaattccatgggtggatgtttccatgctgaaagagggcaaatacgcggcgtggttcaggaccgcgcaagcgcagggcaccggtatcgtgaacctggccgagggccgcatctccggcagtgacagcttcttcacctatgacggctcctatcaattcgatgatgaccggcgcttcacggctgttctgaccacgcggcggcatgccgagggaccgccgacggtgttcgggctcgacgaggtcgaggtcgagctctccggcgtgtataccggcgcgatggcgacctgttcgggcacggcccgccaagcgcccggcgtgaatttcgaggcgacgctgatctacagccaggaagacgctccggccgctatcgacgcccgaagcgcggtggtgaagctcaaggccgacaagctgcccaagaggctcgacggccgttcgcgcgggcggcatgcgtttgtggctccaaagacgccggtatcatgaacggcggcatcttaggttcgtgttgacgctgttgtcgcgaaaacggagcgcaactgcactgcggcaactgggtctttagaggtgaaagttagcttgaggccacaacagtgggcggataggaaatatgcctcagatctggatgacatatcaggaactcggagcactttgcggctttagtgctgacgaggccaggatcgaagcgcagcacctgctgctcgatcgtcgccggagccgtgatgggaatacccgagtcaagttgaacgcagtgttgatcgcccggttcttggagacaattcgcgaatcggactccgaacttgacgttgcaatcgcggcactgcgcgagacacatcaacaaatgtcgaccgggcttcggacgcggagaattgccgtctggcgctaggctgctagcttgtggtttgcagcccctctacttgcgaaatgcaatgccccgttccggtctgccgttgggtcaggccggcggcctgggcaggaacgacaggattgtctgagcgaccaggacacccatgattccgccggccgtcttctgcagcacgtccgtgaacgcatgaacgccatcagggatcagtaactgtgcaagctcaagcccgatagcaacagatatcacgaggctgcaagctacggccgttcgtccgggaagcaggaaggaaaacaggacacctagcaggccataaacgctaatgcgctctatgacaatgacccaataagcttcggcgtgacccaccagtactggtcttcctgcaaggcgagcaagaactgcgtaggcgatgagtgcggagcagacgcccgctgcggcgaggaggtggttgcggcgcatggcgccaacatagtcggtcaaccgcctcgccgccgcgaaaggcgaaaatatccttaaagacctgacaccggcgcgctcgtacacgcgtcgatggacgttgtccgcagagtcgggttcagttgtactgatgcgtctcgttgatgggcttcggccataggcttggcgatgaatccttggccagcagcatacgccgatctgatgcaatccgagcgacaagggctgtggtaggacgaagcgacgagcttggaaggcagacgtagagatcagccgggcatgctcgatatgttggctagcccttctttgtgccagcttctctcgacttgagcgaaagaccgagtcgcagcgccatgcgcttgatcgcgtccggcgaccgcccaagctgctttgcagcattctccagtgtggttgaagacttggccagttccatgagccggcggtcctctttgaatgaccagggcttgcgcgccatctctgcaatgatcctattatacgacgtaccaagacaaagccgccaaacagacccgtgttcgctcgacggctttgcttgggtggggtcgggcctggggaagcccgatgctgagatggataaaagtttccgagaacatcgcaacaaacaacggatattaagctaactcctcaacgttactgagcgaagctcgtagggcataaacgcgcacggcgaatttccggcagctttacgctcagcttgcttcggtccggcgctttaacgttgctgcgacattggagttgcggagattgacggcggccggtagttgcggatgctatccctgaaatcggccccattggctaagctggggcggacccataggattcagcatgattgctccaagcaacgcggctcctcgaaggtattttgtcgatgcggcaggccagcgagttttgattggcttgacgatcgaggagacacgagaattcgaaggcctggatcgggctcatgccgacctcagcgcatgcttcgtggaagaagctgccattgcttccttcggtctggttggacagagatggtcggcgctctacgataagcatgagagcgcctggcagaactggatagccaacgggcctgtttgcgcccgttaaatcttcgttaaccacagaagagcgatgttctccggacgctgacctctaaagaaatgacgaccatgttccagttgttcctgagagcccgcggccagaatttccttcggcgtgttggagtgtccgaatttcgtgtccgctcggccgaccgggatgtcgaaacagatcaacaccgtgtgggagctatcatggctgccatcgaggatgcccttcaagccgctgaacgcgagcgagcagggctaggccgcagagtcgatgacgttctcgcacgggccgccgtcacgcttgggaatggggacgacgagtatttgcatcgcgaaccgctggatagccatcatcaggatctgttcgacgcggaaatcgtcaacggccagaagcggctaagggagttgggggcggcgattgctcacttcaggttcataaaggccgcgatgcagagccgcttcccggactatcggtctcggccgtgcggcggtgacatcaatagtcagtaagcctaggcgagccggcggtcgagcgcccagaggcttgcccgatcatcacgattgccgaagctgactcggaatctgtacgacaactccgccctgggtgccgagcctcgcgagcgcgccaccgacgtagcttatctgcactacgacggcgaaggtgaggactgaagtccacatctgccaaagtggctccggggagatggcgcagattgcgaacgcgccagctagaatggccggcaagagaacaaatactcgatatcgcagaccgagggcgagcccggtgactacactacccacaatcaacagcatgactcagggactccagaaacagccccatcagtctaggttgcacgcgataacattggctgaagccgatacttcaatttctccataacgcgtcttcgggacggcgatccattgttaaacatgcctagacaaccagcatttccatccactgtatcgtttgagccgcggcgcacgtcctcggagagccgccgcggtactcaatttgtgcacgcgttacctcgaggtcacgatggcgtttatattggccgcgttggtcgtcgctgcatccaacggattcatgagcttgatgaactcagtcgacggggactcggcaacagagatgacgtcatggtcccgcattctaaatgaatctgcttggaaccagccgtccggcttgctcatatcgaacttgtagactgcggggacctgtacggtcggaaatccagccacatcgaggccaacgctctccaacagccgcttaggctcaaaccggtaaagaaagaccgatcttgaattggcgcgactaccgtctagaccgccagccttggccaaggcctccgcgagcgacatctcggcattctcaaacgtgaaacgacggttgttggtgccaccgatcgaacctggagtcggggtggaaccaaacgccataaacactcgcggtacccttgtcaggaagacgacgtcgcccggagacagcaatacatcttccgaaggccgctggacaacgctcgagacgtattgcgtgtatgtccggttcctgcgctttagagttacagtgacctcatagtccgggaacttggggccgccagcccttgcgatggctgcaagcagatgtagccctcccggatcgattgggaagcgagaaggtgagttgacctctcccaagacgctgacttgattgccgcgttgctcggcaacggcgaccacgacttgcggatcgatcgcgcgctccttgagccgctcgcggatgatgttgcccacggcgcggggggtctgacctgcaaccttgattgagccagcatagggaatgttgatgctgccagattgatcgacctgttgccgcggtatgtcgacaaaattgccagccctgacgccggcttcgcccggaatgaaaaggccgcccgcttgtgcctcaaacacggtgacagtcagaatatcgccaacgctgacaggtgcttcacgatagtgtcctcccggtattgaagcgaaggacatgccggtcgcgttggtgatcgcgtttgaggcattgagaatggctgggttgatcggcatcaaaatgtagggaagtggcgcggatggttccgtcacgatcgcagcattctcgtgaacggcagcagagttaggggcgtccatcggaatgaagcccgcacagccggttgtcatcacagggaccaagatcagcgccgcgaaatgaatgctgatcgggatcgatgattttcttgtctcggtgaccactatgacctcacgcgtcgcttactgcgctcgaccgtagcaatcatcctcgcgcgaagtcactctcatcgagttttatcgaaataaacttggagctttgtggccttcgtgcaacgcaaaccgcctcgcatgtgatgccggattgagcaacgcgtttgctttcttgccacaatcagctcgtgcgccgcactaccgacatctttgagacacggtcgtggccgcgcactgcaaagcgctgctgtcattatgttgggacattcgtaccacacagcgaagcacggtgcagcgatggaactctcgcgtcagcgcaagttaggtgaggcagcatagataggtgcactggctagggctgttggttgcagtccatataggtgcaacttgagagcgcaggccaagtcattggccctttcctcggagaggtgacgtgcctggagagcagttccttcacgctggtgaacgaagttgtgaaaaattgaacatacccgcggaacgcgccagcgggttcggcatttattgatcttagtattctccggacgagtcggaatggacatgcggcgttaggcaatggttatcccttccggcggaagcgtttgaccccggcgcgaaatccttgaggtcgttaaaactcgattgtttggtttgagccgcacgaaagagctcagatgtcaaaagccccaatgtagcccgccagaggctgacgacgggggtgttaatgtctacttcgagctatagattttcgaccgagttcgccgccccccccgcacgggatgccgtcgatgggcttgcggcgattgcctcggcggttgatcaggggctggtcgctccgaccactagtccccgttgcccgcagttcgctgacatgtgcgcaatcgcgctaggttgggccgtgctcgtcgcagtagtgcttcaccctgagctgcagctcgcagcgatcgggctctgcgtcggcatgattgccttgcgctctatttggcggcttgtcctcggacctcgcgagcggagctacccgcgcgcacttccggccggcggtcctcttgtccgatatagctaggatacactcgcgccggacacttgagcactctcactaggaagctccaactcgccaatctgaacgggataagagtgcgacgtcttatcccacacgagtggcttcccggaaatgcggtggcccacatagatacgaacggctcgccaagtagcgaaaaaattcacgaagtttccgacaatgagccgcggcgccgacatgaatgcgtggcgcatgttgtagatcatgcctgtaaagatcattcgatttagcaggcgccagacgagaaatccgaaagtccaccagaacagtgttcttgtccaatcagaagacaacagggtgtaagacagtgtcatggtgggatcgagataggagcggaacacctcaaacaaaacgagatttgccattgaaaaataagcgagcatgatggctggactggtaatgacgccttttcggtcgcgggcgagaaagtacttcgtaccgagcttccccttccatccgatctcttcagttccctgaaagacaattccaagcagccatcgtgcacgctgccgataggcggcctccagtccggaaggaaagaactcgcgtgtcgcgatcggaagagtccggtggaggacacccggattgcctgtgtcgatgtcaatgtcgatggcgtacttcgcgggataggcaatgaaggcggacttgaagccaagctcggacacgcgaaaggcgatgtcgtagtcttcggtgaaggatgcaacgcggaacgcttcgccatggttctggtcaacgagatgaagcatcgcttcacggctgaagcaggcggagaccccagcgcaaggaatgacgccggagatgcgttggcggacctcgagatcctttgtgtgcatctccgcgaactcatccatgtagattccgccgatcagagacagaatgggacgcgagaatgaatagaccggcagctgaacgaagtcgtagagttcgacgagttggttgaagagcttcagttcgagcggatgaataagatcctcggaatcgtgcatgacgacgcccgcaaagcgaatcgattgctccgcttcgaacgtgaaaatgtccgagacgatctggttcaggcagtcagccttactggtcggtccgtcacgaggcaccaagaccatatgtatgttcggatacaagccttgcgcttttcgtatttcgtcctgggtctggggatcgttgagatagacgccgacgaaatagtgggcctgccgatagcgaaggagccgagagtttgaagacaacatcgagaagatcacgtcgtgctccttccagcacggaatcatgatcgcaattggccgctccggcagctgctccagaatttcgacgtccggcaggtctctggttcttgccgtgccgaacaatctgccggtccagtacaggatatcgaccacgagatcgtcgaagctggatacggcaatgatgacgcctgcaacaagcatcataatctcaaccgagtaaagatagccgggaaggtaggcggtcagattggccattggtcaggatgcatgctgaagtggagcgatcattgctgggttcgagtctcggtcggtcacaaaatggcggtagaggacatccacgattcggcggctggcgtgcccgtcgccgtaaggaaaaacagggcgcgccatcctcgcgtattctgccggcgttttgtgaagctcgtaaagcgacttgaagacggcctcacgggaggttcccacaagcttcacaacgccggacgcgactgcctccgggcgctcggttacatcccggaggacaaggaccggtttggccagcgccggagcctcttcctgcaatcccccgctgtccgtcaccacgcaccaggcattctgaatcgctgcgaccatggcgcgatagttcaggggctccacgagatgaattctcggatgcccggtgaggacctcggccgcctcgcgagcgttcggattggggtggacggggaagtagacgccaacgtccggcgtgagatcgacaaaagctctcaccgcggtgagagcgtcacgcaacctcgcgccgaaattctccctgcggtgtgcagtcaacagaatagtgcgccgcgcctgaaattccggcggaggggggagctttgtggcggcaatttccagcaacgagtcaatgaccgtattgccagacacaaagactttgtccttcggcacgttttcgcggatcaggttttgagccgcggctgtcgtcggggcaaaatggagagcggttgaaacggcgatggcccgacgatgaaattcttcggggaagggtgcatcgagttctggcgttcgcaggccggcttcgatgtgaacgaatgggatcttccggtaaaatgcggcaaccgaggccgcgtatgccgtggtcgtgtcgccctgcgcgatgacgcaatccggccgttcattttcgagaatgcggtccagcctgccgagaagacggcttgcggtctgcgcggggccatgaggcgccccgcgatgccggatggcgatgtccgctgcaaggccgagttcgaccagtgtctgatcaagaagatcgctctgttgaccactcgtcacgatcttgacgctcgcccagccggtaccacggaggcgccggacgagcggagcgagcttgatgacttccggacgggtcccgatgacgatgagaaaagctcgaataggaatagaacgcgagaactcgtcgcgatgagggtgatgcatgtccgaagccctaaatcgacgcgccagtgcggtcggcgtgccgcgcaaaggccaaactaacttgtcggtaatcagcaatgcagcctagacggagccctgctgccagacaaatgatgttcccgctatcctgtacaaaatccaaagcattgacaatacagggtaaatgttggtcgcgagagaccggttttcgctcgagcgaagccgagcccgcctaaggatgcggcggagggaatggcgcgcttgccatagagcgccgagctcagcgcgaagaggtttcgggatcgcgccatacactggcctcatagccgtctataatctggctcgtatgcgtgaattcttcgagctggcgcagcggttcgatgacttttctcgcaatgaggacggtgttgggctcggcgtgcttttgcatatggccagcaacatcgataacccgatcggaaatggtctccaggggggtcgcatcgtcaaaatagacgaggccagcattgacgccgcagcgcaccgagaagtcggcctttgaaatcttaacgtcgcggttgaacgtcttgaggctcttgatcacatctttgccagcctggcaggcatcttcgacatgagcgaagcaggccatgacaccgtcgggtgtccaggccgtcttcaagacgccgcgcgcccgaaagatgcgctctacaagttttcggtactcggcaaagtcatactgcactgaggctggatcctcgccgttcttcatctgagccgatccaacgacgtcaaccgccagaaatgcaacttctcgtccgaacgaatcgagctttttcttggtttcagcgaacacacgcaggaggtcctgtcgattcaccgcgttgccgctctcagccaccctcagtgtactttccagctccttgtcgagggccgagccgggtttgactccctcgttcttgcgccactcctgcgcggaggctctgagcacgcgacggttgagagattgctggcagctctgggctagcgatccaaccaggaaagtggtgagtactgcgagggcaatcagaatccaatcagaacgatcagccccggctatattcgtgggtatgtagcgatgaaggagcggtgccgacttgtggagaataacatcacgcgtctccagcagcgcagaagagaagctggcgcccttcgggttatcgaaaaagagaaaaagcttcggggcaagcagggcaagcacaagagcaaatgtcgcgatcccgagtaatcgcctcgcagtgaagagaaagctgacgaggaacgatttcggggcttcccgatagaccacctgaattatctcccgactcgagcgcaaacgggttccggcggactataatccgctcgcaatggaaggggcaattgccaatggcaatcgagcttgggattacccatcccgatcggacggtcaaagccgccgagggttgactgaagccaatcgaggttgatgggttgcacgttggctgttgagaaccagggcagacaggcgagcctctcacccggagcactgagttatctgacagagtaagggcattgtccctgctctgacggtctggcagctgcgtcccgagccggccggccacgcgctagccagtacggggctgatcaaggtctgccgggtcagaatgacgttgccgaaatcatagtgtttggaagcctgatcgcggacggccgcggtgcggcgttggaagccatttaaccgtgtcccacgagccgcgaccagggacttacaaatcctgttgcgccgcacattggaccggcataggtttaaaatgactaacgaaaggttactctggtttgcagaggccatgtgtgattgatcgcacgattaaattgccgtcagaaatttggtgaaatttgatgtcgattgggtcggatatccgcgagaaagcgcgtcaagtcggccagacgcaaggcgaacggggaacattttggtcgtccgacctcattccctatgtgctctctacttccgatgctctcgtcatcattttggctagcataggtggcggactggtctatcatctggtcgcgggcagtcccgtaccgaacttgttgccgtgttgcgcggtaggcctaatggctgcctttatacacatcctgcgcatgagcgggatgggttattacgacctgccggacagcgctaagccaggggtcgagatcaccgggattcttgtctgttggtttagcaccggggtcctgctggcattctttgcatttcttcttaagatcggcggtgattatttgcgcggcgcggttttcgctttttacctcgtgacccccatcggtctccttgctgtccgcaaggccactaagacccatttggcatccgctgtcgaccgaggcggaattagacgcagagatgcggtccttgtcggggatcgcaacgaactcgtcgctctcgctccgcgggatcgcctcgcgctatttggggcaacggacgtcaaggaatttcggctgagcagtgagattgattccgagcaccgatgggctgccgacgaggccgtgttcgaccagctgggggcattcgttcggcggaataactgccgggaggtgctcctcgtgctgccgtggaacgacgatgcacgcatagagttcgcccgcgacaaggtcaagaacttacccgtttcgtcgcggctgctgcccgatcggcatgtccgatccctgtccaatttcgtgtcgtcggcgcggcaacgggtgcttgctatcgaaattcagcgcgctccgctgagcgcgattgagcgggtggtcaagcgtgccatggacatcttggtggctggaccggccttatttgcactgctcccgatctttgttctcacggctgtggcaatcaagctggatagcagcggtcccgttattttccgccagcgccggaaaggcttcaacggcaaagaattcgtgatgctgaaattccgcaccatgagagtgcaggaagacggaccagtcgtggttcaagcgacgcgggaggatccgcgcgtcacttcgattgggcgattccttcgcgccacgagcattgacgaattgcctcaactgctcaatgttctgcgcggcgagatgtcgttgatcgggccacggccccacgcccttgctcatgacagctatttcgaaaaaatccttgaagactacgccttccgtcatcatgtaaagccgggtctcaccggatgggcgcagtgcaacggttcgcgcggcgctacaccaacggtggaacatatcgccgaacgtgtgaaattggatctttggtacgtcaacaattggagcctctggcttgacgtccagattttgattaagacgattttcgaggtcgctcgaaaacggaatgcctattagcgcgcgatttggcggccatttgccgccaataggttgcaatcgcgcgcgatggcctctcgaggaaaagctttttattattaaatacttgaccgaggcggtgcgcggtgccagtaggcgcgcgtgcgacaaaaaaacgtacttggaagaatttagggaattggaacattatagaataaatcgaatcatgatgcagcccaagctgcaacactgtgaagagcggatgaaaaagctaaacttggaaatcttgtcgctggatgagctctggcaactacatgaggagctcaatcagctattatcggtgcggttgaacgccgagaagcgggcgctggagagacgactggcgcagcttcgccgtgagaacgaggccgccaacgcgcccaccgttcccgccgagcgtaagcgacggccctatcctcaggttcacccgaaatatcgcaatataaacgctccctacgagacctggtccggccgcgggaagcagccgaagtggctaaccgcggcgcttcgaaccgggcgttcgatagatgacttcctgatttcgaggggctagatcggctcctctatcgccggccatggcggacattgttgatgctgcattcgaggaggctgctgtgagagttgttgtggccctaatcatcggactctcattgtctcaattcgcgcaggcatcgacggaagatttcagtcgcgcaaagcttcgggttgccgatgccagcacccaagcttgcattgcaaattgcgacaatcagaatgcggcgtgcaagcgggtttgccccacgaccctcggcgctccttgcgccgcgtcctgcgacagccaggcgcaagtttgccgtcagggctgccgacccaggtagcttccggctgggctcaaaatcgacggatgctcccgactgtctgctgtggactggtccttggccggtggttcgccgtctgccgactcttgcgctttgccgagagatcccccggaactgcctttacgatgggttaaccatgatgatttacccattctttacgctcatttcccgcgcgcgttttttgctgtccggagccccttttgccgatatctcatggcccagttacgggttctgtggtttgcctgctcgcaagccttgttgccggctgtggcgccccggggacaatcggtccgaccctgaacgctcagcctagactatccgtccagccggtatctctcgaagccaacgcgcaggatttcatgcctaccggggctatcgcgctcccgtcgccctcatccagggcggttgccagcgttgagggaggcgacggccggatgatcggctcggcagtgacgaagccgagctctgctgctgctaatggcaacgtggttctcaatctagccaatgttcccctccagcaggccgccaagaccgtgttgggcgatctgattggggtcaattacgtggtcgaccccagggtggatggggtggtttcagtccagacaagcaccccggtctccaaggcggatgcccttgagctattccagaccgcgattgcgccgatcggtgcggtgctggtccaaaaccgcggcatttaccggatcgctccggcggatcaggcggcgaccggagcggtcagcaccgtccgtgacgccacgaacagtgcggtgacggggaatggcgtccgcatcgtgcagctcaaatatgtggccgccactgaagtcgcacgcgtgctcgagccgatggtgcccaagggggccatcgtgcaagccgacgacgcacgcaatatcatcgcgctgaagggctctcaggccgaaatcgacagtatgctcgattcggtttcgatctttgacgtcgacgtcatgaagggcatgtctttcgctgtcgtgcctgtccgagccccgtgggtcggtcaaaatcccccggg

SEQ ID NO: 290 - DNA, 28275 bp, Bradyrhizobium colbertium
  misc_feature (8504)..(8513): n is a, c, g, or t
  misc_feature (20258)..(20267): n is a, c, g, or t
aagcgatcattctcaaattgcccgtcctgcgctcttttgatcccactcgtcggccgcacgatctacactcgcgggttgcgccatgagcagccgtagctgagcctgaaggatcgccagatcgtctatcgtgaagtcaacccacatggctgcttaaacatcatcagctttgcggcggagcttctttaagctgacgcgcgcttcggggcataactgcttacacagaagcgatgattggccacaatcattgatatccgtcaaaacaactttttcattaaccattgttctcacgcgtatcgtattgtgacttccatggcgatggttccctccggtgtgagggcccacagctccgctcctttttcgccgtcaacggcgcggccaacgacgctgaaaggcgccgtgtcgaacagtggtgcacgggcgcgctgcgaaaacgattttagcgttttttccggagcgtgatcgcgcgcaaggtcgatcaggcactgctgcgagtagggtccatgcacgacaaggccgggataaccttcgacgcgcatcgcatagtcccggtcgtaatgaatgcggtgcgggttgaaagtcagcgcggaatagcggaacaaggaaaccgggtccgtcgtaatcgttcggcgccacggtgtatcggctggcggcttgttccttttcggtgtgacgctcttctctccaggcttcacttcttcgcggaacactgtgtgattttgttctacaatcgaaaggccgcgaggcgtgaaaatgcgacgggtctgcgtcgcgaatatcaacgctccggtaccgcccgaccgtagcgagacatcggtgaactccgtctcgcgcttgagcgcatcgccgaggcggatcggatcgtggaaggtcagttcggttcccgcatacatccgccgtggaaacggcatcggcggcagaacgccgccagagatcggcaacccatcgtcaccgagagtagccttgggcgacagcggcatgaaatacaccagatgccaccccggctggatcggatccccgggccctggaatctggtcctgccgatcgaaggtcaccgcaagtccgcgcagcggcgcctgggtggcgacatcgtgctcgacgattttcgtcccgatgtgcttgcgcagtgcgtcaatgtccacgttcatcttgatgccgctccgggtggtgatggtcacgacgcggttacacaggcgggagtcaccagatcgggcttggcctgttcgaaaatgacacgaaccggcagcccaagtttgacgtccgtctccctggcgccgcgaagagggacttgcatccgtacgccctcctcgaggtcgatagtggccagaatgtaaggtaaatcgagcttgaacccgggattgaaggcgtgatgggtgatggtccagctgtggaccgttccccggcccgaggcctcgatccatttcacttcaaacgaataacagacgtcacaaaccggccttggatagtgacggatttttccgcattgcccgcatttctgaaggagcagccgtccattttggaggccatcccaatagggcttcgactcatgggtcggctcaggaacgggcttgaggtaggtctccgcagtcattgcgatcatcctttgcgcatgatcgcgacggatccgtcgcccatatcgccgtatccagtcacaaggccgatctcggctcccctaacttgtgccttgccggcctcgcctctgagttgacgcacaagttcaacaatgtggttcatgccgaccatatgcgcctgagaaagcagtccgccgtgggtgttgatcggcaattttcctccaagccgaatcgctccgctcgcaacaaacggaccgccctcgcctttcttgcaaaagccgaggtcttcaagttgacacagcacgatgtaggtgaagcagtcgtaaatctcggcaacgtcaatatctccaggcgaaacaccggccatggcaaacgccttcggcgcagccttcgcgatcccgaggcgcgtcatatccgggcgttgcgtgatgacgctcggtgaatccggatggccttcggcgacccccatgacgtagaccggtggtttgcgaagatcatttgcccggtccgcgccactgaccacgatcgccgcgccgccgtcgctttccaggctgcaatcataaagtctcaaaggatcggagatcatgcgtgacgtctggtgatcctcaagggtcagcggcttcgtcatcatcccatggccattgagaattgcgttgtgacgggtagacacggcgatttcgccaagctgcgagctcgtcgtgccgaacagttccatatggcgacgggccatcggcgcatatagctgtgccggggcgatcgcgccgaccggcatctcatgctcaccaacgaccttgaactggggcatttgctgaacgcgcgtgccgatgcgacccgcagacgagccgttacgaccgatcgggatcagcacgttgctgcacacgccgccgctgatcgcgagcagcgcacattgtatggccgcgacgcagctggctccgccgagcggcgcagtggccgaaaagcgcaggtcggatataccgaaattcgtgacaaagtcttcggctacgaccggcgaattcgagtatggaataatgccgtcgatttccttgggactgagccccgcatccgcaatcgcattcaacgaagcctcgagctgaagcgcaagtatgctcttgcccgacatgcgcgtgtactcggtctctcccacgccagtgatggcggccttttctttcagtgacataggcaaagctcccacggaggctcgcaacccctgaacgatttccgtgacgacggaacaatcattcaagctttctacttgacgccggccgcccaaggcacgactatttcgaacagatgttagatttaatccgtagcgcggtcaatcgaccgtggctagtcctttccgtgtagagtaacaggcacaaaccgcgcctgggaaagagcgtctctatggacctccgctacagcgcccgacatcgcgccctccaggaggaagcgcgcggcttcgtaaagaaatacggccacctttcgccgaaaacggggggcggacggaagcggcctgacgcgcgagccctggattggcagaagcttctgctggagcgcggttattttgcccgcaacattccccgcgaatatggcggcttcggcctgccggtcgacatcctggaattggcgatcatcgccgaagaattctcgaacgcgggcgtgtctccgggcatcatgaaccagggcatttccatgctggtgccgacattgctcgaggtcggaacgaaggagcagtgcattcaatggatcgggcctaccatccgcggtgacatcatttggtgccagggctattcggagcccggttcgggctccgaccttgccgccgccaaaaccagcgcccgtgtcgaggatagccaattcatcgtcaatggccagaaaatctggacgagttctgcccactacgccgacatgatgttcctcctctgccgtactgagctcgacaagagcaagcacgatgggctgtcctaccttcttgtccccatgaatgcgcctggcattgaggtgcgcccattggtcacgatgaccggccgcgccgagttcaacgagacgttcttcacggatgtccgcgtgccaaccgaccagattgtgatgggacgcggcgacggctggcatgtcgccaatgtcaccttgaagtacgaacggatgctgctcggcgacgccaacaagctgacctaccgtctggcgagggctgtcgaattgatgaaaaaaacgacgctcgatggctgccgattcatcgacatccccgagtatcgcgagcgattgctcaaactccagggcgaggtgatggcctcgaaataccacggtcttcgattaatgaccgagcaggcgaagggagaggattcgggggtcaaacgcctgatcgtcaaactgaacgggacgatgattgcgtatcggctgtcatcgctggtcgttgacgtgctcggcgcggcggggctcgcttacgaaccggtcggcgaagcggcggaagacgacgaagccaccacctggcagatagataacatgtacgacatcggcctcatcatcggtggcggctcatcgaatatccagaaaaacatcatcggcgagcgcggactgggtctgccgcgcgagccgaaatccgccccgccaaccgtcagaggataagcatggagttcggcctcagcgaagagcaattgatgctagcggattccttgcgcggatttctggaccaaagactgcccatgagcaagttgcgcaagatcgcggagggcggcttgggcttcgatggtgaactatggtcgggcctcacggaacagggcatcatgggcatcatggtccccgaggactttgggggtctgggcctctcgctgcttgatgcggctgttgccgcggaggcgcttggatatcacgcgacaccgacgccattcgcggctgcgctggtcatggcccccctcgccctgattgccagtggcgaccgcgcccagcagaaagcatggctgccgcggatcgcaagcggcgaagtccggatcggggtcgggttcgccggcatgtcggggcagaccggcgaggcggctgtccgcctcgccggaaatatgctgtccggatgcgtaacgggtgtgctcgatggcggaaacgcgacgcatttcattgtctaccttgatgacggccgtgccggcctgttcgccgcggtcggggaacccggtgtcagcgtaagcacgcatcgcagtcttgatcgcacacgaccgttgacggctttggtactgcatgatgcgggggttgagatccttggcgccgccaacgatccgaaggcagcggcgaccgccgtgctcgacgctggccgcgtcatgctcgcggccgacacgctaggggcggcgcagtccatgtttgacaaggcgctgctctattccaaggagcgggtgcaattcgaccgcgtgatcggctcgtttcaagccgtcaagcatacgctcgccgacatcatcaccatgctcgagccgtgccgctcgctggtgtggtacgcggctcacgctcaggatgggtctcctgaggaagctcgcgttgccgcgctgcaggcaaaggcgcatctaggtgatgccggccgcgaaatctcccgtctggcgaccgagattcacggcggcatcggatttacggacctgctcggccttcattactggttcaagcgcattgcgttcaaccggcagcttctcggggctcccgagcgctgcagacaccaggccgccgtagcgcaagagtgggtgagttgaagcgtcctctaatggcacgaatgttcagtagcggcaagaatggtcagcgaatattatcccacagaaaacctagtcctagtcaaacgtccgacgttgatctgcagagtattcgatacgctgtggcagcagcgggtcacggtagctttcggcgcgtgtccgaagtcttgatgcttcggcaatccgcgcttagccgttgcattagccagctcgaacattcactcggtatgaccgacttcgagcgatccagcggcggggtgcaagcaacgacggttggacgagattttctccgaactgtctgcgggtaacgctcgtggatttctagactcggtcgcttcacaattcgccgattcgagcaatactctgccttgcttggagcgtcgtggctcggttgttcacggagcaagccgcgtcatcttacaaccaacaattgtcttaatgttttgcacgatctaactcgacgcaacttgagcatgaaggtgtcgctcatatggacgatacgaattttgccggtccacctgtcggaggccgacgcctgaccgttgtcttcagccaactccaacacgcgatcgctgccgaagattacgggagttttcggcaagctgcccatgcattgtcgatcaagcaatcgacactcagtcgttctgtccagctccttgagcactcgattggcgttgtcatctttgagcggtcaagcggtggcgttcgagcaacgccggcaggtcgtcactttctgcgcatgacgcgctcgatacttgaacaagtcgaggcgctgactgcatcaacaagagcgcacgggtctggcgaagcgggtcgtctcgtcatcgggttctgtacttcgctgacggcaggcaatctgcgcgcaacattactcgacttcaagaagctttttccgcacgttgagcttgtaaccgtcgagaggtcgagaacgcggctcacaaccgcgctccgcaacagtgtcattgacgtgagcatcctaacgggcgacccgcaagccctcgatagcaaaacaacgccactctggagtgaacgaattctggccgttctgccgagtgagcatcctttggctgcgcgcgaagtcatctactggacggatctacggaatcagactgttttgctcagccactacgatccagggcgcgagcttgaggatctcttgaacgcaaagctaatctctcccgatgaccgaccgcggatcgaacgtcatgacgtcagccgcggggtcatcaagagcttgatcgccgtggggttcggcatcagtctcgtgctggagtccgatatcggggccaatttttccggtctagtttatcgggagttgcgcgacggaacggggtcgagccgcatcggcttttcagcggtttggcgagcggacaacgaaaaccctgctctccaaaacctcctgaaattgcttggcgagcgctatcccctcggtccggtggctccgtaaggcgtctttcgtgatcttgcaaaagcgcgatccgtcgccatgaatcgcgccaacattggtgcgatcagctttaccggatcatacgcagactggccgctctcgcgcgcgaggatttcagcgtaagcaagcagatcgcgatgtacggctgccggaagttcgatcgtcaacttcacgggtttatcgtccgcgatggcaccgagcttgagtttcgccatgtgtactccctatcctttgtatggctcaagcatcaagtcacggttgacgatgacacgcacagggaaacctggccggattgtgagcgtcggttgaatgttgaggttccgtcggaccacttgctgtccggtctgattgagagaattggcggccccatgccggagcgcctgaagaacggccgtgctggatccagcgtcggcgccagatccaagctctgaacccacaccgagtaatgtcgataaggccgctgctccgagcaactccttccaatggttgtcgacctcatcctcaaggccggaataccccgcggtgtctgcccccgtctgtctttcgagtacgatagagcgaccattcggcatgatcagcctcgtccagaccagaaggacgcgcgactgtccaaacgatactcggctatcatagagaccgatcaagcgcgctccctgcgggacaagacgagcccgaccggtcggcgtgtcaaaaatattttcggttacctgcgcgatgatctggcccggcaaatcggagcggatcccagtgatgagtgccgccggaatgatggtcccggcctgaattacgaatggcgaagccggcttggccaaacggtcaggactagtggtgcgtcgatcgatcaaagcattgacgaacgcgagtttacggtcttgaccgttctgggcaaatgcgtcgtcagttgaagtggctcccgttggcgaggtctcggctggcgccgcttggccaggcgatggtcgggtcaccgtattggcaaaaactttgctggttcgtgcagcttcactttcctggcttgctcgttgttgctcggcgtcaaccgctagcgggccgttttgggcctgtgccgcgacaattggacggcctagatcacctggcaaaggcggccctagtcgtggcacgtccgggggaattgaaccgtagtcctttggcaagctcgcaagcttgtccgccacattgtggtgatcggttgagtagagttcgtccggggcgggagcccgcttctcgcgtgtttgcagcgccaggaaaacggcagcggtcaagaggatcagcaccagcgccgtgcccccgatcagtgctttgcgcgagagccgcgtgacgtgcgggcgctccggccgcaaccgaaaagaactcgtttctgtctcgagcgccggcggagcacccgtccggtttgtggcctcctgttcggtgttgctcatcaagatctcccatcggttctgatgatgcggaccttttgctgttcctcgccccccagccgcagttcggcggccgcgaacaaccggtcgacaatcaggacgttgccgaatgcccggtagttgacgagacccggcttgccgtcggagttaatgacgaacagcggaggcatttcgccctgcccgatgcccggcgagaactcgatgtagaccttgcggccatcgtcaaaggcgctgacggggcgccagggaggattgtcgccctcgaaggtgtatcgatagcgccgttgggcaggatccggaatgaagggttttggcggaagcgcacgaccgcgcgcggctcggtcttcaggatagaaccaggagaacgatggcatgtatnnnnnnnnnngattttttcacgcgagcgcagctcgatcagatacgtccgccgatcggtgttgagaacgaggttggtttcgatggccgctcgtgtcggcttgaccatgatatggacccgccggatgtcaccgctgccgctctcggtatctccgaccacccagcgcaccgtgtcgcccgcggagatgggtccggagccgatcaatttctcacctggctccaaggcaatgtccgtgatctgtcctggcgccgcatagatttgatagagcgcgcctgggctatatggaaacacctgcacagcgttgaaataccccgccttccgaggctgtacgcgggccgcatcgttggcgctttcgatccgttcaacgggggcttcggcttccttctccttgccgccccgtgccggcgtccaagcgggtgggacgtgaagggagcgcggccgatcgtctgcaagcgccggttgactgggcagcggcgggatttcgtcgtcatagctgatctgcggcggcttgaatgtcgtgcacccagcaagggcacaggcgcaaatcaggagagccggaaatccactccccgttttcattcgcagtgaacgttgatttgtcggcatcactgtcaaaactccttggaccagttgatggcgttgacgtagatgccgagagggttcttgcgcagccgatcgatgtcgcgcggcggttccacgacaacgctgacgatggcgctccaccgctcggtcgcggcaagctgaccattctcgtagcggcgttcgatccaggcgatacggaagctgtcgggcgaagctctgatgacactggatacttcgacggcgacctggatcttcccgacttttgtgaagggatcgttgttgcgggcgtagtcgttcagcgcggcggcaccgcgatcggtcgtgaaatcatacgcccgaagccaatcctcgcgtagcacgatggcgtccatcgggaggccgcggacatgttcgatgaagcgggcgagatggaagccaatttgcgggtcggttgccttgtaggtcgaatttgctggcgcgaccgcctttgcttcgccgaggcgatcgacttcaacgacccaaggcgtaatggacccctgtgctgactgccagacgagagcagcggcgaagccggcagagaggaacagacaaccaaaggccatcaagcgccaattcctggcctggacacgcgccgagccgatccggtcatcccaaacctgcgcggctttttggtaaggcgtaaccggctgaggtgtgcggccataatgaacggccgatcgtttgaacatgttgacctcgacgtacgagaaatcgggcgtgagtagcgtttggtacgtttgaagagttctgagaggtgctccgacggtgctgacctcagcgctctgaatccttgagatcgacggaggccccacctccgccgcgatccccggaccgcagcgcctgcgtcgtcgccgagacaccatgactgacagcctgtccacgtttcatgcggcgaacccaggcgggtgcgcctccagatgacgcatccgcgccgccggcttcatcgcccgcggcatttgatctgccaaagcgggcggccagcgatcgcaggggactcgctgccgaagtggcgcccgcctccccggtctgcgcgcccgtccgaaaggcggatgccgcgccgcctatgagcgcgctgcctcccctcgccgcgcctccaaccatgctgccggtgagagcagccccgcctgctgcgagtgctgctccggcggcaaccacaccacctgcggccatcgtggttccgacggccgcaccggccccaagttgcggaccgccagatacaatgccgttggcaattcccggcccgaagataccgaggccaagcaacgagagggccgcgagcaccagtgccatcgcattttcgatagtcggctggttaccgccggaccccgaggtgaactgggagaacagggtcgatccgatcccaacgatgacggcaagcaccaataccttgacgccggacgagatgacgtttccgagtacgcgctcggctgcgaaggcggtcttcccaaacaggccgaacggaatcagcacgaaaccggccagggtcgtcagcttgaactcgatcaaggtgataaagagctggatggcgaggatgaagaacgtcagcagcacgacgatccaggcaaacagcagcaccacgatctgtacaaaattctcgaagaagctgacgtagcccatcagccccgaaatcgattcaaggatcggccgtccggcatccaggccgacctgggcgatccgtcctggcctcaagaaatctgcggacgacaagcccgtgccagaggccctcaaccccagactggcaaagctctcgaagacgatgcgggccaggccattccagttcccgatgaggaaagcgaagacgccgacaaacaaggtcttcttgaccagccgagcgatcatgtcctcatcggagctccagacccagaacaatcccgccagcgtgatgtcgatggcaacaagcgtggacgcgagatgtccgacctcatttcccaccaggccgaagccagagtcgatatagcgggtgaatgtttccagaaactggtcgatgatgcctgtaccacccatctatcgctccgtcggctgaggtgccggaaacaaaccgggcggcaaacggctctgatccttgacggacgcaggcggtgtggcgtctggatcgggccgggcgggattgcgcggagtgtcgatgttctgccttaggaagtggcggcgctgttccgcccaaacctttcggcattcggcaagtctgtctttttgctcgtatccaactgaacgacatcgctcgagctcggctgtctggggatcgccttctcggacgaccgaagaggcaggctgaggctgattgtcgtcgtcacgcaggtggatggtgcaagcagcagcgagcacgacgacaaagattgtcacgccgagagacagcgccttgaacgccctgaaatcactcattggtggaacatctgcactattgtgggctggtaacctcggctctgcgtcaggaagcgccggagttgctccctgccctggtcctgagcggccgttcgctgggcagattccaggttttgggcgcgtccttgagcggcgactgttgccgtgagatcggcaagctgttgtgcctgcagcgcaagaagctgattggcagcctggctcgcttgcagggcgccggtcgcgccctggctggcggtgacgagcgtcgacatctgggcgcgattggtgtcgagattactgaccaccgtagcctgcacccgcatggcatcttgaaagcctgcaaccgagttttgccaacggacctgcgcattcgcgatcagcgcctggtccgtggcgtcgggagatgccggcgcgtacgtggtggagaacgcgcgatcgatttgctggatgtcgaaagagatgcgctgggcttgggcgagcagttgctgcgtacgctggattgactgctccaactgctgcagtgacgaatagggcaagctcgcgagattcctggcctgattgaccagcatctgcgcctgattttgcagcgatgtgatctggttgttgatctgctgcagggctcgagcggcggtcagaacgttctgggcatagttgttgggatcaaacacaaccaactgcgcgaaggccggtttggaaccgacaagcacggcaagtgccaccacgccagcggcagcaacacggcggaagcggttcatttggaagcccccagttcagcgaggtgtgggatgagatcggtcgcccaagcgacatcacgggccttcagccatccactcacgaagttttcgcggccatgttcagccaacacctgctcgatcaaagcctggtcggctttggaggaagcggcggtgagggcaagcgctacctcgccaagtccgagttcgaacaggcgatcgccccggcgtgactggcagtagtagtctcgcttgggaatcgcccgcgccaggatttcgatttgccggtcattgagcccaaatcgccggtagatcgtcatgatctgcggctcgatcgcgcgatcgttgggcagcagaatccgggtcggacaactttctatgatggccggcgcgattgccgagccatcgatgtccgcaagcgattgggtcgcaaacaccaccgacgcattcttcttgcgaagggtttttagccactcccggagcttgccggcaaagtccgcatcatcaagcgcgagccagccttcgtcgatgatgagcagcgttggacgcccgtcgaagcggccttcgatccgatggaatagataagccagcactgccggcgcaacggcggttccaatcaatccatcggtctcaaagacctggaccgatgagctaccgaggtgctcgttctccgcatcgagcagccggtcatagggaccaccgaggcaatagggctggagcgcccgcttcaggatattcgattggaggagaaccgagaggccagtgagggtgcgctcctcgtgcggagccgacgccagcgaggtcagcgcagtccagacatgatccttggtctctggggtgacgtcgatcttttctcgcgacaagatcgaggcgatccattgcgccgcccagccgcgctcggagacatcatcgatgtcagccagcggctgcagggacataaatccatccgtttcgcccgctaccgcgccaccgaggtcatgccagtcgccgtccatggccaacgccgccgcgcgcatcgagcggccgaaatcgaaggcgaagacctgtccgtccggatagcggcggaactgcagggccatcaacgccaggagcaccgacttgcccgccccggtcggaccaacaaccagggtatgcccgacatcgccaacgtggagcgagaaccgaaacggcgtggatccttccgtcctggcgaagaacagcgggggcgccttgaggtgatggtccctcacctcgcccgcccaaaccgccgacagggggatcatatgggctaggttgagggtcgatatcgggggctggcggacgttggcgtaaacgtggcccggcaggctgccgagccaggcttcgaccgcattcacggtctcgatcatgcaggtgaaatcgcgcccctggatgaccttttcgaccaggcggagcttttcgtcggcagcccggggatctccgtcccagacggtgacggtcgccgtaacaaaggcttccccgatttgatcggtgcctagttcctggagggccgcatcggcatcgatcgccttgttgtgggcgtcggtatcaagaagggcagacgcctcgttggtcattacctccttcaggatcgcggcgactgacttgcgtttggcaaaccactggcgccgaatcctcgtcactagcttcacggcatcggtccggtcgagcatgagcgcccgggtcgaccagcgataagggaatgccagtcggttcagatcatccaaaatcccgggcacggttgcggtcggaaatcccacgacggtcagcacccgcagatgggcggtgcccagcatcggctcaagaccgccggtcagtggctgatcggcaagcagcgcgtcgagatacatgggtatttccgggacgcgcacccggtgacgcttggtcgagatcgtcgagtggagataggtcaacgtttcctgatcatcgagccagccacatttcggcatgaagctttcgatgagctgcaggacacggttggtccgatcgacaaacccggccagcacctcacgtgcgtctgcaccgacgggccggttgctgccctcgtaaaggagccgctcggccagggccgctccttcggcaggcggcagataaaccaaagtcagatagtagctggactcgtaatgggcgccggcctcttcgaactgggccctgcgctcggcgtcgaccaaggcggatgcgacatccgggaacgtgttcggaggataggcccccgcggcatggcgttgtgcctcgacaaacagggcccagccagatccaaggcgacgcaaggcattgttcaagcgcccggcgacggcaacgagttcggcaggtaccgcgctgtcgagatcggggcctcggaattttgccgtccgctgaaacgagccatccttgttaaggacaatgccctcgtcgacaagggcggcccagggcaggaagtcggccaggcgcgcattcgaggaacgatattcggcaagattcatcatggaaggactcacgtggagaggtgaccagggatacgaatgtgccggcgcgtgacctcgacgaactccgggtcgcgtttcgcggcccagacggccgccatatgaccgatgaaccagagcaggagaccggcaagccaaaggcgcagaccgaggcccagtgccgcggccaaggtgccgtttaagattgcgacggcccgcggtgcgcctcccatcaggatcggctcggtcaaagcgcgatgcacgggcgcaacaaaccctgggatctgctcatccatcagatcaccactccgccgccgaacgagaagaacgacagaaagaagctcgatgcggcaaacgcgatcgacagaccaaacacgatctgaaccagccgacgaaaaccgcccgacgtgtcaccgaaagccagggacagcccggtcacgatgatgatgataacggcgacgatcttggcgaccgggccttcgaccgactgcaggatctgattgagcggttgctcccacggcatattcgagcctgcggaccaggccggcgaagcgaacaggcagaaggccgcaattgatgcggtcgtaacggcccttcggccgagaggcgatcggcagttcatcactggtctcctgatgctgagaggctgtagtcgcccgacgtcccgagcccggcgacgtgagcaagttcggaaaggcggcgatcagcgccacggccagcaagaacggctatgacgttcacggtctcggcgatcagggcgcgcggtaccgtaaccaccgcctcctggatgagctgttcgagccggcgtaaggctccgagcgcgctgcctgcgtggatggtaccgattcccccgggatgcccggtaccccaggccttgagcaggtcgagagcttcggccccgcggacctcgccgattggaatacgatcgggacgcaagcgaagggatgagcgcacgagatccgaaagcgacaccacgccgtccctggtgcgcagagcgacaaggtttggcgccttgcactggagctctcttgtgtcttcgatgagaacgatgcgatcggaagtcttggcgacttccgcgagcagcgcgttcgtgagcgtcgttttgccggttgatgttccgccggcaaccaggatgttcttgcgtgaactaacggcttgccgcagcgctatagcctgttctgacgtcatgatccctgccaagacgtagtcatcaagcgtaaagatagcgacggccggtttgcggatcgcgaacgctggagccgcaacaactggcggcaacaaaccttcaaaacgttcgccagtttcaggtagctcggccgatacacggggtgcacccgcatgcacttcaccacccacgtggtgagcgaccagccgaatgatgcgctccccgtctggcgctgacaggatctcaccggtgtccgtcagaccgctcgacaaacggtcgatccacaatcggccgtcagggtttagcatcacctcgacgactgaaggatcttccagaaagcgcgagatcgcggggccaagtgcagtgcgcagcatgcgcgcgccgcgagatattgcctccgattgaatggaatggattgtcaccaccgtccccacaaatgaagtcgcctgaacgacctcagtgggatcaattagaaaaggcagtaaacctcttcgcgcaacaagcgggatgtttggttcgcggcctggcgtagaaaaagaaaaagtggggaatgtcgaaatcccaacgtagcaccgatcgccgcaaaagacggcttggaaaccaggcacaggccggccagtctaccattccaccgcctcacgcgcctcgaggatagatccctcgacgggcaccatgacaaattccgcttggctgtctcgctctgcaaacggccgcgtaagcgacgcgtaaaggtgcctgctcaacgttcggagccaaggcacagcgaaccagagcaatgcggctgcctgaaaggctgcactgagaccaaacgcaaactgatacgccattaccggataatgaccgtcttgaggtgcccattgtccgacaacaagcccgatcccgtactgaaccgcgaacgccgaaccaaaatgtgcaaggttcaacgccccatttgctcgcgcggcaaggccttgcggaaaataatcggcgatcatcgcatagctgagaactgttgccgctcccataactgacacggcacaccagggcagtagcgatggcattggcacccggagaataagtgcaagttcggccgcaatgaacacccctgccatgccagctatcaggatttcggttgttgtgccgcgtctgcgtagacgatccgccatcacgcccagcagcaacgctccgaaactgattgcgagagccatgatgaacagctgcgtcatgagactatgccgatcaagcccttccacatccgtaagccagggcgcagcccacagagattgcagggcccatgacgagccgatgcaggctgccgacagtggcgcaagtctcaggaatcgcgcgtcggaatacacagaccacaaagtaagccgggaggtcgtcgacgctgcttcattgctggagctttccggtacgccaaagtaagtgaaggcagctacggcgatcgttgcaaaagtcaggacttcgaaaagacctcgccaaccgatccaatccaatacccaatcggtcggtgccgttgcggtgacggctccaagcgaccccagcatgatcatgcagccgttgacgagggcgatacgctccctgggaaaccagatgaccacggccttgagccctgccatcaatgaggctgcaaccccaagtcctatcatggcgcgcgcaaccagaagctccgaaaatcccgttgcggtcccgaacagggtcgcgccgccggccgccatcaccagcaacacgccctggacacgacgcggtccatacctatcgagaaggacgccaatgggaatttggacacctgcgaagacgaggaaatagaccgatgcgagcagcccggtctttgcggcatcaagtccaaattcggatgccagcgctggagagatggaggcgttgatggttcggaagaggaaggaaagataatagccagcggcaaatgggaggaagacggccaggatcaggcgccaccacttccggctcaggtgatcatcgacgtgttgacattcatccgcgtccggttcggtgcttgtcgccgctcgtattgcgtcttcgtatccagcttgatcatgccggccagcagaaggcgttcgggaggtgacgaaagttggaattgctgccgccctcctgggcggcagcggatgattcctgctttatatttgcatcgcctcgcaaaccggcgccgtttggggtgtctgtcggcttgaggtcgactgtctcatcctgatcgattatcgatttcaagccgttaaatcgtgtcgcattgaggcgatcgatcgtctcctggataagcgaacggtcctgctgaacccgctgatcgacttgctcggccaggaccttgaagcgctcatcaccgagctggcaggcttctcgctgttgctgttgcgacagcggcggcatcacggcgaggtgatatcgcgcatgcagcgcgaccgtctcagcgattgtccgtaaattgcgctccagagaatcgaatcgggcgtgtatgtcgtcaaaaccgtcatgcaccgcattttctggagggcgtggattcagaaattgtgcaagcgcagcctccacgatcatgctcttgcccacgcccggacgttcagtcgcagcttcgagttgctcgtgaatcttctcggtgatccggacggttaccttgcgggttgccgcggaattccgtttgtgaggtggcgattttgccaccgcggcctggctggcctccaactcgggttcgccgtggagctgcattttcgctcttctccgtactctgagcgcaccgatcaaggccgcaacgattgcggtgcgacggattttgccaaggggtgattgagtctgatggaggcaacagaagagcagcatcgttggcgctgcaaccgtcgacgatagcgatcgtaccttggcgtagcgaaagaagggatcggcgggctgattagctcgcgccggcgccggcgtcgtcgttgccacgcacggcgttctccccgtcgtgcgattcgatactcacctccttcagcatggtcgacccgctggatagcctccgcccgagagcttcgacaaaacgatcatagcgctccgcgcccttggcgcgcgctgctgggctcgattgctccggcagcgctggcgttgatgtcagccagaagcggatgaacagcgcgatcgtctccagcgtgacggtatcgtttcgttcgagccgttcgaggacgcgcacgatccgatccagccgcttggcgatcgcggcctccctccggtcggattcgtcgggcgaaaggaaggaggcgatggcagcctccgcgaccagcgacttggacttgctgtgacgctttgcgaaggcctccaggccagcgaaggtctctggatcgagatagatgctgagttgggcctttttcatgctcactagcctagagatccatcggatcctccgggtcgatggtgacggaacgcgcgatgccctgcatcgaacggctcagagccctcgcctgcaccgcatcggtgtcgccatcatctggcgcggcatcgaactcgttctcggccaggggagccccaatgacgacatcctcgtgctgcggcagctcgggctcacggcgaatgccgccgttgggatcacgggatctccgcgtcaccttcgcgaggagttcggcagagggcgggatttgcggacggcctgaccaatcgtctgcctgcgcgaccagggcgaccggattggcgcgggatggattcaagacccggcgctttagctgcgtatcctcatagtatcggaccttgctggcgcgcacggggtgcacccccgagaccattacaatcgcctcgttaggtgagagctgcatgacttcccccggtgtaagcagcggccgcgatgtttcctggcggctgaccatgaggtgcccaagccaagggcttaagcgatgcccggcatagttcttcatcgcgcgcatctcggtcgcggttccaagggcgtccgacacgcgtttggcggtgcgctcatcgttggtcgaaaaagcgacccggatgtggcagttgtcgaggatagcgtggttcggcccgtaggcgcgttcgagctggttcaggctctgggtgatcagaaagctgcgaatgccatagcctgccatgaaggcaagctggctctcaaaaaaatccaaccgcccgagcgctgcaaactcgtcgagcatcagaagcagcttctgtcgtcgccgatcggtgtccaggctctcggtcaatcgccgtccgatctgattaagtaccagccgcatcaggggttttgtgcgggcgatgtcggatggcgggacgacaagaaagagcgagatgggccggggtccgtcaacgagatcgcggatgcgccagtcgctccgtcccgtgaccttggcgacgacgggatcgcgatagagccccaggaaactcatcgtggttgacaaaacacctgagcgttcattctcgctcttgttgaggagctcgcgcgatgccgaagccaccacgggatgaacgcgctctccgaggtgcggcgtcgccaacatcgcattcnnnnnnnnnncgtcgtctcgatcgggcgtgatgggtcagacaggaagttggcgacgccggcgagcgtcttgtcggcttcagcgtaaaggacatgcaaaatcgcgccaaccagcaaagaatggctggtcttctcccaatgattgcggcgctcgagcgcgccttcgggatcgacgaggatgtcagcaatattttgggcgtcccgtacctcacagtcgcctttgcggatctcgaggagagggttataggccgcgcttgcctggttggtggggtcgaacagaagcacgggcccaaagcgcgcgcgccagcccgaggtgagctggaaattctcgcccttgatgtcgtgaacgatggtggagttcggccaagtaagaagagtcggaatgaccaagccgacgcccttacccgaacgggtaggagcaaagcaaaggacatgctcagggccgtcgtgccggagatatcggccatcaaagcggccgagcacgacgccgtcggtccccagaaggcccgcccgcctgacctcacgtgcgtcggcccagcgcgccgagccgtatgtggtcacctgctgagcttcctttgcccgccagaccgacagcatgatcgcgatgccgatagcggcgaacccgccgcttgcggcgatgcaggccccctcgatgaatatttttggcgcgtaggcgtcgaactggaaccaccagatgaagaaagcaagcggctgatagatcggccagcgcccgaccatgaaccaggcgggcccgagctgcggttggtaggcgagacgccaggccgtccactcggtcgccgtccaaacaaaggcgagcacgacgatcgagacaaggaacagctgcccccagagaatcttggtcgcggacataggcccagaagcgctcgccccgtgcacccacgcaacgacaatatccaggcaatcgcggtcgcgcgcgccgtagcgcagagatcggcgggtcagagcgaaaggtcgcgcttgcgtccaaaactccagtcgacgccgccgggaccggcgatgccgcttacttgcctgccaagttcgcgctcaagggacggtatccagggtacgagctggaagcccaggccgttgtcaatcatagcaaaccggcctgaggcgagcgacagccttcggcgataaactcccgaaaccgactggcctgcctcggcgggcatatgcgccagccccgtttcttcagccaaacgcttacccgctgaatcgagctcgcgggtacgcagggtactgataagattgcggccgatgatgaccttgtctccgtcccggcgcacgaggccccgttccgccagcgcatcaatccgacgatcaagcgcgcggcggacctcggcaccgaaaccggctcgcgagagatcggcaggttcgcgggcaacgaggcgccgatcgagccaggtcgccccttcggccactacctgttggtcgaggttgaggtcggagcggacggcaagcgcgatccgcggccggcccctcgcatcctcaaaacgacggagttccacaatgcccccgatcggaccgtcgccggctgtatcgatgtcggggagcttcagatgatgcacacgcccgtcgatcccgtccaccacggcaaacgctgttccccttaactcgtcatccagcccgcgggcgatgagacggccgatcacgggtccgccatggccttcgccctcgagcgcccaggatgacggcgcgcgagatgcaccatccttggctaggctcttgtgcagccgcttgatgatatcgccgcgctccccgagcgcacgcaagcgctgctccgcgtcagcggccagaacccagcgcgcgggcccggctggttcagcaagtccgagccgctcaagcgtccgcatccggccgatccggatctcccgcaacggatcgcgcgcgacatcgcgttcgggccgaagatcgaccaccccttccgccctgcccgcttcccgggcaagcacccgatcgagccgcgtccagcgttcgctcgtgacctctgcctcgagaccgcgccgtatctcgagctcagatcgcgggccaagctcacgcgtgacgagatcacctgcgcgcgcccgcaggccggttccgatgtagtcgcggctgatgacaaggtcggaaccgtcgtccgcgcgaccgcgcacgagaatgtggatatggggatgctcggtattccagtggtcgacggcgacccagtcgagccgcgtgccgagatcacgcgaggcctgatccatcagctcacgggtaaagctccgcaggctttccagctcagtggcatcatccggcgagacgatgaaccggaaatgatgccggtccccgtcgcagcgttccgcaaaagcccggccgtctgcatcgtccccggcagcatcgaagagctcaccgggcgatccatcgcgggtgacaccgtcccgtttgagataaccgatatgggctcgcagtgcgccgggcgaccgcatccggcgtacgacacgcgccttgaccatggcgccccgggcgcggttgttgaggagccgtgccgcggcaacgctcgccgcacggccgcgcccgaaggacccactcctcctgactccgccgtgtgagagaccgcctgccttctgcgcggctctgagggcctgcgcgagaaacgattttgccttgggcgcgcgcgtcgaacggatacggcctggacggatgcggaaatcgtcgttgcggctcatcttgcccgccgcaaggtgtcgaaaaccgagcaagaacagcgccatggcgaaactcgcaagttgcgccggtccttcgcaatgttcggagcatgattgagattgctgacatttcccaaccgaccgaccggccgcaccttgcggcttttatcctgccctcctcggttgctggttcccagggcccaacttccaagccaacagcctcgcggtactcgcggcgatttgcgacaaaatgcagttagggtcattgcggtggatcatccaattgcgcctgcccgaacgtcggctggtggccgattcattgcgaaagagccgccgcgactttggcagttgatttgcgaagccccccactgtttgcgagcgaagcgagcgtttgcgatagcgatcgttacccggagggccgagacacccgcagggtggctcggtgaggagcgaagcgacgagtagagcgcgggccgaaggcatcgcccgtatgccatcagcaccttaatatcgtactcctccgcgaactcttgccgcgtgagcgagggtccttcagtagcaaacccgagagtctagcgtcatgatcgtgttgcagcgtttcgaatgcaaaccgaggcacgatggccgtgacaaggcgtgcaatgatccgacgcggacgtagtcctccaatctgacccggcaataacagcttgcaccggttgcgtcgctgcctgtgcggccgctctgcctgttgtggaccgccccggtgagggaagatcagagtgtgcaagaatgagccgaaataggtcggagggatgctgccgatctgcatgatcactcctcatgcgtccacaccggcaccaccctgccgataaccgcggatgcagggagcggtccaaagtatcgaccgtcaagcgagtcctcggactgccaattcatgacaaagacttcaccggtcgagagcagacggcatccctgccagaccggtaagggtcgaccgcgggcgtcgcgttccctcgcctgccctacctcaacgtcgtcgacagcaattttgagcccggttctgcagacggtctgtccagagcgcgaggatccgcttcagcatcggcacgccgatcggcaaatacccattgaaatcgagaaaggttccgagcggctccggcggtcgaattgcgacgaggtcggtgacgctcagtcggtcgactggttgcaatcgatacaggccaatgggtacgctctccgaggcgttccaaatgtaggaaggcgtctctttttcacttccggccagcacgagggcgacgcttccaaacgtcgcgagaatggtcgtcattcggccggtcatgacgtcaccttccggcgatgcaaccacgcctggtgacgaccgcgcgtataggttcgcggcgcctcgttgactgacagccggttgtgaacgtggtgccagtagtcaggcgcagcgtccgcagggtcgatcccgagtgcctctaccgcatcgatcagctgcagaacgcgctcgacctttggccagccagatagtcgcagcagactctcgccgccagggttgatccaagggacggttgagtagcgctggccggtgccgccgcacgcaagatgtcgatccgggacagcacggtcccgaagtcgttggacgtccagcgcacgaacgcaaagatgctgccgggcgcgaatgagaggacacgccgatgaaggtcgacgatcttttcagagatcggatgaccaaaccgaatccggttctcaatccgcttttcgagccagagaagctcgacagtcgtaacgtcattcacttgcgactccatgtcagtgtcggacgtgtggcacgcacaaccgcaccctggataccgggatgctggagcgcaggcctgaaaggaggagtgcggttctggtcgtcgcgccgctgttgggccggcaactgtcctgctggcaccgcatcccggccgtcgaggtccgttagaaggaatccgaaggattccctgttagtagagttacgaggtcgagaagatgttgtgcgccaaggcgttgagtgcgattctggtccccgatagcacgaggatccggtccccgatggcacgagagttgtggtccccgatagcacgagcgaattcacagcttttcccctgggtgaggtacgagcccgcgctttcgcagccgctctgtgagcgggtcgatcgcagtaggtgcaaagttcagccgctccgcgccgtttggatcctgcgtgatgatgagttcgtagcccggcagggtctgccggcgcacgatctggcgcaggtcataagcaaagtgcttgaccggcgataggctgccggacttggcgtgaaggtgtacgacgtcgaagctccagcctccgccctgacggccgccgtgcttgcggacgagacgataaagccatcgctcgagcccgccggtgagatcgaaatacccacggtcgatggtcagcacgagcgcatcgttcagaacgcccgtgtagaaccaatccggcaggatcaactcaagtccgcgaggcttgccgtggcaatctgccgtttccttccattcgttgatccaggagaagcgatgccgccgccgctccgtcggctggcggattgaggtcacgacggtcgttgactgaagccgatcgagtgcagctttgagacggtcatagtcacgcacgctggtgccgcgcccgacaaaggtcaggatctcgtatggcgtcgcggccatcagacgcgatgtcttcaggccagcgtcgcgagcctcaacgatctgcgaagccgcccatatcagaacgtccgcgtcccagatcgtcgccatgccgtgctctggcacggcctcgacgcggatcaggatggtcccgacgcgaaaatcgatcggaatgatccgcctggactttgccagcgagaagaacggataggccatcaaatcttgcgcatcgcgtgcggccaagtcgccgggcaatgcacgaaatagatcgagttgatcgcgctcagagcgacggcgcccccgtgctgagaaattgctctcggacatctgtcagcgccgctccttccccgcataaggaacgggtgcgtgccgctttgcaggcagcacggtgccggcaccgggatcgctggttgacgtcttggtgccacggtcggcccaagccttgaggtcgtcgagcgcatagacgacgcgaccgccgatttttcggtaagccggtccggtgccgtaagtcctgtgtttttccagggtacggccggaaaggctgaggaatcgggccgcctcggcggtgcgcaagtatcgtggcggcaagccggcggtaggatcgcccatctgaaaaactccgcggtcgtctggagcgccagcgagtttggcggcgcgtcaacggacacattggcggagtagagcctcgaagggggatgccgaagataagggggcgcattttcgatacccctgaagcgcgtcctattttttgcgagatgtcggacgcaacaatgcgcgatagccgccacgcatcagcgcaagaccgctctggaccaggcgaatggtccgattgcgcaggtcgtgagtcttccagtcgcgttcggaaatgcgtccggcgccgaacaggacttctgctatttcccggtaggtactgccgtccgtgcgcgcatcgagcgcgcgcagagcaagcgcgagccggcgccggcgatgcgtggaaagcgcatgcagcggcggccccggaggcctgccattgagggcgcgccacagccgcttgcctgcatccgcgcggaattcaaagtcagggtcgagcggcagttcgaccgcataggtaccggcaacgaccggcgcttccttgaaccaaacgcgatgttctaccttctgcaaacgcaatactgcgtgccaaccatcagggccttgccgcagctgaccgtcggtcaagctgccgagatccagggcgacgctcgcttgggggaccgcgtgcgatacaggccgcaccggaacgaccgtcggcagaacttccggcgcccagaagacggtctgttcgaggcaggaatggctggggtcagctacgaaaagacaagccccaacgctggcggaattccgggcttgccttgggaagcgcctctaaggcgctacgacaatcagctccgaaatcgggattacggcggagacattcccacgctagtccggtgatttccgcctcttgaacgcgatcataggcgtctggcgatctccaatcgaattttggcattacgcgtccccatcgcactgcgaaattgaaacgcgataaacccgaccagctttggttgaggaagtccctgatcctgcatcgcgtgatgcatcggatcaaacacggaaatcagggagtaaattcctctacggaagggcttcaaagattcggatttgatgcgccgccgcgcagcaaatgacgatatcctttctccgtcatccatttcgcacgagccaaatgggtatcgaacgcacgccttgcgcgatcatgctcaagctctgggtcgatctttagtaccagttgagccacctcgcgccagtctgctccttccgcgtccgcatcgagcattcgtagatacgtgatgacgtgctcctcatcgtacaccgtgagaacggggtctgtcggagctacgtcggccacgtcgggatctggaagtggttttttcatgcgttcgtcacagagcgaatgattccaactcactgcaagccataactgttcgccagacttactttagccctattttgatcggctccaccagcccgacttggcattgcatccccaccgggatcaagaacgaccgtccgcctccgcgtattgattgaatagcatatctcgtggcgaataggaacgatcgttcctagaacgatcgttccggttcgggttcccatgtcgctatggatctcaaggagatcatggcggtaaacctgcgtcggagacgccacgagctacaaatgacgcaggaggaactggccgagcgtgcgggcttaagcgctcgttacgtcggcgctatcgaacgcggcgacgtatcggcaagtgttactgtgcttggacaaattgccgaagcattgggatcggagccgggagacttgctgaagcggtctgggcgcggaaacaaatcgtaggcgtttccgtcgtcgagcatattggcgtggtcggagcgttgaagcttggatgcttagcttcacccaatcgcgatctcccaagagtgaaccaaacagaagccccgcccggaggaactcgggcggggcggagcgagctctacgctttagtcgccgttcttacgcgagcgtgaccacagcaggctgtagccttccccaccctcgtcgtcgaacaggttcgcgtagatcggcgcgttgaaggaaggatcgtcaagcttgagcgagagtgaacttcctccgaatgagtggacacc

SEQ ID NO: 291 - DNA, 13270 bp, Bradyrhizobium colbertium
  misc_feature (297)..(306): n is a, c, g, or t
  misc_feature (740)..(749): n is a, c, g, or t
  misc_feature (1287)..(1296): n is a, c, g, or t
  misc_feature (1706)..(1715): n is a, c, g, or t
atgacccggcaggcgatttcgccgcgattggcgatcaggatccgtttgaacatgctcttcacaggggcaaattgtcgtgcttcttcgccgggatctcgaccttcttgtccttcagcatcgccagcgcccgcgcgatccggcgccgtgtcgaatgcggcatgatgacgtcgtcgagatagccgcgctcggccgcgacgaagggtgacaggaagcggtcttcgtattccttggtgcgggcggcgatcttgtcggggtcgccgatgtcagagcggaagatgatctcgaccgcgcccttgnnnnnnnnnngccgatctcgtcggcgatcctgaccgcgtgcttgtcgtcctcgatgacgccgagatagcccggcacggtcgagacattggctttcgcagccgctttcttggattcgatcttgtcgcccatcgccgcggtcgcgccggggttcgggccgatgaaaacgatgccggcggcttccagcgcgcgcggaaacgcctcgcgctcagacagaaagccataaccgggatgcacagcctcggcgccggtctttttgcacgcctcgactatcttctcgatcaccagatagctctcggctgcggccggcgggccgatcaacacggcctcgtcggccatctcgacatggagggcgtcgcggtcggcctcggaatagacggcaaccgtctgaattcccatcttgcgggcggtcttgatgacccggcaggcgatttcgccgcgattgnnnnnnnnnnaccgccataggccttgcgggtgatgacggtgacgagcggcaccgtgcactgcgagtacgcgaacagcagtttcgcgccgtgcttgatcagaccgccatattcctgcgcggtgccgggcaggaagcccggcacatcgacgaaggtgacgatcgggatgttgaaggcatcgcagaaacgcacgaagcgcgcggccttgcgcgaggcgtcggagtcgagcacgccggccagcaccatcggctggttggcgacgaagcccgtggtgcggccggcgatgcggccgaagccggtgacgatgttcctggcgaagctctccgcgatctcgaagaagtcgccctcgtccacgaccttcaggatcagctccttcatgtcgtagggcttgttcggattgtcggggatcagcgtatcgagggaatcgtcgaggcgctcgatcgaatcgaagctcggccattccggcacgccgtcggtgttgttggacggcaggaagtcgatcaggcgacgcatctggagcagcgtctcgacgtcgttctcgaaggcgccnnnnnnnnnnaccgccgagctcctcggcggtcacgacctcgttggtcacggtcttcacgacatcggggccggtgacgaacatgtagctggtgttcttcaccatgaagatgaagtcagtcatcgcaggtgaatagacgtcgccgccggcgcagggacccatgatcacggagatctgcgggatcacacccgaggcgagcacgttgcggcggaacacgtaggaatatccggcgagcgcggcgacgccctcctggatgcgggcgccgcccgcgtcatagaggccgatgatgggcgcgcgcgccttcatcgccatgtcctggagctttgtgatcttcagcgcgtgagtctcggacagcgagccgccgaacaccgtgaagtccttggcgaagacaaacgtcttgcggccgttgacggtgccccagnnnnnnnnnngctctggcgccagcgcggcgctcctcgagtttctcgattacggcagtcatgaggtacggtgtccagttttcaagccagttcggaagcaatagaaagacgttggatatgcgaggtctgacgtcgtggcgctgcgggtcgctcgcgcgcctgatgatgcgagcctggtgatgcgtaattcgttgtcggcaatttgccgcgccgcaactaacacttctcgtcagggaggcggcgagaccgagatccctcttcggacttcctcaagaccatcccgatcagagcgcacgcgcaatgacgatgcgctggacgtcgctggtgccctcgtagatctgacacacgcgcacgtcgcggtagatgcgctccacggggaaatcggcgagatagccgtagccgccatggatctggatcgccgccgagcatacttgctcggccatctcggtggcaaagagcttcgccatcgatgcctcggtgaggcacggcatttccgcttcccgcagttcggccgcatggagcaccatgtgccgcgcggcttcaatgcgggtcgccatgtcggcaaggcggaaagccaccgcttgatgttcgataatgggtttgccgaaggtcacgcgctccttggcataggaacgggctgcctcgaaagcggcccgcgccatgcctacagcttgcatagcgataccgatgcgcccgccctcaagattggagagggcgatcttcagcccctcgccctccgccccaagccgcaggctcttgtggatacgcatgtcattgaaggcgagctggcaggtgtcggaggaatgctggccgagcttctcctccacccgtaccacctcgtagccgggcgtgtcggtgggcacgatgaaggcggagatacccttcttgccggcgctcggatcagtgaccgcaaaagcgattactatctgcccgttcttgccggaggtgatgaactgcttggcgccggagatgatgtagtaatcgccgtcccgtcgggcgcgggtccggatcgcggcggcgtcggaacccgcttgcggctcggtcagtgcaaagccgcagatgtattcaccagaggcgagcttgggcaggaactccctcttctgagcctccgtcccgaacttcaggatcggcatgcatcccaccgaggagtgcaccgcgacaatggtggaacaggccccgtccgctgcggcgacttcctccaaaaccaaggcgaaggcgatcgcgccagcttctgagccgccataggcttccggcaccagcatgccaagaaagccgagttcggcgatggctttgagctcatccctggggaatgctcgctccctgtcgcggatcgctgcgccgggggctagccgtgcctgcgcgaaagcgtgggcggtcttgcggatactaatctgagtctcggtgaggatcatgttggttgcctctgcgagtcaatgcattcttcgagcgttttgaggacaagcgcgctcccgcggcactgaagggccgagcctcagctcagccgctcgatcgccacggcggtggcctccccgccaccgatgcaaagcgacgcgatgccgcgcttgaggccgtatttctcgagcgcagcaagcagcgtcaccatcacccgcgttcccgaggcgccgatcgggtgaccgagagcgcaggcacccccatgcacattcaccttgtccgccggcagatcgaggtcgcgcattgccgccatggggaccaccgcgaacgcctcgttgatctcgaacagatccacgcccttcagggaccaccccgtgcgcgcggccagtttctccatggcgccgatgggagcggtggtgaagaggttcggagcctgggcatgagtcgcatggccgacgaggacggcacgcggcgcaagcccgcgcttctcggcgtccgaccggcgcatcatcacgagcgccgccgcgccatccgagatggaagacgagttggccgcagtcaccgtgccgccctcgcggaaagcaggtttcagggtctgaattttgtcgaacttggccttgggcggctgctcgtcaattgagaccgcgacctcgcttttccccgtcttcgccacgactgggacaatctccgatgaaaacgaaccgtccgagattgcgttctgcgctttggtaagggacaagatcgcgaaggcgtcctgcgcctcgcgcgtgaaccggtacgcctctgcgcagtcctcggcgaaagtgcccatcaggcgtcccttgtcgtaggcgtcttccagaccatcgagaaacatgtggtcgatgacccggccatggcccatgcgatagccggcgcgggcgcggtcgaggagatagggggcgttggtcatgctctccatgccgcctgccaccaccacatgggcggagccggcgtgcaagaggtcatgggcaaacatcgcggccttcatgcccgaaccgcacatcttgttcacggtggtggcgccggcggacagcggtagtcccgctgcgagaccggcctgcctcgccggtgcctgtccttgaccggccgggagcacacagccaaacaccacttcatccacctgatcggcggtgagcccggcacgctcgagtgccgcgcggatagcggtggcaccaagggaggaggcatttacgtctttgaagtcgccctgcaaaccgcccatgggcgtgcgagcggcgccgacgatgacaatgggatccgatgccgtcatttccttggtcctttctgttgctggcgcgggaaaggcgcgcctagtcgttttcgggagacctcagcgcggcgccatgcgcagcgcgccgtcgagacgtacgacttcaccgttcagcatggtgttctcgatgatgtgtctggcaagcgcggcgtattccggtggacggccgaggcgcggcggaaagggcacgctcttgccgagcgaatcctgaacgtcttgcggcaggcccgccatcatgggcgtttcaaatatgcccggggcgatcgttaccaccctgatgccaaagcgtgcgagttcacgcgccgcgggcaaagtgagcgccgcaactccgcccttggacgaggcgtacgccgcttggccgatctgcccgtcgaaggcggcaatcgaggcagtgttgatgatgacgccgcgctcgccctcgccattgggctcctccttggcgatggcgtcggcggccagccgcagcatgttgaaggtgccgatgagattgatggcgatcgcccgcgcatagctgtcaagccgatgaggtccgtcacggcccacgatcttctcgccgggagcgacgccggcgcaattcacgaggccgtggacatgcccgaatgcctccttcgcgagcttgacggcggcaagccccccctcctcgctggtgacgtctgccttctggcccttgaagttcgggccgaacgtgacagcgctctcagcgagcgccgtagcattgatatcgacgcccactacctttgcactttggccgaccagcatgcggacgacagccgcacctaggcccgaaccggcgccggtgacgagaaaaacgcggtccttgatctgcatgaatcttcgtccttgtgtctgcgctccgcgcactcaggcggtggcgtccttctgcttctccgcctcgcgattgcgcaacagaaagcgctgcagcttgccgctcggcgtcttcggcaactcctccgcgaactcgatctcgcggggatacgcgtgggctgaaagccgatgcctgacgtattgcctcagctcctcagccagcgcttccgtcggctcggtgcccttgcggagaatgatgaaggccttcaccagctcggtgcgctgcggatcgggcttaccgatgacggccgcctcaatcacatccggatgttcgatgagcgcgctctccacatcgaacggaccgatccggtagccggacgaggtgatcacatcgtcggcacggccgacgaaactgatacggccgtcgctttcgagctccacggtatcgccggtgaggtaatagccgccagagatagcaggtgtcgtctgctgccagtagccggtgaaccagagcagcggcgagtttgcgatgtccacggcaagaataccaggaatgttgggcggcagctcctggccttcctcgttgagaaccgctacgcggtagccgggcatggcgaagccagcggagcccgggtgcaccagatgcttcaagcgatgatgattgttcaccaccatgcccagctcggtttgcccatagtgatcatggatcggcgcaccaagatgctcggcgaaccagcgaatgacctctggattgagtggctcacctgcgctggagacgacgcgcagcttgcccctcaccggctccgcggcctcgggaccggcagcaatcagcagccggtacgcggtaggcgcgcctgcgaggttcgtgatgccgtgacgtttgatgatgtcgtaggtggaggcggcggaaaatggaccgtcgtaaaatgtagtcgcgcaaccaagcagcagcgggcccgtgaccgcgtaataaagaccgtaggcccaaccgggatcggcgatattccagaacttatcgtccgggcgcaggtccacagcatcacgcatgtagacatagaaggcgagcagcgcattgagaggtacaggcacgcccttcgggaggcccgttgtgccggacgtcgacatcatgaggaagaggtcgctgcccttgcgcagcaccggttcgaactccgcgtcctggcgcgcgagctcggcatggaagtcgaggtctgcggcgttgactgttgcttcgccaggcttggtcacgagagtgacccgcgggcgctcctccacctcatcgagctttggccggttggcgagatcggtgaccaccagcttggccgaggacgtcctcaggcgatgctcgatggccttggggccgaaagcggtgaagagcggctggtagacagcacccgcccgccaagtcccgaggatggtgatgagaagttctggggtgcgcggcagaaggccggcaaccacgtcgccgggctgaatgccctgagccaccaagaaattggcaaagcgggcggacagttctttcatctgcgtgaaggtgtaactcgccttgcgtccgtcggcgctctcccaatcgaggatgacgccgcccttgtgcacgtggcggtcgcagcattcgatacaggcgttgatgcctgcttcgtgacctccctccagctgggcggccaaagcatcgagccggaaatttcgcgcggcgttcgcgtagtcgaatgaaccaaaggcagcgggataggcggggtcagccatgtcactcctccatcggtcctttctgccgtgacggcgaggcccgttatctgacactccgatctagcgacgatgcgatatggtatgcgatgacccaatcgaaccaattccgtgatcggttttgccatatgtcgggaggccgaaggtgaaggaacggcagatgatctccccaggcttcgtggacgacgccctcgtgggtttgcgccgacgggggatcaatgaggtcccgcttcttgcccgcgcaggtcttccgccagtggttttgcagccggtctcggcccagcagtatggagcgctgtggcttgcgatcgctgatgcgatcgacgacgaattcttcggcgagggggctcggcccatgcgctcgggcagcttcgcgttgctgtgccacgccatcctttcggctgcgacactagagcaggcgtttcggcgttcgctccgtttcctgcgtgtggtgctggacgatccctttggcgaactcgtggtggcacagggactcgcacatatcgtattgaaggatgcaggtgcgccgcgctcggcattcgcctatcgcaccttctggattattgtgcacgggatcacctgttggacggtcggccggcgcattccccttcgaggtgtggatttccgctgcgcctcaccaccccatgacgcggactatcgtctcttcttcggcgcaccggtttgcttcgacaggccggagagccggctctccttcgatgccgagtttctgaagctccccaccattcgcaccgagcgggccttgagagagtttctgcggcgagcgccggcgaacatccttgtgcggtaccgccatgattcaggcctcgccgccaaagtgcgtaaccgcctgcgcgaaacggtccctgtcgactggccggacttcactggccttgcctcgcaattgcgcgtctcagcgcccacgcttcgcagaaagctgcggatggagggacttagctatcgcgacgtcaaagacgagatccgccgcggacttgccatagagagcctgctgcgcggccagcgcgacgtcggcgacatttccgcggatctcggcttctcggagcccagcgctttccaccgcgcctttcgcaaatggacaggcaagagccccggcgtatttcgccgcgaccggggttagatgtgtgacaatttgaattcctgtaacaccacagtcttcgcggccaacgcgatccgcggccgacgggccgcaagaattgaggtctgtcgagcagacactgccttacagaatatgctgcaaccaaaataggtggcccgaacgagcccgaccatgacatagagacgatagtgatccgcaaccaatcggcgccatcgtcgccgattctgctattcgggcagcgcggcgcgggtgaccagccacagcttcttcacaaattgacctttggatgtccacgttaggtgcatgctgaacctcagtccgatcacgtcaccggcctggaacgagtactcctttccgctctcggtctgcacaacatccacctcacccttgagcagcggggtcgcttcatcgcccagcgtaccggtatggggcgcgactagcgatcctttcgcgtcgacggacgagctggcgattccctttccggaacgccagacgccgctcatcattgtacccgtagaaccagtttgccaacgaccagcggtctctcccgcccgaactcgacccacttaatagaaaaaggcccgcgacttcggacgaagtcgcgggctcggtcgtaacaacacgaccagtctagggaggaaatgccccgctagggacctcgccgtgcgcttacctctgtgggtttgcgccacaatgccgccgcggtggggtgtcgtgccaaatcctgatgccgtagcgcagcaggtctaccgccagatgcgggccggcaaaacacctccgccgcaggcactgcggatcgagaaattgaaacgcatgagaatggtcgttgccccggctgctgagaaccctcttactacaatttgtagactgcgcggaatccaccccagtgtcggccgctgacgcgaatcggaacgtcgatctcacgcatcatcactggcttgtcgttgcccaggtctcgcggatagctttggatcaaataggaccgtatgttacggctcgccgccagcccggctgcgtcgttaaaaatccggcgattgcgtgaattcgcttggttccaggcgaattggcctcgccgttgcggttgagatgcagccttgctgtgcaccggtacataaccgttacggtcggtcaccacgctggttacaacgcgcgaatcctgcgccgaaaacgcctccaggaaggatggcagcacgcgttcagcccagtcgaggaagccgacgcgatattgcaccggatcagtctcatcaatctcaacgtaactctcgtcgaataactcttcgatacttacgtctcctgccacaatgccgttctcgaagatctttgccagcgcgtcgcctgcctctaaggagcgcgtaatgaattctgtgttctcgtcgtggatgctccagaccttgtcttcaatcctgtccttcagctcggcgtccagcgacacgaactccacctgggcaccagcgggggtatactccgtggcacggatccggcaggggccaacgccctccacagtggcattcagcactttgttcatagctattgccgccgcattttccccacagagcagcatgccggaaacggaaatctcgaacacctcggctttgatcggtgacggaggcgcatcgatcagtatctggaatcggcacggcactcgctcggccctgctctcgtcacgcccatcgtggcggagcatgatcgcacagcgcatttttagcttttccgcgaacatcttcacggccttaccggccagtgcgacactttcaccatggatctcagcttctttcgtcgcgctgtcgatttcgctaccgctcgcggcgacggaaacgataaactgggaggccgacgcagcattctgcgccatctcgcccgtgatctccttctgctcggcgacggcaccatggacatgttcgaagaccggtctgatggcgtcgatagccttcgtgatcctatagacggcatcgatcgatgccgaggaatcttgctggagtgcctcaatcctccgctttatttcctcggtagcgttttgggtctgcactgccagcgccttaacttccgttgcgacgaccgcgaaccctttgccagcaggacctgcgcgcgcggcttcgatcgtcgaattcagggccaaaagcgtggtctgtttggcgattgcggcgatcagatcgacaacattaccgatagcaccggacgatacgcgcaactgctcaacctttaagctcgcctctcgcgccgcttcgcgggcctggtcagcgagcttaccagcgtcggccacctcggtgcctatgtcgtgcgcagaccgcgtaaatttctccgaagccagcgtaaatgtctcagccgtcgtctgtgcatcgcgcgtttgctccgtcaaggacgccgcacgaccgcgaatgcccgccagagtgttcgcagtcgaacccgcgccgctggccacagaatttgcagcacgctgtagctgccggaccatcgctaggagttcaatctcaagaagctcaagtatttctccggctgtctggtcgggggaaattgctgcggccttggccggcgctacttgcgctgccggtggcggaacaactaacggtgctgggctcggcagcctcattcttcgaaaaagacggaactccataaatatctcgtttgtttgaagatgtagagaaccggcttgactacgttctatttactagccattacaactatcgtaattacacaaacatgcaatcaagattttggagggatcggtttgagttgacgaaatctgagaggggcgacttgctttgcaaaccggacatacggaagttcacgaaaagcgcattttgagacgcgagacggaccatcctggtcgcacagcggtggggccgacgctcctgaagagcctgatgtgttggtgcgcgaagatcgcttgcgcgaaataatcggacgttcctagcggagacgtcagtagcgtcgtcacccttctccgatctcgtgattcgcccatcatgatcggccagaattcacaacgacaaattacgctaaaaacaacgactgtggaggattcgatgtcagtattccggcaggcgcgcgattatctcctcgcgaacagggaggactatgctgctgccacaactggcttttgttggcccgaccttccgtcgttcaattgggcacttgattggtttgatgccgaacttggcggcaccgcagaaagcatgaacaacaccgcgctttggctcgtcgaaagctcaaccggcattgaatccaagttcagcttcgtgcaattaaaagatcagtcgaatagggtcgccaatcactggcgtaagctgggtcttaggcgcggcgatcatctgttgatacttctcggcaacgtcccggcactatgggtagctacccttgcagcgatgaagctaggcgttgtcgtgatacctgccacaaccatgttgagttcagacgaactttccgatcgaatcgagcgcggcaatatccgagccatccttgccggtgttgatcagcgtcaaaaatgcgacggactagcggctaagaatgttctacgcatagtggtcggtgaaggcggtgattcaagctggcacgcctacacggatgccgccgaccactcggcgtcgtttgctcccgacgagccaactcgggcaagtgatccattgctgctttatttcacttccggtaccacggccaaaccgaagcttgtgcgccatagccatcgcagttatccggttggctccttatcgacgatgtactggctgggcgttcgtccggacgacattcatctcaacgtctcctcgccgggctgggctaagcacgcttggagttcgttgttcgcgccctggaacgctggcgcgaccattttggtcgtagatcaagctccgtttagtgccaagttgttactggccgaattgaagcgctgcaaagttacgacgctgtgtgccccgccaaccgtttggcggcttttgattcaggaagatctcgccgctcacaaaatgtcgttacgcgaggtttgcagtgctggcgaacccctaaatcctgaagtgatcgatcgcgttcgagaagcgtggaagctcaccatccgcgatggctacgggcaaaccgagacgacagcgcaggtcgccaattcgtcgggacaggcggtcaaggtcggtgcgatggggcgtccgctgccaggatatgatgttcggatccttgatccggacggtgcgccggcgactgaaggcgaggtctgtatcgcgctgggatcgtcgcgtccggctggactgatgcaaggatatcaagaggcggatgggcagctaaaggggcttgatggcgatttctaccgcaccggagacgtcgcattcgtcgatggcgacggttacctcaccttcgttgggcgagccgacgatgttttcaagtcctccgactaccgcatcagcccgttcgaactagaaagtgttctcattgagcacgagggagtagcggaggccgcggtagtcccatcaccggatgctatccggctgtcggtacccaaggcctacatcctgctaacggcgtccacgcaggcctcccggcagactgcgctgtcgatctttcagtacgctaacgaacgcctcgcgccgttcaagcgtattcgccgcatagagttcgtcaccgaactcccgaaaacgatatcaggcaagatccgccgggttcaacttcgtcgattcgaacacgagggcgatcggaccgcgccgttccgcggtgtagaatttttggaacctgaactgcccgaactggaagtcggtcgtaagcgcagcaagtcgtagctttgcgaagtggggactagcgctagttctcaaaataacgcgcccaagggggcaaccacgctagtggtttgatgcgtcgcgtattccgagatttttcgctacccttctcgagcactcccacgacaacggcatcaggatgccatcgttgctgtgcgcgcatcgagcccgtcaatgcacgtcgatgctcggggaacagggcgcgcgcaacgcacgccgagccgcaccggtcgtgcgaaacccaacgagatccggaagcattcgcaagctatctgttggcctgagctggatggcatctagagagcatcgcaaacgcgacaccgagcaaagcagtgcggagactttgatgcaccgcgtctatcaaagattcattgatttattatcgagcgctggcgacgccgagggcttttccaaagcgatggcttccgcggcaatggcgatggatttgtcttccccgtgggtcggtcaaaatcccccgggt

SEQ ID NO: 292 - DNA, 5744 bp, Bradyrhizobium colbertium
aggtgtccactcattcggaggaagttcacatcgagaacccgacgtagcgcgtctccatcaacgtcgccatcgacccggatgcggtgcccgctaccaagatcaatctcgatgatgccctggctcttccgtcgacgcaccgccgtcgtcgtcaatggcgcttcggccacctcccgcggcggcacagacggtccaatctcgaccggcacgaacggcgctatactcgtttcaccgtgcttgcaaagctctttgcgccacctgaacagctggctcacatgaaggccggccatgcgagccacctcggaaacgctggctccgggctcgagcgatgctgcaacaagccgttccttctcatcctgcgaccaccgccgccgccgctcgaccgatgtgatcacctctgctctcgaaatcgtcatagcgcttctcctaggattacccctaggacctgcagcccacgcgtccctcaaacaagacggcccttggcggagggataccgtcgagccagctttcaaggtttcaaggcgatcccgggttcgatcaagatgtcggaagtaggatcgcgctccatgaacgaggagcttgcggacgtagcggttcccgcgcttgctgataccgaggagcttctgcttacctccggtggagtgttcccgcggaacaagtcccagccatgcagccagatcgcgagccttctggaactggcgcccgttaccgacggccgcaagaactgcggttgcgcccagcgccccgatttcggggattgtcatgagccgacgggcaacatcttctcggtctgcaatcgcggcgatctctctcgtcacctcatcgatgcgctgctccagccggcgcaagtcggcaaacaagtctccgagaagtctgcgcatcgccgacgagaggtcgttcgacgcatcttcgagaaccagcggcaagtcgagcttgaacagaccagctccttgcctcaatgactctacccattcttggaggaatttgcggggctcagaccatcggccatggcggcataacttaaaccaaatggcctccggcaaacccggtgcggttcaactattctgggtacagagcattgggcgacctgttgggtgcgccgtccatccgccactgcgatgttagccaattgaaatgcagcggtagactggtccatcccgcaattggatctcaacaaacctgccgttgatgtctttgcggatttgggccgatgaatgtctaggcggcgtgagctttccggcgctgtgaacgtttaatccggtgacgatctgtttgagtaggacggtgatgtttactctcctagagtaacgttgatcttgatctaaagagagagcctcgatttcctgcacaaggtcgcatagcgcagccctctcctctcggcccacgcagtcgagcaaggctgggtgagcgagaaaggcgagaacggtggtctcgaagtcgctgtatgaccaggccgatcggctgcatgcgccctcgctcaagacctgctcgcacaccagaacctgcacgttcgagatccgatggaaaataactttgctgccgcaataagcacaccagcataagccaccgaaaatgttcgcgagatcatttcctttgcggccgcgaagggcgaggttttgctgacgagcaatttgcgcagcgtcaaaagtcgccttgtctacgaccgccgggtaatagttagaaatgggagggccgctcggaatacccttcttattacccccggcaaaggatttcggttggtactcaccataggtcgctcgattcctgagcatgtaatcaatggtggtgtgatcccaattaggcgactgggtgaaggttggcaccttctgttcgtcgagataattcgcgatggcgtagctgcccattcctccgatcgcgagatagaagattctttgcacaatttctgccctttccggaaggaacacaaacgccgatcggtcgtcagtaaggctaagccagctcggggctgctgaaatcttctttaaggacacttcaaggtcactcgataattactgcagagagaggcgcctcgccttcgcttctttcgcctaggggttcttgcttcctgccgtttggccccgagtaacgcgaggctagggttcccctgtgctgatgcaaccatcacagcaccgtgaaaggaactcacaattacttcaatgacttcctcgaaatgcattgtgaatgcatgcgtgatttttgtgcaacacccatcggaaaacaagcttttcggggccgctttgaggcgatctgttgttgtgtgtgcatggagcttcgatcatggtgactgggcgacggaggggggcatcccaaggtcgtcccgtttaggttattcgcttaatgagacctaagctacgaggatgcgttgatttccaacgtcttttcgcgggcagttcaaacggctttgtacagggaattgtacggggcttcaaacttggaggtttaacatgaagttggtaaagagccttttgctcggctctgcggcgggtctgatcgccgtgggcggagcgcaggcagccgatctccccgtgaaggccaaggcggtcgaatacgtgaagatttgttcgctctacggcgcgggtttctactacatccccggcaccgacacctgcatcaagctgggtggttatctgcgcgctgaagtcgcgctgaacaccaacagcgtctacaccggcaactattccggcgtcgcgggcgcgcacaacgccctcagcaactattacaccatgcgggctcgtgaagacctcaacattgacacccgtaccgcgacggaatacggcgtggtccgcacgttcttcgatgcgacgttcagttggaccagcggtggctacagcggtagcggaaccaccgcttatgacagcaacaaccccgccggaactggcagcggacaggtggctggtggtgcgctcggcgtgtactacgccttcatccagttcgctggcttcacgatgggtaaggcggtctcccagttctccgctccctggaccaactatcccggcaacaacttcgacggtctcgtcggtggcggcggcacggtcactggcgtcaaccagttcacctacaccgctgacttcggtcagggcatcacggcgtcgttctcggcgcaggatcaggtcgcctactatcaggcaggcatcaacaacctcggtgctccgggcggcttcggttacggcaccagcaacatcggtggatcgcgctctcctgatctggttgccatgcttcgcgttgaccaagcttggggtttgttccaggcatcggtggccgcacatgagaaccatgctggttacaatactggtgccggcgaattctcgggtcgcgccagcgacaagtggggttgggctgggcaacttgctttgtcgatcaagaacatcccgacaggcgcgggtgacacgatcaacgttcagggcgtctacacgaacggcgcgacccgctacaacatccaagaccttgccggtggtgcgggtgcgtggacaacctacagcggcactggcgtggctggcgcctaccagagcctcggcatcgcgttcgctcctgatgcagtgtacgccccgggcggtgaccttcagctcgttgagacttggggtatgcgcggcggtttcacccataactgggatccgtactggaacaccggtatctacggtgcatacgctgcagttcgctacaatggcgcatcaaagacgctgatgtgcggtgtcggtggtgtcggtggaacggtgagggcggcactgggtgctgctggtctcaccaactgcgacccggattacaacatcgcccagctcggggtaatcacccgatggaccccggtcaaaaacctcacgttctcggctgatttcacctacacccgcttggatcagaagtactcgggcgtcaccggcgctggtgcgaatgctgctgtcggtaagccggtagcggcgtatgagttgaaggaccaggatacctatcagttgctcctccgcgctcagcgcaactggtaagcttagtcaaacgacgtgacctccaagagccctcggcgggaatgccgggggttttcttgctttattgagtgatggtggaccttatggcccccaatgaggcccgggcacggccccccgaactggttgaacagatcgttagagcggtccgatctgttgatgttcttatctcgaaggttcaaaccgcatgggcaagcaagatggggctgactgttccgcaatggaatatgttggttgtcatcgcagaggctcaccaatgcgggggtctccaggtcaaatccgttgctgaggctttgcgagtaaatggctcgttcatcgtcaaccaatcgagaccattggaagaactcggcctaatccgaaggaaaagctcgagcactgataagcgactagtctatctttccgctacgccgaaggctctcaaggaccttgctggaatacaaagcagcagggacgcggtgactgcgtccatcaagaaggaaatgggcgaggcagcgacattgcacacgatagaactgctgcagcagcttgagcggtgtattggtcgttgtcgtgtgaggttgcagatcgaggactaaaaagtcgtccgtgaagagcggctaagcgattgatctggggtcggattattcgttgtgacctgttttgagattgcagggttttgatgcttcgggcatcggaaccctgcaatttcgttttgaggattgaacgaagccgctggcgcggcatttgaggagaggtggtaacggccgcctcctgtctgagaggatcgagggttttcagagcccaacccttcagacaggaggttttccgatgacccaggtgagccctctccgccgacgcatgatcgaggacatgacggtccgcaatttgtcgccgcccgaatgtcacgcagcaacgcgaccgggtccaagctgatgcagatttcctgcagtcgggcccgaaccgcatcggaggtacgtgggtcggcggtcagccgctgatgcggcgtcgtcggcgcactataagatttctggccgcgtgcgccatcgcgttgctttccgatcagcttgaacggcggccggaagaagtttaagaacaggcgcactgaacgatagagttctgcgagcaacgcagccgcctcgagcccctaaaaccgccgataaccaatcatccgtcggaccgcggctccgttcttctgttcgacaaatgcctggtcattgttgcggtaaggtcggcaacgcgtgaagacaatgttcgcctgctcgcaatacgctttcagcgtctcgtttatgaaaacagaatcattgttggtatcgatgccctggagcgaaatcggcagctgacggcgaagctctgtcaacacggtgctcaggagcgttgctcgcgcaccagcaacggcgcacactccgtccaaccggtcgcaatatccgtgagcaccagcgtctggataaaactgccgcgcgccgagggtccgctgtgggcgactagatcggcttcaacaaagtccggcgccggatccttccagtcggcggacgtccgtaccgggttgctccgtcgcaatgcgctcgccaccggccgacggcgctggcgcccgccctcctgtcggatcttgaccagcgcccggtcgaccgtcgacgcgctcatcgccagcagcttcgcgcggatttcaggcgccaggcccatgtggccgttccgttccatcgactcgatccggagcggcagcagcgctttcagtctcttgccacaaaccggtccgaggcctcccaaagaactaccgtaaccggtatgagctcccacgtccgg

SEQ ID NO: 293 - DNA, 1058 bp, Bradyrhizobium colbertium
ttgagaagggtgatcttgcgggcgcattgaaggaaattgaactcgttgaggcttcttcgaaggaagttctgagacttctggatgatcttggacgatgatagactatttggtgagctaccgcgttattacctgactgagcgtagggtcaggtacgcgcgttttgtccgcgaagccacaatcgcagatcgcgaaggctagaaccgcgctggtcgcctcggatttgtccaatccaggcggtgtttggtcgtgagaccggccgatggccggaggttcgacggtgccccgctctctcagccaagtccccgatgatcccgctcgacacaagccttgatgctgcccggctgctgagtagtcggtggcgcatggaccggatctggagccgcgatcagataagcttcgcggcaacagtaaccagttcaatctgctgctgaagcacgcgcagtgtgtgccgaaagcgcagacgtgtcggctcgtcacgcactgcctcgatcacctgatcaagccggtcgtgctgcaatttcatatgtcgtagaatattgacgagcgcctccttcgagcgtgcggcgggcgacgcaatcgaatcaaacggagcctgaagaactggcgtctcggccgatctcttcccgagacggacaaattgaacgatctcgcccatgatgtttccttcggtggcccggaaattatttgctgacaaagtagagcgcggctggcgagcggcctgcgtaccttaagcagctcgcacgctttcgagaaactccgcaacttggaccttgagccggttgctttcagacgagagcgactgagccgaggcgagcacttgcgacgacgccgagcccgtttcgctggcgccacgttgcacctccgtgacgcttgaagccacttggtgcgtgccttgcgccgcttgctgcacgttgcgtgagatttcccgggtcgcagcgccctgctcctcgaccgcagccgcgattgctgacgagatctcggagatgcggccgattgtgccgccgatttctcggatcgcgaggactgaatcctgagtcgcggactgaatgctgtcgatt

SEQ ID NO: 294 - DNA, 17731 bp, Bradyrhizobium colbertium
  misc_feature (5074)..(5083): n is a, c, g, or t
  misc_feature (9977)..(9986): n is a, c, g, or t
ccgggggattttgaccgacccacggggcccatcatcagggagcgattgatatgtcggaggcgcttctcaagaacacaaaggatacagacactgccaaggaagcgcgcaagaccctccagcagaatgaaaaggatttgaaagagcttcaagcaaaaatgaagaaggaagagaagaaggaggataagaaaggctaggtgagcgggctcgtacaggccacgatcagagcctcgtccgaatgcggtgcaagcttctcacgttgcttgcaccgctgcgagagttgggacgcttggtcagtgctggtgccccgccggtttgttcgcttcacccataggcttgtttgcttcgctggacgatttgttggcttcgctcgttggcttgttagcttcgccggtcgatgccttgttgggcttttcgggtccaccttgcgattgcatattgggcatgtcttgcatgtcatcgtcaggtggagctttcgcgacgatgtcttcgtactgtgggccggacattccctttaatttcatgacgaacgccacaacgttccagatcgtatcgtcatcgtgggtccgcccccacgccggcattcccgtcattttgattccgtgctttgtcacccaaaatatcgtcttggcatccaagctcatttgatagagattcggtggcttaggatacagcccctcgcccaattcggtatcgggtttgccgggcgccgaatggcagtttacgcacattgcggcatactgcccggctcccttgagtatccgttgctcgtcggatagattcggtatggtgagagacgtcgcgcgagccgcgattgagcgctcgcgcgtgacctccatgatctgtcgcgtaagcgcccagtggggcgtatcggcgccaatgtcgtatgtgcctgatgtgataaacaaaacggctcctattgcaacgccgatgacgagcagagccgccgcagttaagactttcctcactccatcaatccttatctttgagttcttcgcatcggtttagcgccgctgcgcttgtggccggccactatgaccgaaactctgcccgcgacgatcgaaaatgaccgatcatgcgcaagcactcgcaggcctgctggaggcaggcatttgcgccaggtgtcatcaaaatgcggcgcaacagcgtcagttccccaaagcagggctgcaaaaccgagcatcttgccctctcggactgaggccggccggtccagctcgacgacatggagacgaccgtcggcgcgcaacaagggcgcaagaccccgcagcaatgcaattttgtttgctggcatgagccgatgcagcgcgaaattgcagatgatcgtatcgaacgcctcgtgcgtgaacggaagcggcgcgtctgcgggcacttcgataaagtttacattattgaggccctggcgtcccgcagagcgcgtgtaccgttgacttccctgcggctcgcccgcaacaaagcagacttcggggtaatgggttgcgaaagacagagcaaacgcaaaactgtgcggcccgacgataagcacctgctttgcacaatcggaatcgagcatagggtaaaaacggcagcaccactcgacatcggtgacgagggatcgcagtatgcgatcatagacaaggcgcgccgcgctgacccggagctgaaagactgcggtcttcagccgtcctgcgactgcagccgggattgtctgccgtctcgcagcatgttcggtcattggattgcgccagcgctggaggggcctggacccggagagttattcttggccggccaagatctcagccaggcgacagcagctagaagggcgataccgccgatgctcaccgcgatctgcatcagcaaagaattggagatgagttcgagcaagaaatgagcgacgaacgacaggaaaataccgacgcagaaaacctccagcgatcggcgtccgcagagcatcatcgggcgaagaagcggactgcgaagccagggtcggtcacgagggaccaggctgatcgtaagaacagccagcgcaatgaaatgcagaagacgtgacggcgcaagattggttttgtcgtcgatggccaaaccatctgacaaccaggcgagggcggatgattgcatacccagatttgcggcagtgctaccaatgagtgcgaaaacgaggtaaaggatacagaacctcagtacggccggagaggttagcaaccagtgtaattgcttcgcgccgccgagagcgcaccaggcaccaagcacgaacagcagctgccaggcgaacggattgaaataccagacgccctcaggccaagcgggcagattccagcctaagaggcgcgcaaaaacgtacaggctgagcgagcaaaagagcgtcgtgttgggcctcgccaacatcgcgcggagcacgaccggaaaaaccgccatcagcacgatgtaaagtggcaggacgtccatgttcaacggcttgaactttagcagcaatcccgcagtgaggtattcaatcggattggcgatgagaccggcgacgttgaattcgtccaagaggtgagaatgacggtaggtttgggcgacccagccgatggcggcgacgtagaccacaaataggagaatgtgcgccacatagagctgccagacgcgccgcatcagtttgactgcacctgcccaaaagccgtcacggcgcatggctttggagtaggccaaggccgccgtgtagccggagatgaagacaaagagatcggcggcgtcgctaaagccatagttcctggtggttagccaagcgaccgcattgttcgggatgtggtcgagaaagatcgtccagttcgccagcccgcgaaacagatcaagcctcacgtcccggccgtcgccagccggcgtcctgccagcacgcacctgcaccgctcgtaccggtatattcgtcatgcagttcatcgccgcggtcggcacgcagatttggcactgtgacggcgaaaaggattgacgttcatcgatgtgtttactcgcattgcggtgggcgacatgtttaggggatacggcagtcgatcgtcagatcgccatcgcctggcagctatcggcacagaaacgacaagcctcggcacattcgtccatgccgccgacacgttcgcattccctcgcacactccgagcagattgccgcacattcctcgcaaagttggcggtggtgaggcgatctcaacagcatgaggtgtgcggcggtgcgacacatctcggcacatgtcaagatcagccgaatgtgcttcgccgcgattctattcgcctcttcggccaggccgcgcttcacgtccgtgtcgaggcaggtccggtagcagcgcaggccgtcgtcgacgcaggtcgacaaatcctcgtccatcagcttggtcgaagcgttgttcatcgttcctaccgcacgtcgagaaccagcatcagcccgccgccgccatgctgctccacgttgttattggccgtgtgatgtggaatgtggcagtgcaccagccacttcccgggctttcgcgccgtccatactacgtcgtagcgctgccccggaccgacgttgacggtgtcggcctgatagcgcgcgctgtcctttaggttgacgccatcgaccgcgacgacctcgaacggcccgccgtgaacatgcatcgggtgcacgaagttgttgttggtgccgatgaagcggagcttgatggtctggccgaccttcatggcgacggtgtcagtcgacggataggccttgccgttgatcgtgaaatagttcggcagtgcgccttccatcagcatggccggataggtcaaccactcccgcttcagccattcctgaagctggatggtgtagtccagatccgccttaatctccgtcgacggatccttcggcgagatgagcagcgcaccgtaaagcccgagcgcctgctgccggtctggatgatcgtggctatggtagaaatacgtgccgctctggcccacctcgaagtcgtaggtataggagccccctggcggcaccggatcttgcgtgatttttgcgggtccatccatttcgttggggatgatcagaccgtgccaatggatcgtcgtgctctccggcagcgcgttgcggaggttgatccggacgtgatcgccctccgtcaattgcagtcgtggtcccgggacctgccgattgtaggcgtaggcatccactgcgacgtccgggagtatattccatcggatgacggacgcttcgatatcgaagaccttgacgccgttctcgatgcgcggttgaaggatttgatctcctttggcgtctttcggcgcgacatatgtcactttcctaggcttgacggccgccatgtctttcatggcttcgcccggaaggtcgaacgtgttgatcatgccaggcggcatgatggaggcatcgacgtcacgcaagctcagccgaagattgaccgagaagcccggcagaaccatccccgaaatcagcaggaacgatgtcacgcctgcgagcgccgccagttgaggcgtggtggcgtcgctggtcatctgctgtccggctccatgccccgcatggcccccggcggctgatggagcctttgcctccccatgcccttcgtgaccccgaggaccgccttgcccgccctcatcccgctcggtcatcagcccgtgcttgatctttttcttcaccatccagacgttaaacggatgggcggttgcaaatccgaccatgacgccgagcgacatcacggcccagaagatcaattcgagcgggtccattgcgcgcatgtcgcggcccatcatcagcaggctcatcgttggcgccatgcccgccatcatggcgttcatgctgataaattcgggcataaaactcttgcggacgttttcccagtaggtcccgcccatcatctttttcatgaacagggattggaaaatgaacagtccgaaagagaagccggcgatgtattcgacgatcaggtcgatccacatcggcaatcccagagaggctgtgacggccgccgccaggatgattccggtcgcatcgccagcgacacaatggatcgtgctgccgatgccctgtttccacagcggcgaggtgaaatgctcatgctcgcccggacgcggctctttgtcggcaagcacgtagagcnnnnnnnnnntatgcggtggacgcaaaagcgagcccgaaccaggcgatcaggaaatagtcatagggaagagcgatcatgggtgatcctcgtcttggaaagcgggcacatcggggacagtacgtagcggcagcttcatgagcaaacttccgccctcgtgtggcaaatcgatgtgccatggaatcggggcgcggccgcgttgacgaaagccaaaccttcgatagaaggcgacggcaccgtgattgtccgcccatacatgaagcgttagagaggcgtgcccctggcgtcttgcgtcgcggacgaccgccttcaacagagcggttccgacgccctcacgacgatggtcggggccgacgcagatgttgttgaggagatagcttttccaatcgttcagctcgaaccggggcttgagcagaacatcgcgagaggtcggactgcggacgggatactcgttgtgaatgaggcccgccggaaatgcattggccattcccacaacggcattgccggcgacggcgaccacacatcgttcgaatgagtagatgccgccgggttcgcagaccatctcatgataaacatccagtgcagccgcactttgactgagccctcccagaataaattgaagaacgtccccgccagctgcatgagccagcagtgcgatcgctgcagcgtcggagatgcgcgccttccgcacgcaaaaagggtggcgtggcccggcatggttggcatagggcgggtgcaagcggccttggtccggcccggtcatttgggtggccagcttgcggaaagaagcctcttgctccagtgttcgctcgaggtcgcgaagacgttgtatccgacccagctatgcttcttcattcgtgcaagacccttgagttgatcaagctgcatgaagacgccattgtcctcgtcgaagataaaacgctcgagcgaagtctgttccgccagatagcgcgacacggcatgcgtcttatcagaaccatgctcttcgcaaatcacgaggcaatcacccgcgagcaaaccgcgcgcgccgcgcaacgcctcgatctcgacgccttcgacgtccaacttgatgacaagcggaacagacgcgtcgatcagcccggcctcggctaatccgtcaagcgacactgtctcgacgcaccccggctctgctcgtgcgagcggaacggttgcgaacttttcatgtctagcgccgtgaatacggacaaagtcgccgcttcggcctgcgagggcggcatgcaagtagcgaaagcgattcccattcagttctgcattgcgcttgagctgcccaagattcggtccggatgcttcgattgcaatcgcctgttgcacaccaaaagcgcggctcgacgcaaggatcgaccaatagccaaaattggcaccgcaatctacaaaggtatagcgatcatggcgtgcgacacgtaaaagcgcttcgatctcttgttcgtagtgatagctgcaattaagtagcctgctccaatacgcatcgcagaatggcatggcaaacagcgcatcctcattcaatcgcacaaggagttcgcgcggcgccatgattgacccaaccactcggcacccgatgccataatctcggtgcccgacaggcttcgtggctgcggatcccgcccgcaacgcggcgatagcggcacgaacaagcgagctcgcgcccgtgagttggcccctggcgcgatcaaataaaagcggttcgggctgttctcgagcaagcgttcctgaactggccgtcgaaggtggcatcgctgctcctgtcaaaggaatggagacgcacgcatgtgaccaaggtcggtgccgcatccgttacggcgcggcaccgccaactcctcatttggccttttgcagcttggtgatggtgatgcctcctgaggcccgttcggcttcgaactggaccttatcgccgaccttcacctgcttgagcatcgacgaatcctggacacggaacaccatcgtcatgccatcatcgtccatatcgaggttcttgatgggaccatgcttgagcgtgatttttccagcggcttcatcaatcttcttgacttcgccgttgaccatcgcggtctgcgcgaatgcgacggtggacgaccatgcgagcgtcagcgcaagcgcggtcattgcgagcttgttccgtttcatcttcaatttcccttcgtttgttttggtcggcattgccgtttgatgccgccccgcttcgtttagcgccgcgttagcgaacgcaagttctggtcatttagccttctgcatcttcgtgatagtcactccctccggggcccgctcggcttcgaacctgaccttgtcgccaaccttcaagttcttcagcatgccgggatcgctcacgcgcagcaccatggtcattgcgtccatttcaaggtttttgatcgccccgtgcttgagagtgattttgccggcggcagcatcgatattcttgacctcgcccttgaccacggggttgtcagcgaatgccgacccgaaagggacgatcaaggtcaggagaacggcaatcttcaggcttctcatgtgaactccaattcttatgggattgaaatcacgtaggattacttcacggtcacggtgccgaccatgccagagtccctatggccgggaatcagacacgaatactcgaactcgccggctttggtaaacttccagaccatctcgttggccttttttggcgcgagccgctttgcgttcggatcatcgtgctccatgtcggggttcttcttcatggcttcggcgtgcttgaggttctcggcggtcgtggcaagcacgaattcatgttcgagttcaccgttgttgcgcaggacgaacttgatctgttcgccctttttcacatcgatcttcgtcggcatgaacatcatcttgccgtccatctcgcccatcgtgacctgcacggcgcgggccggcttctgaggatcgccgggttcgccggccgaaaacgattcgtcgtggctgtggcccttaggaccttcgcctgcccaagcggttgcggagatggacgtcaccgcggcgaaagcgatcaaagtgagcgttgcgtgtttcatgatcttgttccccgtgttgttggttgaagcggccttgtttcccaaaaaactacatgcctttcattcccttcatgcctttcatagccttcatgtcgccctctttcggagcccccgctggcttgtccttgcgaacagggggctgcgacggcgcgtcgacctcataggagacggtaccggcgggatatttgtaggggcccggatccttgtaatcgtcacgcgccaagtcttcacgtatcttcatgaccgtgaacatgccgcccatctcgatcggaccgaattgaccggagccggtcatcatcatcaaggtgttatcgggcatcggcatctccatttcgcccattgccatgccggtcgatcccatcaccatcgcatctggcgcgagctttccgacggctcttgcgagatcctttttcgacacaccgatcaaattgcgcacatcgtgccccatcgcattcatggtgtggtgcgacttgtggcagtgaaatgcccagtcaccgggattgtcggcgacaacatcaaaagcgcggatggcaccgaccggtacgtcgatcgtcgtttccggccactgcgcgctttccggcacccagcctccgtcggtgcagcttacggcaaagctatgtccgtgaaggtggatgggatggttcgtcatggtgaggttgccgatgcgaacccgcactttgtcgttcagccggacggccagcggatcgatgcccggaaacacacggctgttccaggtccacatattgaagtcggtcatctccgtgatcttcggcaggtacgtgccgggatcgacgagataggtgctcatgatgaacacgaagtcgcgatcgactgggcggaaactgggatcgcgtggatgcacgacgatcatccccatcatgcccatcgccatctggaccatttcgtccgagtgcggatgatacataaacgtcccgctgtgcttcatctggaattcgtagacaaaggttttgcccggcggaatgtggggctgattgagcccgccgacgccgtccatgccgttgggcaaaagcacgccatgccaatgaatggtcgtctgttccgggagtttgttggtgacgaaaatgcgcagtttgtcgccctcgaccgcctcgatggtggggccgggggattgaccgttatagccccacaaatgaaccttcatcccttcggcaaattcccgaacgaccggctcggcgacgagatggaattccttccaatcgccgttcatgcgccaaggcagcgtccagccgttgagagtgacgaccggattgtaatcgggtccactcgagggacgcagcggcggctgcatcacggctttgtccatggtcggcgcttcgggaatgctcgcggcctgaacccgcccgctgacagcgcttgcgctgatcgcggcggtagctgtcaaaagacctcttcgggatagcatgactgtgtctccactcagttggtagctgcgttcgcttgcgtgatagaaggacgtgtctgccgacgcgtctctgcgctgcccccaccattgacggccgtttgtagttcggcctttgccagccaaaactctcgtttggcttcaatcgcggcccgcatcgccaccagccgctggcgggcctcttgcagaaccgtgaaaatatcgacctgcatgctcgaaaagcggagctgcatctcgtctgagatgattttccggagcggcaagacttcgcgttgataatggcccgcgatatcgtaactcgatcgatagactcgataggcctctcgcgcctcggagcggacgttgacagctttttccgtcaccaaattaaacgcttcattgtaggtttcgagcgcgcgtcgaacacgaacctcgccgccgtcgaagatcggaatctggnnnnnnnnnnccgtgtcgcattcgtcagcgcaagggactttgccagagcagccagctcgatccgcgcaatttggagatcgagacgatgggtgaccgcatcaacttcgataaagggcagagacaagggccgcgctggtaagataggtagcttacccggcaggtggaagcccaaatcgccgtcccacaatcccaggaggcgcaccaggcgttcgcgcgaggatgttgcctcctggcgaagagttgccaactctgccgcagtttcggcatagaacgcctgttcccgggcctggtcgagcttgttcatcgcgccggtctggccgagtttgagcgcgagctgcgcggttgcctcagccgtagatttcgcctcggtgaacaaaccgacgagttcattggcggcgagcgcccgataataggctcgtctgacctccgccgcgagcctgagcgtttcttcggcggcccgcagttgcgcggcctgaaaacgttggcgagcgatttcggaacggaacggtagtgtcgcgagcgccagtatatcgccgacgatctggcgctcgatttcgagcgctccatcgcccgctatccgcgtaatcgagaaggttggattaggaggcagactgtcctgaacaagatccgcctctgcgatcgcaagttcattgtaggctgcctgcaatccgcgattgttcaataaggcgatctgaacggcggtgtccacggtcaggccgcgtcgcaacagccggcgcacgttgtcgtgtgcccattctgcgtcttgcggcgtgcggatcgcaacgacgtctttcttgatggtgccctgcgccacgtctgcaacgacagacatgccggcatccggggaaaaggccgcgcatccggaaagcagcgcggctgcgaacgccgccagcatcggcatcgcacgacggataagtatcgcatttgatcgtttaaacatcgcgcttctcctattgagcccgcttcggcgctggcgcgacttgttggttctgctcctgccagcccttcggtgcggccgggcgaagatgcgtgtaaggcgcaacggttgagcggtagcctaccggcgcgacgggcaccgccggatcggccggatctgctccgacgagcagataggatcccggagtacatcccgccaacgccataacgctcagagccaggcttgcggctgccaatcgttgccacgtcatcctgctcgcgcgtctgatcgtccaggccgcgcgcactgttcccccattacgcatcttttttcctcgttgcctcgcttggaaccgaacatgcagcccgtgccaggctgtcactttgggcgggtgtgctttgagccagcatgattcgactgtcaggcgatgtcagccgcccctcctgcgaaaccagtcctacgcgcaaaggaatggcgcaccccgagaggccgcctccgatcagcagcatttgcgcagacctgagcacgaatttacgtaagcgagccgcgttcgccatgccggcgaacggcgcctccaattcggcggccatctaattctcccaaaccattgatgcacgactgcgaggcgcgcccctcgggctcgctacgcgagtttcgaaccgcagttcaggcgattggcggtcgataaagcggcttggagggtttgttccccagaacttgcacaactaaagcttgatgcgtcgttgtgaggacagcggggcggccgacgtcgggcatggctgcaggcaaggcgctcacgcaggacaagccacagcattggttgctgcgatgcctgtgcgtatcgtcggaaccgtggtcccccgcagatagttcgtccgccgcatccgctacagcagacatttttccgtcgctttcctgctgagcaggatcggcatcaacgtgatgaacaccggcggatggaaccggatgaatgtgggaggcactagagctatgattgtcctggacaagacaagcgacgctttttccgctcccaagagttaacgtgagagctggggacatgacgcaaatcagataaaaagccgcgagcagccaagctgcccttgctcgcaaagatctggtcacaagcgtcagcatcgtcgccgcttcgtccaccaaacggttctgttagactaccttcccggaatatctgcaccaaaatatagttcatgccaagctggacgaaaccgaaaattaaagtttttggcttggtgtggcttgtcggttaaacggtccgctcgcacggcggtcgctcacctcaggccgtctgagttgtcccaatgggcgccaatatccgtaaagcgcatgatcgagggccttggatcgtcgtttgactaatcagttatctacggagcgggagctctggaaggtttccaaagaatagcacccacatacttgccgcggggcaggagacgaaatgctcagcccgccgaacgaggtgttcaaaaatcgagcaagcatgataaagaattaatctggctgggctttcgtagcccggcaaacttcggcagaacgcctcctgctggagcggggatcgcacaaccccggatcgtggtgggtggggcacaagaccgctcgaagtcgcggccgcgcccaccatgattgatctcagaatcatcctcctttctaaacggatactgcgtggctttactgcgaaaaaaacaatatcgggcgcacgctgacgatcatcgtgctggcaagccagatcttcatatagcaacgacgatgttccctatgtttgcgatgctcggcagcggtatgttcgacctgatatggttgaggttgtgtcgaacaactgagatccggcccgtgtcatcctccagcgcacctcgtgcaatatgaccggcccgttgcttgattgcatcgtcgtcggtggcggtccggccgggctgactgctgcactttatctggcgcgatttcgacgcagggtctgcgtgattgacgcgggcgaaagccgagccgcatggattccggtttcacataatcagccgcttttccctgccggcatcagcggcacagagattttggggcgcatgagagagcatctcacgtctttgggcagcgaaatcctagccgacaaggcgatcgctcttgcgcggatcgaccagggatttctggtcgaactcgccaaagaagctgcagcggcgcggacgcttcttttggcaacgggcgttgtcaatcaccagcctgacatgggtgcgcagatccaccgcgatgccgttgcagccggacttatccgctattgtcccatttgcgacggctttgaagccaaagaccaaaaaattgtcgtattgggcagggggccccacggcgtacgcgaggcgttttttctgcacacgtacagccaggatgtaacgctcttttgtgatccttcagcaatagatgaccgcagttcgacacagcttgcagccgcaggcatttcgctcatcaaacagcccgtcgcttgcctgaccgtcgatcaagccaaaatactcatccaaaccgcgtccggcgcgcgcctccggttcgacaccctctatccggcgttgggctccagcagcaacacggacctgtttttgtctttgggaggttctctctcaagtcagggatgcattcccgtcgattcgcatcagatgacgaatgtggagggtctttacgctgccggagacgtggtgcagggcctcgatcagatcagcgtcgcctgcggccaagccgccatcgccgcaactgccatccataatcggctacgcgatcttgacggcttcggcgatccctaggattaaggaagatcgacggccttggcaacctccatcacttcgctccaggctggaagcgagcgccgatgcgcgttgctttccgccagaccagatggcactgataacggcctccatcccgatcgatgaccagctcgaacttgtcgggtatgtcgagcgagctctcaacgtcgagtgcggcccctcgcgaggacatgttgcggacaacacagctgatggcaccaccattgccaaatctaatggttgcggccttcaacacgcgggatcgaaattcgtcgcgcttttcgtccatcgcgtaaaaccagctgtcacgtgctcctaagctggaactttctcctaaaattcattcctctgcaagttccgtctttttgcaatgcggaaaaaaggttgtccgctgcgccgacgttaacctttgtttcgctcaagccaggaaccggcgcagccctcgattgcttacaatgccatacgttatgtaggagatccgatcatgtccgtgttccacaaatcatcgcagcgcttggcaatcgccagcctcttcgcaatgacgattgcaacctcggcatccgcggccccgttggcaccgaattcgccagccgccttggcgtttggacaaactgcggcgagccaatatgcgcagccggtccaccttgtctgcgatgactatggcagatgctatcggtcacgccgctatgttcgaactccttattatagtggcggttactatccgggcagttacgtttatgcgcccggcttcggcttcggcggacatcattacgatggcggccatggttttggcggtcatggatttgctgaccacggattcggaggccacggattcggaggtcacgggtttggaggtcacgggtttggaggcgggtttggcggacacggcggcggtcaccacgactgaattggtgcgcggtcactcggagtaggcgagtgagcaatgagtatggagacttcagcgtgaacggggtcgggcgaagctcacagacgggccggagtggagacactcactccggcacgttgctgagcttattgagatcgtccgggtcttgggagcttttcagaagttttccgaccatctcgtaggagcgtgtaatttcagccaggcggctcatttcccgcgcggtggcgacgttggattgttcgagggcgccgctgacgagggtcacttggccgaagccaagctcgatcggcggttggtcggttcgcagcagactttcgccggccggttgcaggcgctcccggtctgcaaatctaaccaggcgaagctgacccaaaatggctcgcttggtgctaacgataccatcgctggcaatgctgacctcgccgtctttcgagggaatttggattgggccgctcttgcccaaaatcggttggcccgcaagggtgacgatctgtcctgaactgtcgatcgtcagggcgccggctcgtgtatagcgatcaccttgcgcggttcgaacaaccaaatacccctcgccttgaatggtcacatcaagtgggttgccggttggctggagcgcgccctgactggaacttccgaactggaagcgcggatcgaccagggatagcggacgctcccttttgcctgtctcatcgactcctttttcgggcttcagatattcccgaaacgccagctcgcgcgcccgaaatcctgtgctgttcgaattggcaacattgtgggcgacgacgtcaagcttgcgttcaagcgcgatcagacgtgagaggtgaataagcgtggtttcgcccatgtccccgaccccacttagccgaatcaggctcacacaatgtcaagaagcgctggacactgcaatagatagacgtcttctgcaaagcaggcgcgcccacacttgaagggcacgaacgggtctgaacgcagccgcctcatttccatcgagccattaacggccggcaagttgaagttccgactgcgccgcgctgaagacggcatcgaatgcccggcacttggtcaccacccgttgcagcagctctttcgaccgtgttgaatcgccccgatgaccttcataatcgccgacgaagaaatcggcttcgcacccgtgcttgcccgtatcgtcgtttgtcgccagggcggcggagacgacttgttccgcgtcagatgtgccgaggtagagatcgaccactttgctgggccaaaggtcccgtttaagcttggcggcattttctgcaaattcgtcatcgtcccgatcgtgggcatgcaagcgggcgatgtgaagccagatgacggagtagggattgagcggccgcaagcgcaccgccactttgaaatcttcgatgctggctttgaaatcttcaagaaaaagatgagcttttccgcgtcccagatagagcgcggggtgaccgggatcgatctttaatgcgcgatcgaactcatcaagcgcttcgctgtaacggccgagcgttgaaagcgcattggcgcggttctccttgaacttgacatcatttggcgagagagcaatagcggtatcgaaatcggcgagagcctgttcggcctccccatcgatgctcatcaacacgccgcgattctcataggcgtcagcaaatttcggctgcagcataatcgcttgattgaggtcgctgagtgctcttgcacgatcgttcttctggatgtaagcgaccgcccgactataatagagcttcgctgcgtcgggacgctctgcgattgcctgtccgtatgtctctatggcgcgatcgacttgcccaaggcgcgcaaatgcgcccgccaaattcatgagaatggtggggtcatgcgggacgagcttttgcgcgtaatgaagatcttcgatggcctgatcatactggcgttcagcaacccagatgagggcgcgatagagatacgaattcggaaactccggcaacaggacaatggctgaatccagatcggacagcgctcgccccctcacctccagttgctcgtaactggcgccccgaccataatagagcattcctcgttgagccgccgaaagattgctctccaacagggcgcgatcaaaaagcccaatcgcgagcgcaaattgtccacgcatcttggcctcaaacgccgcgcggcccagctcgagcgttggctcctgagccgtcaccgggccgatcgtcaacagaccaagaatgaaaggcatcaggatggcgaacaaacgcgacatgatgacagcctcgtgtgaacgttcgccagcctagcacattgggctggtggaaaaggcgtccagccgaccgggatttcatcggagaccgcatgccgaagctcgctcggaccggcctctcccttcctgtatagtagcctcgcagcggccgtcctgaccagaggcttgttaacctttcgttaaccatttcggaccaaacagaaactgctcaactcatcctgaggggattcgcgatgacgggcgcggaagtaatcgcttcggccgaagacgctctctttaccgtcgttctcgtgtccgcccctctgatggtggtgggaaccatcgtcggagttctcgtgtcgctctttcaagccctgacgcaaattcaggagcaaacgctgatttacgttccaaagatcgtagccacgtttctcacgtttctcattgcgctcccgttcatggcggatgaatctcatcggcagttcttgcgcgtgatgacgcgcatcttggctccctagataaacggcggtcaacccgatccgcttcaccgcaaagccgagcgtctcaagaaactcaactaacgcgtcgggttcgcttgtgaccttcgcctccttcagaattaccctggcatccacaacgcacacgctcgagagttccaatgacttgggaagttccgtcgcgaggaagcgcttgccgttaccccctataaacagtcgcgggcgctcaaatacccgcgcgacagcatctctacgcccaacgccacctcgtagcgtgctgcttctcaaaactcaaatccgcgcatcgcaaagccgcttcgaagagacagcccgaaattacgttgcgctcgtcaccttcgcaccatcttatggatgcgatatgtgtcctgaacttcctccgaatgagtggacacctg

SEQ ID NO: 295 - DNA, 384136 bp, Bradyrhizobium colbertium
  misc_feature (1698)..(1707): n is a, c, g, or t
  misc_feature (31135)..(31144): n is a, c, g, or t
  misc_feature (156224)..(156233): n is a, c, g, or t
  misc_feature (174999)..(175008): n is a, c, g, or t
  misc_feature (175899)..(175908): n is a, c, g, or t
  misc_feature (212841)..(212850): n is a, c, g, or t
  misc_feature (270666)..(270675): n is a, c, g, or t
  misc_feature (292749)..(292758): n is a, c, g, or t
  misc_feature (348885)..(348894): n is a, c, g, or t
  misc_feature (372667)..(372676): n is a, c, g, or t
caagttcctcgccaacgtccgcgcggcctaatcggtcagaactctgcggctacaagagcggcgccgcctgttcggcgccgctcacggcttggcacgggctgcatatcggcccgaggccgcgtccgagcggctcatcttccattttccgataggccggcaagaatgcggcgcgctggtccgcatcacctccgtaggactgcggagtatggctaatgttttcatcatacatcgtgcgcataaaaacagggccgaacttcgtgcgcaactcggggaattgtgcgctcgatgagcaataggtgcgccggcaagcttgggggtatctgatgtcctggatcaataatttgcgcatttccatcaaggtttctgcggtgttcgtcgcgatctgcctgatcgtcgccggcagcaccggggcgatctaccattccctgagcgtaatgaattcgacgtcgagaatgacagttcatacctacgaggtgctcgagcagctttccggccttgtcgccgctatggtcaaccaggaaaccggtgttcgcggctatctcgtctcgggcgatgccggctttctggccccctatgaggccgggcagaagcagtttcaggcggcggcggccaaggtcggcagcctgacctcggacaacgcggcgcaacagaagcggcttgagcaagtcaaggcattcgccagcgactgggcgaccagcatcgcgcagcgcgaaatcgcactgatgaaggatccggcaactcaggcgaaggcccgcgaactcgaagcatccggcgccggcaagaaagcgatggatggcttgcgcgcggtggtgcaggagatggacaaggaagaacgatcgctgttgtcggtgcgggccgaggctgccaacgctgcttccggcaacgcaacactgtccatgttgatcggaggcctcgtcacgctgctgctgtcgcttgcgggcgccttcggcgtggccttcgcggtcactcgccccatccagcacatcacgaccgagatggagattcttgcgaggggcgacacgtccgtggtggtgtcgggcacagaacgcaaggacgagatcggcgcaatggcccaggccgttcaggtcttcaagaccaatgcgatcgaggtcgagcggctgaaggcggaacaggctgaaaccgagcgtcgcaatgtcgagcagcgcaaacgtgacatgatcaggcttgcggatgactttgagagcgcggtcggcgagatcatcggaacggtgtcctctgcttcgacacagctggaggcgtccgccaccaccctcacgggaacagccgagcgctcccagaaactggcgaccacggttgccggagcttcggaggaagcctcgaccaacgtgcaatcggtggcttcggcgacggaagagatggcgtcctcggtcggcgagatcagccgccaggtccaagagtccgcgcggatggccggcgatgccgtcggccaggcccgcgccaccaccgagcgcgtcagcgagctgtccaaggccgccgctcgcatcggcgacgtcgtcgagttgatcaacaccatcgccggccagaccaacttgctggcgctgaatgcgaccatcgaagccgcacgtgccggtgaagccggtcgtggctttgcagtggtggcgtccgaggtgaaggcgctggccgagcagaccgcaaaggctaccggtgagatcggccagcagatctccggcatccagnnnnnnnnnnggcgaccaatgaatcggttggagcgatcaaggagatctcctcgaccatcgagcgcctgtcggagatctcgtcggccattgccgctgcggtggaagagcagggcgccgcgacccaggagatcgcccgcaacgtgcaacaggccgcgcaaggcacccagcaggtgtcttccaacatcaccgacgtgcagcgcggcgcgaccgagaccggcacggcctcctcgcaggtgctgtcggcggcccagatgctgtcgaacgattcgagccgcttgaagaacgaagttagcaggttcctgaccaacgtccgcgcggcgtagaccgctcgagaaatgaattaaatggcgagcggcgcacaatgcgccgctcgttgcgtttggcggaggtagaaactcccggagcggtagaataccgagtgcccaccgtgttgttacgggcggccggtttcaccgatggttaaatcgcatttatgacaatgtgagtgagggcggattcgtgcgggagacgatctcgttggagtttttcattttgatccagtttccggggtagaacgatgcgcaagaattttcctatcaccgagatcgaatatccggtcagcgacgagacgttgatcgtctcgcggaccgacctcaagggcaagctcacctacttcaacgaggatttcgttgccgccgccggcttcacgtcggcggaactcatgggccagccgcacaacatcgtccgccaccccgacatgccgccggaggcgttcgacaatctctgggacacgctgaaggcgggcaagccctggcttggcgccgtaaagaaccgtcgcaagaacggcgacttctactgggtgctggcgacggcctctccgatccgtgagaacgggcaggtcaagggctacacctcgatccgcaccaagctgccggccgaccagcgcaggctcgcggaagaggtctacgccgcgatccgcgagaagaagccgcatggctatcgtatcgacgccggcatcatccgccgacgctcgtggcttgatcggttcagcatcttcaccgggacgctgaaggcgcggttggtcacgacgatggcgctccaggcgctgttcatgctggcgctcggcatcggcggcgcgctctccaccggcggttcggtcagcctgatgctggcgtctctggctgtcttcggtgccgccatcgtcggctttgccggccttgcaacgatgcatgcgatccgcggcccgatgcagcagctcaacgacactttgctcaacctcgtgcaggacaagctcgacaatcgcatcgtgatcgagcgcgacgacgagatcggggaggcgctgcgcaacctccagaccgtgcaaaccattatccgcttcagccgcgacgaggtgcaggcagtgcagcgccgagccgaaagacagcgcaaagccgacatgacgaagcttgctgacggcttcgaggccgcgatcggcgaaatcgtcgagaccgtgtcctcagccgcaaccgagctcgaggcctcggcctcgacgctgtcctcgactgcgggccgggcgcagcaattggcgacggcggtcgcagccggctcggaggaagcgtcgaccaatgtccattcggtggcttcggccgccgaggagatgtcctcctcggtgcgcgagatcggccggcaggtgcaggattcctcccgcatcgccagcgaggccgtcagccaggcacaagccaccacggaccgtgtcagcgaattatctcgggccgcttcgcggatcggcgacgtcgtcgagcttatcaatgcgattgcgggccagaccaacctgctggcgctcaatgccaccatcgaggcggcgcgggcgggtgaggccggtcgcggattcgcggtggtggcgtccgaggtcaaggcgcttgccgagcaaacggccaaagccaccggcgagatcgggcagcagatcggcggcattcaggcggcgacgcaggattccgtcaatgccatcggcgagatcagcggcaccatcgcccgcttgtccgagatcgcttcggcaatcgccgcggccgtggagcagcagggcgcggctacgcaagagatcgcccgcaacgtgcagcaggcggccaacggcacccagcaggtctcgtccaacgtcggcgacgtacagcgcggcgcctccgaaaccggatcggcgtcctcgcaggtactttccgcggcgcagatgctgtctcgcgactccaaccgcctcaagctcgaggtcggcaagttcctcaactcggtccgtgccgcctagcggcacctcattcgcatcgcgcgacggcggtcggagttgctccgatcgtttcgcccgttgcgggttgctcggcacagggtgggcaaccattcgataatcatacggtccgatacagcgcgtgtcccgatgaagtttgtgacgaactttgatgtgagacaatccagcgttgtcggaagcggttattggttgcgcggaatcgtccttgtttcgggacagtgctcacaagagggaagcgagccgtgcacgcgcgaattggaacgatcctgcctctgattgtctcggcgctcgccctgatgggcgtggccgccaccggttttgcggcgcttggcgcctatcgcgaccgacaggaggcgcacgcttttgtcgagctcaatgccatctcgcaacaactgctgcacagtgccggacaatgggccctggaacgggggatgaccaacgcggcgctgaacgcgccggagaccatcaccgcagaccgccgcgccgagattgacaggatccgcgcagattccgatcgcgcgttccgcgatgccgctcagcgcctgcgcagcctgcctgtgatgaaatccgccgagtcccgcgttgcggaggcagaacgcgtacttcagggcatcgacagcctgcgtcgcaaggtcgatgcggatctgaccaggcaaaaggccgagcgtgatcctgccgtcctcggcgcgatcgttccggccatgaccgagctgatcgagatcgccgccaatcggctgcgcctcactctggagacattgaccgattcgccatcggcggcgatgacccggctcgtagggcttcgccacctcaccgctgagatggccgaaaatgccggccgggagcgggcctttctcgcgggcttgatcagcggccgtacgaagctcaccgcagatggcatcggccagatatccggcctccgcggtcatgtcgatctagcctggacgaccatctcgcctgtcgcccaacgcgccgatgtttcggtcggcctcggccgggccatcaaggacgtcgaacagaaatactttgacagctacggttcgctgcgcacggacgtgatccgggacggcaacgcgggcgaatacaagatctcgagcaacgattacttcgcgggagcgaccagcggcatcaacgcgattctgcagcttggtgaggctatcgccgcggacgctgatcgggaagccgccgggcttgcctcaagaagcacctctcatctggtggtcagcggcggggttctccttgcgagcattgctcttgcactgctcagcttctgggtcgcgttctcgcggatcttgcggccgctgtccgcattgaccactgcgatgggcgagcttgccgcgggcaatttctccatcgttctacccggccttggtcgcaaggacgagatcggcgacatggcgcatgccgtcgaggcgttcaaggtcaaggctgaagagaaggcgcgcctggaggtcgacgaaaaggtcaggcaggaccagattgccgctgagcagcgcaaagctgacatgcacaggctcgccggcgcgttcgaggccgccatcggcgagatcgtcgacacggtgtcatcggcctcgacggagctcgaagcttcggccggcacgctgaacaccactgccgagcgcgcccaggagctggcggtcgtggttgcatcggcatcggacgaagcgtcctccaacgtgcaatccgtcgcatcggcgaccgagcagctttcgtcctccgtcaacgagatcagccggcgagtgcaggatcaggcccggatggccaacgaagccgtcggacaggccggccagaccaacgacaggatcggcgagttgtcgaaggccgccgccagaattggcgatgtcatcgaactgatcgatcagattgcagggcagaccaacctcctggctctgaacgccaccatcgaggccgcgcgggcgggcgaggcgggccgcggcttcgcggtggtcgcttccgaggtcaaggcgctggccgagcagacggccaaagccaccggcgagatctcccagcacatcaccggcattcaagcggccactcaggactcggtcagtgccatccgggaaatcggcggctccattgccggcctgtcggagattgcctcggcgatcgccgcagccgtcgaagagcagggcgccgcaacccaggagatcgcgcgcaacgtgcaactggcggcgcagggaacgcagcaggtgaccgccaatgtcggcgacgtccagcgcggcgccacggagaccggttcggcgtcgtcgcaggtgctgtcggcggcgcagacgctgtcacgcgactccaaccgcctcaagctcgaagtcggcaagttcctggagacagtccgcgccgcctgacatgcctgccgcatggctgcgatgtcgatccgcagcgcgatagcagggaagtgaatgccggttagccgccgtcgtcaactcgggccaggccatgtcgcgcgcgcatcgcgtccgggacgcgagagctggctacgctacccgccactccggtacgccgtcggcggccatcgcgatatccccgagcgaccccaccggcgtgcgctccatgtcgagcagatgctccagcgtcgcactatcgctcgccggaatccgcgccagcgtgcgccggtcgtcggtcgtgcgcagcatcaccacgccgtgctcgacatcgccgccgcggccgtagagcacggtgaagctctcgaccttgccttttcccgtggcctccgtcacaaactcgggcacggcgtgcttgttgcggtccgcctccgcttgcacgctcgtctcctgagccagcgcctcgcgcggcggggttttcgataccaccagcgcgtggtgcttggtgacgaagccgccctggccgtagagcaggccgagctttgcgccgtcgcggacacgccgcaccatcgcgcaggccgcgtgcgtcatgtaggtgttgagcggcgcgccgaagaaggtgaggccgccggtcacggtcggctgcacgtcggcgcctaagcccagcgtccgccgcgccatcttgggcacgcaggggaaacagctgtagagctcgatcgcatcgaacttcctgccgtttccgcctacgaggtccatcacggccttcagcaccgcgttctgcgggtggctctcgtaaaactggtcgcgcaggagatagtcgcgcggctcctcagccgaggcgccgccgagcgggtagaccagcttgtcctcggcaatcccggctgcccgcgccctggcaaggctcgtgagcagcagcgcgccgcccatgttgacgctggggtttgccaccatgagcttgttgtagggccaggcgatcaggcggttttcggcggtcggcgtcgtgatctcttcaggtgcataacgccgtttgagccaggcattcggattctgtgcggccgcttcggaatagcgcgaccacagcgtccccgactccgtcatcgcctcgcgcggcgtctggccccaatgtgcagaggaggccgcctcatagaacggatagaccgtcacgggccggaacacgccgagttccaccgcgagcggtttctggaacgccgcgccgcgcttgggctcctcgacgtcgtgcgcaaacggggtccatggcagtttgacgcccgcgcgctccgccttggtggcagttgactgcgcttccgcgccgcagaccgccgccactgtgcactccccgcgcgcgatgcgctttgccgcctcgtggatgtagcggatcgggctctctccgccgacggggccgtaatagcaatgcgcgggcgagatgccgagccgctgcgccagaagtttttccggatcgcgatagcgccagctcaggaagttcaccacgtcgagcgactggacgtcgccgagcaggcttgcgccggcgtcctgctcggcgcgccgcagggcctgctcgagcagatcgagtggctcgaggccgtcggcgatctccttgggacggtcgacgatctcgccgacgccgacgatgacgggtatacggtcaggggaaacagtcgtcattgtttttgcttcttcactctctcagacatctccgacctcatcctgaggagcctgcgaagcaggcgcctcgaaggatcggccgcgggttctcatggttcgagacagcgcctgcgcgcctcgtcatcatgagggtctacaccattactccgccaccagcgcattcatgtgctcgacggcttcggcgaactcttccttgaactcctgcccccccgcgcccgccgatttcacgctgtcgatcagaccgacgccctggccgacgaaatagctgacgagatcgcgcgctttggcgttgccactggcggcagctcggtcgatcgaactgaaagcgtcgcggctgatgatgctttgcaacggcatcggcagcgccccggggctgtcgggagcgcggtcccaggcatcggtccagaccgagcggagctgccgagccggcttgccggtgcggcccttcgagcgcaccgcatcgcgcgacgacgcggtgatcatcttttcgcgaaagatttccgtggtctcggcctcgacggtcgcaagccaaaccgagccggtccaggcgccggccgcgcccatcgccatgcaggccgccatctgccgccccgtcatgatgccgccggcggcgagcaccggcacgtcgcggatgggcttgatcgctttgatcacctcgggcaccagcaccatggtcgagacttcgccgcaatggccgccggcctcggtgccctgcaccacgagaatatcgacaccggccgcaacctgacgcagtgcgtgctccttggcaccgaccagcgccgcaacggggacgccgtgcttcttgcccatctcgatcatcgccttcggcggcacgcccagcgcattggcaatcaggcggatcgggtgattgaaggagacctcgagcagccgaagcgcagttttcgcatcaaacggctgcggctggtcggctgcgacctccgtggtggtgagctcgatgtcgtatttcttcaggagatcgcgcgtgtagttgcgatgctcctgcggcacgcgcgtttccaggctcttccaggtgacgtccttctcgcccgcagtcgagatgttctcgggaatcaggacatcgatgccatagggcttgccatcgacgtgatcgtcgatccacttcaactcgcgttcgagcgtgtcaggcgtgtgctcggcgcgaccgtgcacgccgaagccgccggcgcgactgacggccgcgacgacatcgcggcaatggctgaaggcgagcagcgggaattcaatgcccagcatgtcgcagatcggcgatttcatgactctctcccggcgccttcgcgtctcgtactctcgctcgcgaagcaaagcgacgctagccgatcgtcactcacgatgacatgccgaattgggcaaggcatcttgtgtgtaggcgtcgcgctcttcccgcagggccgctgcgacccgccactccggggctcgcgtcagcgagaacccggaatcgattttgcagagcattctggcggcgcgatggattccgggctcgccctgcgggggccccggaatgacggggagcgagcttgccatgacgaaacggtgagatgccacggccggcaatgcgtctcggagggcttgccatcggccaatcgcggtctaattaatgcaggcgcatctttccgccggagcccccgcatgaccgacgcccctgcctacgtgccgcccaaagtctggacctggaacaaggagaacggcgggcagttcgccagcatcaaccgcccgatcgccggcccaacccacgagagggagctgccggtcggcaggcatccgcttcagctctattcgctggcgaccccgaacggggtgaaggtcacggtgatgttggaggagctcctggcgcttggtcacgagggagccgaatacgatgcctggctgatcaagatcggcaatggtgaccagttcggcagcggcttcgtcgacatcaatccgaactcgaaaatcccggcactgatggatcggtccggtcgggagccgatccgggtgttcgagtccggctcgatcctgctctacctcgccgagaagttcggcgccttcctgccgaaagacatcaacgcccgcaccgagaccatgtcctggctgttctggcagatgggcagcgctccctatctcggcggcggcttcggccacttctacgcctacgcaccgttcaagatagaatacgccatcgatcgcttcgcgatggaggtcaagcgccagctcgacgtgctcgaccggcgcctcgccgataacgagtatctcgcgggcaaggagtacacaatcgcggacatggcggtgtggccgtggtatggcgcactcgccaagggactggtctatggcgccggggaattcctgtcggtccaggactacaagaacgtgcagcgctggaccgacgagatcgccaagcgcccagccgtgaagcgcggccgcatggtcaaccgcgtctccggcgatcccgccagccagctccacgaacgtcatgatgccagcgatttcgagacgaagacgcaggataagatcgcgccggcgacctaggagactttcgacgtcatggccgggctgaacacttgtgccggccatccatgtcctttgtggccgctacgaagagcgtggacggccccgacaaccccgggcatgacgatccttgtcaggcgacgctgagcccgaagcatggcctcgcgcctcaatccggcagcatctctccggacccgccgaagtccgccggcaggtcggcatatttcggcaagccgtccctgaccgacaccatcttgctcgcgtagttcgcgtgcagggtcggccggtgctggtatcccttgagcaggttggcgtagacgtcgatcagccgcatccgcggatgctcggtcatgacatggccgccgcagcgtttgcagaactttcgataggaatgctcggtcttgttgaacgttccgagctctgcctcgcccttggtgatgcgcacatcgtccgacttccacaggctgaaagcattgattggagcggccgaccacgcttggcagtcggcgcaatggcaatagcctgcaaatatcggtttgccggtggcctcgacctcgacggctccacagaagcagccggcgcgatagctcgcctgcggttcggcctgcgcatcgccgtcatccgccaggaggtcgttatagccgggatccttgcgcatgaaattgcggatgaaatcgcattcgaccgaaagcttacgcccttgcgctcgcaccgcgtccagtgtggcgcggccgagctttgagccgatgccgcggccgccgagctccggcggcacttcggtgtgcacgagggtgatcgcaccgtcgctcttccggtaagtcacgaaggcgacaggcccgtcgacgtcgagctcgaaccggttgcgttcttcgttgtctcgaaaggcttccggcatcgtctcgctccttttctgcggctatttgctcttcacgccctccgccgccggaaacgccacgcggtcgtccgtgcggcagtagcggtcggcgaacatgcggccgatcggatgatagcggtccatatgcacccgcatcgcctcgggatcccagagttcgtcgcggatgtgaaagtggatgccttcacccatgatcaggcgacgatcgtcgttcacgtcgatcagcttccagagcttgcactccatggcccagggtgtgtcggccagccggggcacggcaattttcgtcgagggcgcgagcttcaggccgagatagtccggctcgccgatctcaggcggaaagtcgccgctggactcgtgcatcgcccgcgccagcggctcgtcggcaatgttgaccacgaattggccggttcgctggatgttgagaaacgtatccttgtcctcgccgttcggcttgcggttggccgcgaacatgcagagcggcggatcttcgcagaaggcgttgaagaagctgaatggtgcagcgttgacgacgccggtcggtccgagtgtggtcacccacgcgatcggacgcggcagaatgaaggaggtcagcaccttgtaacgctcgcgtggcgtcaggtcgctggcggcgtattccatgctagctccggggcaagccgtcattgccgggtttgggcccggcaatccatcaatcctgaagcaatgttccattcgatggatgcgcgggtcaagcccgcgcatcacgcgttgagatcaagccatgctcagctcgtgccggccgaccaccatccagtgcacctcgtccggaccgtcggcgaagcgcaggtgacgcacatcctggtacatctccgctagcggggtccagtgcgagatgcccgtggcaccgtgcatctggatcgcctggtcgatgatcttgcaggcgcgctccggcaccatggcttttaccatcgagacccagacgcgggcctccttgttgccgagcacgtccatggccttggcggccttcagcaccatcagccgcatcgcttcgatctcgcagcgcgcctgcgcgatgatctgcatgttgccgcccagatgagcgatcttcttgccgaaggcctcgcgggtgaggccacgctgcaccatcaggtctagcgccttttcggccttgccgatggtgcgcatgcagtgatggatacggccgggtccgaggcgcagctgcgagatctcgaagccgcggccttcgccgagcaggatattctccttgggcacgcgcacattgttgaagcgcatatgcatgtggccccgcggcgcgtgatcctggccgaacacgtacatcggtccgagcacctcgacgccgggcgtgtcgcgcggcaccaggatctgcgactgctgcttgctcggcgccgcgtccggattggtcttcaccatcacgatgaggattttgcagcggggatcgccgacgccggagatgtaatacttctcgccgttgatgacccattcgtcgccgacgagcttggccgtggtcgagatgttcttggcgtcggaggaggcgacattcggctcggtcatgacgtaggccgagcggatctcgccgttgagcagtggcttcagccacttctccttctgctctttggtgccgacgcgctccagcacctccatgttgccggtgtcgggcgccgagcagttcatcgtctcggacgccagcgggctcttgccgagctcggcggcgatataggcgtagtcgagattcttcaggccctgaccggtctcgtcgtcgggcaggaagaagttccagaggccttcctgcttggccttgttcttcgccttctccagcacctcgagctgctttggcgtgaagctccagcgatcctccttgccttcgccggccttggcaaactcgatcgacatcggctcgacggtgtcgcggatgaacttcttgacgtggtcatagagcggcctgacctgatccgacatgcggaggtcgttgaggtcgtcgccgggattgagggtgtagttggtggtgcggggaatgtaggtgtgttttgtcattgttcctcccgtatcgctgagatcatgctggacgcgagaatagtcgcagcgcggccaaagcgcgagcgcgcattttcacgcgcaggcatgccatgcgatggaattcgcgaatgcgtttgaaatgttgtttgaacgccgactgagggaggcggcaggcgcccgcctcccacgtcgctgtcatcgcccgattcaatcgggcgatacagtatcccagaggcgacagtgatgaacgagagggccgcggcgcactgtatgctccggtccaggccggggcatacagctgtgggtgtggctagatcaagcaggcatccggtgcatcgcgcagatcttgttgccgtcgaggtcgcgcaggtaagccagatagagcttgccgccagggccctggcgcacgccgggcggatcttcgatcgatgtcccacctgctgcgacaccggctgcgtgccattggtcgacctgctccggcgagttgcaggcaaagccgatcgtgccgccgttcgcgcaggtcgccggctcgccgttgatcggcttcgacaccgagaaaacgccggtcttggtgatgtagaagatgcgatggccgtccactttcgccggtcgcacctcgagcgtgccgagcagcttgtcgtagaacgcctttgccttgtcgaggtcgttggtgccgatcatgacgtgcgagaacatttgcccattccctttgtagcccggatggagcgaagcgaaatccgggtctgtttgttcttggcagtcccggactacgcttcgctccatccgggttacgaacgcgagagatcaaaaagccgtgtagccgccgtcgatcacgaacgtatccgccgtgtgataggacgacgccttgctcatcagatacacggcgatgccgccgaaatcggatgcttcgccgaagcggcgcatcggaatccgcggcatgacgttggcgacaaacttgtcgttggccatgagtcccgcggtcatgtcactcttgatccagcccggcaggatcgcatttgcggtgacaccgtagcgcgccagctcgacgccgagcgcgcgcaccagggcgttgatggcggccttggtcgcggcataatgctcgttgcgcgcggtgccgaagatcgaggcaaggctggaggtcgcgacgagccggccgaagggatcgccggcattggcgcgatccgtcatgtgcttggccgcagcctggaaggcatggaacacgccgtcgagattggtcgcgaacatcgtgcgccattcttcctcggttcgctcgatgaatgagcgccggccgccgccgccgatgccggcattggcgaagcagccgtcgatccggtcgaacgtgtcgagcgtcgccttcatcgcggcattgaccgaggccgggtcggtgacgtcgcaaacgcgggtgtcgaccttgccgggaagaccggccaggctcgcggccgcagccttgttcttgtccgcattgcggccccagatcgacacgttgcagccttgggccgcgagcgcctgcgcgatgccgaggccgatgccgccattgccgccggtgatcacggcgacgcggccggagaggtcgaaaaggttcatggcgcgtttcctgtagttcgtgtggcgcgtatcagccgctgcgcacaagattgcttgctatgctgcgatcaccatggacaagaccgcgccaaaaatcaaatatgcgccccagcaaaagtaattccggtctgcgaaactgtcgcaggccgcaactgacgagggaagccatgcagttcaaacacgtcgcgctcgatttcgatggcgccgtcgcgatcctcaagctcgaccatcaggaggtgatgaacgcggtttccgtcgacatgttgagcggtctttccgaggcgctcgatgcgatcgaggagaagaaggacgaggtgcgctgcgtggtgctgaccggcgcggggcgggcgttctgcacgggagcgaacctccagggccgcaacaaccagtcgaagaagaccaaggccggcctgacgctggagaccggcttccaccccttcctgcgccgtattcgcaacctgcactgcccgatcgtcaccgcggtgaacggcccggcggccggcgccggcatgagcttcgcgttgctcggcgacatgatcctgtgcgcgcgctcgtcgtatttcctgcaggcgttccgccgcatcggtctcgtgccggactgcggctcgacctggctcctgccgcgcctcatcggtcgagcgcgctcgatcgagctgtcgctgatgggcgagcgcctcccggccgagaaggccctggaatggggcctggtcaaccgcgtctatgacgacggcgtgctgatggaagaggcgatgaagctggcgcgcgaactcgccagcggcccgacggtcgcgctctctctgatccgcaagctgtattgggacagcccggaaaattccttcgagggtcagctcaatctcgagttccagtgccagctccgagccggcgatacccaggacttccgtgaaggcgtcggcgcattcctggagaagcggcccgcgcagttcaaaggcaaatgatcgaagcggagctctcgcgcagcgttaggcgctggtgcccgggcgcgactggcgtcaccggcgcagcaaagctgtcgggcggcgccagccaggagacttggcgctttgacatcctgcaccccaatgggccgatcggtgccatcctgcgtcgttcgcccaaaggctacggagcggctccaacgcgcgcggccggtctgggtgccgaagcacagctgatgcagctggcctatgagggcggcgtgccgtcgccgcgcgtgatgcacgtgctcacgccggaggacgatctcggcaccggcttcatcatgcagcgggtcgagggcgagaccatcgcgcgcaagatcctgcgcgacgacgaatacgcggcggcgcgcccgattctggcgcggcagatcggcggtattctcgctggtctccatcgactgccgaaggacaagctgcccgagctgcgcagccgtggcgcgacccaggaaatctccgaattcgagcgcgactaccgcagcctggactggcccaagccggtgttcgagctggcgctgcgttggctgcgtgaccacgacccgggcccatcagccgagaccacgctggtgcacggcgatttccgcaacggcaatctgatcatcggcgccgacggcgtccgtgccgtgctcgactgggagctcgcccatctcggcgatcccatggaggatctcggctgggtctgcgtcaattcctggcgtttcggcgagatcgacaagcccgtcggcggctttggctcgcgcgaggaactgttcgccggctacgaggccgccggccgcaaagtcgatgtagcgcgcgtcaaattctgggaagtgatgggcacgctgcgctggggcatcatgtgcggcggcatgatgcagcgctttcgcgaggggccggatcattccatggagcgcgccatgatcggccgccgcgcctccgagaccgagatcgatctgttgcggctcttggcgccgcgcgggagctgacacatgcaggacgagccgaccccgatcgagctgaccaaggcggtcgctgatttcctccgcaatgacatcacgccgctgatctccggccaccaggccttcaagctgcgcgtggccatcaacatcctcgatctcgtgacgcggcagctgatccgggaggacgagggcgatgccagggaggtcgagcgcctccgcgtgctgctcggcatcgaaggctcggtcaccgaactcaaccgcgcactcgccgggcgcatcgccaaaggcgaggtggatctcgcgactccaggtctcgccgagcatctgtgggcgaccacgatggacaagcttgcggtcgatcagccgaattacgcctcgtacaagcgggagctgtcgcgcgacagctaggcctcttcccgtcattgcgagccgacgggtccgcgcagagcgcggcccgatgacaggctccgcgaagcaatccagggtctttcggcacgggcagtctggattgcttcgtcgcaagagctccgcgcaatggcgagcgaaaggacctgtctacttccccacccatttcggcggccgcttctccgagaacgccttcgggccctcgatataatcctgcgaggccaccatcgccttgaccgccggatactcgcgctgctcctcgatcgcctgttccagcgagacggcgagccccttctggatcgcctgcttcgaggcgcggatcgacatcggcgaattcttggcgatcatgtcggcccagcgcagcgcggcgttgagggcctcgccctgcggcaccacctcgttaacgaagccgagctcgagcccctccttggcgctgacatggcgtgcggtgaggatcatgcccatggcgcgcttcagaccgatctgccgcggcagccggtgcaggccaccggcaagcgcggcaaggccgacgcgcggctcgggcagggcgaaggtggcgttctccgaggcgatgatgaggtcgcaggccagcgcgatctcgaagccaccgcccatcgcgacgccgttcacggctgcgatgatcggcttgtcgcagtcgaagcgcgaggtgagaccggcaaagccgcccttgtcccagccgcgcttgccgccggcagcttgccacttcagatcgttgccggcgcagaacgccttgtcgccggcgccggtgacgatcgcgatccactgctcgggatcccccgagaaatcgtcgaacaccttctgcagttcgaagtgcgcatcggtgtgcagcgcgttgtagacctcgggccgcgacagcgtgacgattgtgatcggccccttgcgttccactctggaaaacttcagctccatggtcgctcccgcattttctcctgaaggaatattgatgccatagtagcgcgcgttggcgacggagcaccaccgaattacgcaatgcgctttgcgcagctgtcacgcctcggcttgcttgacttgcgcgagctcttctccgcttaatcatgcgaagcaagaatgcgcctagcgccttaacgcaaaacgacaaatcattctcgggagagaacccttggatttctcactgcctgccgatctcgtcgcctatctcggagagctcgaccgtttcatcgaacgcgagatcaagccgttggaacaggccgacgacaacatccgcttcttcgatcaccgccgcgaatgggcgcgcaccgatttcgagaatggcggcctcccgcggcatgaatgggaggcgctgctgcgcaaggcgaaggatcttgccgatgccgccgggcatctccgctttccggtgccgaagcaatatggcgggaaggacggctccaacctctggatggcggtgatccgcgagcacttcgccgcaaagggtctcggcctgcacaacgatctccagaacgagcattccgtcgtcggcaacttccccgtcgtcaccatgctcgaccgctacggtcgcgacgaccagaaggcgatgatcgacggttcgatcaggggcaagtaccgcatcacctttggcctgaccgagccgcatcacggctcggacgccacccacatggagacgcgcgcggtgccggccacccgcgataacgtcaaggggtggatcatcaacggcgagaagatgtggaccaccgggatgcacgtcgcaacgcattgcgcgctgttcgcgcgcaccagcggcaatgacggcgatgcccgcggcatcacctgcttcctggtcccggccaagagccccggtgttaaggtcgaggaatacatgtggaccttcaacatgccgaccgatcatccgcgcgtcagcttcacggacgtgttcgtgcctgaggatgcgctattcggcgaggtgggccgcggcctctcgctggcgcagtgcttcgtgcaccagaaccgcatccgccaggcggcgagttcgctcggcgcggccgtgtactgcatcaacgagagcgtgaaatacgcgcgcgagcgcaagccgttcggcaaggccctcgccgagaaccaggcgatccagttcccgctggtcgagctcgccacgcaagcggaaatgctgcgccttctgatccgcaagaccgcctgggagatggaccagctcaccgaggagcagatcgagcgtacgctgtccgaccgggtctctatgtgcaattactgggcgaaccgcctctgctgcgaatccgccgaccgcgccatgcaggtccacggcggcatgggctattcacgccacaagccgttcgagcacatctatcgccatcaccgccgctaccgcatcaccgaaggcagcgaggagatccagatgcgcaaggtggcggggttcctgttcgggtatatgggaccggggaagcattgactgggcaacaatccaaatcgtcgtatggaggcaatctggattgtctcgtcgcaacggctcctcgcaacgacgcgcggagagcaacgcctctctcctccgtcatcgcgagatcagcgaagcaatccggcatctctcaaggaaggtagtctcgatggctgcgcctcgaggctagttcacccgccgatccttccccgcccagtacggctcacgcagctgccttctcaggatctttcctgaaggattccgcggcagcgccggcaagaactcgacgctcttcggcgtcttgtagccggcgatgcgctcgcgggtgaagttgatgatgtcggtggccgtcgcttgcttgcccggcttcatcaccacgacggccttcaccgcctcgccccatttgtcgtcgggcacgccgatgacggcggcctcggcgacatcaggatggtcgcacagcgcgctctcgacctccgcaggatagatgttctcgccgcccgagatgatcatgtccttgatgcggtcgtggatgtagagatagccgtcctcgtccatgtagccggcatcgcccgtgcgcagccagccgtcgccgcgcagcgtcgcggcagttgcctccggcaggttccaatagcccgccatgttggagccagagcgcgtcgcgatctcgccgacctgccgcggcggcagcggtttgccgtcgacatccagaatcgcgatctcgacgcccggaagcgccttgccggccgagcgcatccgctccagcccctcgacgtgatcctccggcggcagcgcgacgatcgtgcccgtggtctcggtcatgccgtacatctgcacaaagccgcatttgaagacctcgatgcactccttcagcagcgccgcggggatcggcgaggcgccgtagagcatgtacttcagccgcgagaaatcgaccgtcttcgcgcgcggctgccgcaccacgaactgcatcgccgccggcaccatgaacagtttcgtgatgcccgactgctcgaagaaatccagcaccttggtcggatcgaactcgcgcgcgatgacgccgcgggcgccgtgatagaggcccatcacgccccagccggagccgccgatgtggaagatcggcatcgcgaccagcgagacgtcgccggtcgaccaccggttccactccggtttgtcttcggcgttgcccgtctgcaccaggttgaggaagttcgcgtggctcagcatcgcgcccttcggcttgcctgtcgtgccggaggtgtagagctggatcgcgatgtccctggtgtcgatcggcaccttcgggtcgtcaccgctctgcgcatcgcgccaggccgtgaaatcctgccattccggcgcgccgccttccgtggtgatgatggtgtgaacgccggggagctggtccttgatctggcggacgagcgtgatgaactccggcccgacgaacaacacaggcgccctgcagtccgaaacgatgaaggcgacctccggcccggcgagccgccagttcaccggcgccatcacgacgccagccttcattgcgcccatcaggagctcgaaataggtgtcgctgttcttgccgagataggcgatgcgatcgcccttcttcacgcccatcgcaagcagcgcgttggcgaccttgttggtcttgatatcgaattcggcaaagctggtggtgcggccttcgaactcgtaggcgattgcgttgccgcggctcttcgcgcgctcgcgcaccatatcggctagattcgccaatggctgtatggacatgtttctcccgtgacgacttgtttttatgcttgggagtgtggcgtcatccgcgggtgaagacaagacgggagggcgatgccgtggcttcgtggcccggatgcggcgcaccacgccgcaagtgcggcgcgctgcactccgtccggggcacgcggcagcaattatccccgcttcgcccggtccttctcgttctgcgccatgatgctgtcgcgcgcggtcttccagtcgtcgtcgctccagtcgcggagctggtagaaatttccgcccatggcgagcgcttgggcgccgtccatggcaacggtctcgccgttgatccagtcgcagccgccggagatcaggaacactgcgaggttctgcagttcctccatcgtgccgacccggcccatcggattcatcgccttggtgcgcgcgccagcttcgtctcccggcttgatgcgcttgctcatgccttctgtcgggatctcgcccggcgcgatagtgttgaggcggatgccgtagcggccccattcggtcgcgagcgacatcgtcatcgcgtggatcgccgacttgctcatcgccgacggcaccacgtaaggcgagccgttgcgcacccaggtcaccgtgatcgaaacgacattgccaggctgcttcaaggcgatccaccgcttgccgatcgcgtgcgtcacgtagaacgtgccgtgcatgacgatgttggcgaccgcatcgaagccgcgcggcgacagctcttcggtgcgagagatgaaattgccggccgcattgttgatgagatcggtgaggggaccctcgcgaaagatgttctcgaccatctcctcgaccgcgagcgcgttgcggatgtcgacgccgtggctggtaacgcggccgccgtagaggtccatcagctcgatcgcggtctcgtcgcagacgaccttgcgccggccgcagatgtgcacctcggcgccgagctggagaaagcgcgccgccatcgacttgccgagcccggtgccgccgccggtcacgagaatgcgccggccggcgagaagattttccttgaacatggctgtttcccccgtagggattgtcagttaattggtcgattgactaaatccggctgtcagcgtcctgtaaagcggcaactggtcaagaacaggggagaattcgtccatggaagatcgcgtctcgatctcgatctcggaaggcgtcgccgacgtgcgcctgatgcgcgcggacaagatgaacgcgctggatcaggccatgttcgaagccctcgtcgctgcaacggaccggctttcgaaggaaaaaggcgtgcgcgccgtcgtcctgtcgggcgagggccgcgccttctgtgccgggctcgacatggggcgttttgccgccatgaaggagaagggcggcaacggaattccgggcggcgaaaatcgcgatctcaccaagcgcacgcacggccaggccaacttcccgcaacaggcggtatggggctggcgccagctcccggtgccggtcatcgcggccgtgcacggcgtcgccttcggcggcggcttccagctctcgctcggcgccgacatgcgcttcctcagttcagatgcgcggatgtcgatcatggagatcaaatggggcctagtccctgatatggcgggcacgccaatccttgcctcgctcgtgcgcgacgacatcctgcgcgatctgacctacacagggcgcatcttttccgcgcaggaggcgatgacgtacggcctcgccacccgcatctgcgacgacccgcgcgctgcggcgctggaagtcgcgcgcgagatcgccggcaagagccccgatgcgatccgcgcggtcaagcggatgctgaacaacctctcggtcgatccggggccggcgttgctcgccgagtccgtcgagcagcagaaactgatcggcagcccgaaccagaccgaagcggtgcgcgccaacctggagaagcgcgcgccgaattttgcggattagcagctgccgtcgttccggggcgatgcgaagcatcgaacccggaacctcgatattccccggtgcgcaattgcgcacctgaggtctggtccttcggccatccggaatgacgaacacaacaacaaagaaaaacaacaatgagcgaaacgtcccccttcctcggcatcgtctccggcgaccgccgccgcagccattcagaggtcgccgaccgcgctgaccgcatcgccgccggcctcgccaagctcggcgtcaagccgggcggttgcgtctgtatgctgatgcgcaacgacatcgcgttcctggaagccgcctacgccgcaatgcggctcggggcctatggcgttccgatcaactggcacttcaagcctgaggagatcagctacatcctcggcgataccggcacgtccgtgctgatcggacacgccgacatgctgcatgccctgcgtgatgcgattcccaacggcgtcaccgtgctcagcgttccgacgccgccggagatcctggccaactacaagatcgatcccggtcatttggcgacgccggactttgcgatcgacctcgaatcctggcttgcgcagcaccagccctatgacggtccggtcgtgccgcagccgatgaacatgatctacacctcgggcacgactgggcatcccaagggcgttcgccgcaacgcgccgacgccggagcagcaggccgccggcgagcgcatgcgcgcgatgatctatgggctaaagcccggcgcccgcgcgctgctgccgggtccgctctatcactccgcgccgaactccttcggcatccgcgccggcaagctcggcggcgcgctggtgctgatgccgcgcttcgaggccgaggaatttctgcaagcgatcgagcgttacaggatcgacaccatcttcatggtgccgaccatgttcatccgcctgatgaagctgccggaagcggtccgcaagaaatacgacgtctcttcgctgcgccacgtcatccatgccgccgcgccatgcccggccgacgtcaagcgcgccatgatcgaatggtgggggccggtgatctacgagttctacggctcgaccgaatccagcgccgtcaccttcgccacctcagaggacgcgctgaagaagcccggcaccgtcggcaagatttcgccgggcgccgagctgcggttcatcggcgaggatggccgcgtgctgggggtcggcgagatcggcgagatctattcccgcatgggcgagcttgccgatttcacctaccacaacaagccggagaaacgcgccgagatcgagcgcgacggcttcatcacctccggtgatgtcggctatatcgacgaagacggctacgtcttcatctgcgaccgcaagcgcgacatggtgatatcaggcggcgtcaacatttatccggcggagatcgaatccgtgctgcatgcggtgcccggcgtgcatgattgcgcggtgttcggcatccccgatgccgagttcggcgaggcgctgatggccgtggtggagccgcaagtgggtgtcacgctcgacgccgccggcgtccgtgccgcgctcaaggcgcatctggcggattacaagatacccaagcacatcgagatccgctcaggactgccccgcgaggattccggcaagatcttcaagcgtcgcctgcgcgatccctattgggagcaggcggggcggaagatttgacggccttgtagcctggatggagcgaagcgaaatccggggcggtgcttgcggggagaaccccggattgcgcttcgctccatccgggctacgtgcacagggatggaatgatcatgaccgacgccgccaacgaagtcctctacaccgtcgccgaccacatcgcgaccatcacgctcaatgcgccggagcggatgaatactatttccggcccgatgctgaacgatctggcgcggttactcactgaagccaatgaggaccagaacgttcgcgtcgtgatcctcaccggcaagggcagggcgttttgcgccgggctcgatctgcgcaaggagcgcgacggcaacggcctcagcgcggcgtcttcgtcgaccacgatcaacctccggaacacgccgccgacggtgttgcaggccatggacaagccgaccatctgcgccgtcaacggcggcgccgccggctatggaatggataccgcgctcggctgcgacatccgcatcatggcggaatccgccaagctcgccgccgccttcgtcaagcgcggcgtggtgccggaatccggcggcacctggctgctgccgcgcatgctcggctgggccaaggcctccgagctgatcttcaccgggcgcacgctgagcgcccgcgagtgcctcgactggggcctcgccaacgaggtcgtgccggatgccgagctgatgagccgcaccactgcgatcgcccgcgaaatcgctgcgaacgcgccgctcgcggtgcaggcctccaagcgcatgatgcgcatgggcctcaatgagaatttccacgaccatgtccaccacgtctatctccagctcctgccgctgttcaaaacccaggacatggccgaaggcatgaaggccttcatggagaagcgtgagccgaagttcgaggggcggtaatcgtgaccgtcgctcggaagagcgaacgcgaaatccaggctaccttgccatcttagcagagacagatttcgtgcctatatgagcggcgtcactgacttccggatcatcccatggctcccgtctccatcctgctcaacctgctctggatcctcttcggcggcgcctggatggcgttcggctgggtgatcgccgcggtcatcatggccatcaccatcatcggcctgccctgggcccgggcggcgttcaacatcgccgtctacacgctgctgccgttcggctcgcgggcggtcaaccgctacgaggtgaccggcgtcgaggatatcggcaccggcccgctgggggtgatcggcaacatcatctggttcgtgctggcaggctggtggctggcgctcggtcatgtcctgacggcgctggcgcttgccgtgaccatcatcggcattcctttcgcttgggcccatctgaagctcgcgggcatcgcgctctggccgatcggaaaggtgatcgtgccggcttgacgacgagtgctccggcgagagcccacacccactgtgcgccgccaccaagttcatcttgcactgcggtagaaaaatatcgcacactccttcgggccgggccgcaagggcgctaccaggggagcgagccatgtccctccagaccataccttccgacaccgccgagcctcgccctaaccgccccgaagatgttcaggcgatggaggccgatgcgcggctgcgggacgacatccgcctgctcgggcgcatcctcggcgacaccgtgcgcgaccaggagggtgcggacgtgttcgatctcgtcgagcgcatccgccagacctcgattcggttccaccgcgacgaggatcgacttgcccgccgcgagctcgagcagatcctggacagcatgtcgatctccgagacggtgcgcatcgtccgtgccttcagttacttttcccacctcgccaacattgccgaggaccagaacaacatccgccagatgcgcgcccgcggtgccggcaagaacggcggctccggcgtgctcgcggaaacgctggcccacgccagggacgccggcatcggcgcggatgcgctgcgcagcttcttcaagtccgcgctggtcagcccggtcctgactgcgcacccgaccgaagtccgccgcaagagcaccatggatcgcgaaatggaggtcgcccgcctgctcgaccgccgcgagcgcgtggcgctgaccgcggaggagcttgatgccagcgatgagcagcttcgccgcgaggtgctgacgctgtggcagaccaacctgctccgccggaccaagctcaccgtgctcgacgaggtcgccaacggcctgtcgttctacgactacactttcctgcgcgaggtgccgcggctcatcaatacgctggaggaccgtctggaggagggcggcgagcaggcggccggtgagctcgcctcgttcctgcgcatgggcagctggatcggcggcgaccgcgacggcaatcccttcgtcaccgccgacgtcatgcgcggcacgctgcggctgcagtcgagccgggtgatgcagttctacctggaagagcttcacgtgctcggctcggaactgtcgattgcggcccatctcgccgatgtctccgaagagctgcgcacgctggcggagcgctcgccggacacctcgccgcaccggagcggcgagccctatcgtctcgccgtgtcgggcatctatgcgcgcctgaccgcgacggccgaaaagctggaggtcgagatcacgcgccggccggtcggcaaggccaagccctatgaaagcgtcaaggagttgcaggctgatctcgatgtgctgcaccgttcgctgatttccaacaacgcacgcgtcatcgctcggggccggctgcggctgctgcggcgcgcggtggactgcttcggcttccatctggcgcggctcgacatccgccagaattcggcggtgcacgaacgcaccatcgccgagctgatggacgccgccaatcccggcatgtcctatctcgcgctcggcgaggacgcgcgcatttcgctgctcaccaacgagctgcgctcgacccgcgcgctggtgtcgcctttcgtcaaatacagcgacgagaccatgggcgagctcaatgtgttccatgccgccgcggaagcgcatgcgaagttcggctcggacgccattccccaatgcatcatctcgatgtgcaagggcatgtcggacatgctcgaggtggccgtgctcttgaaggaggtcggcctcgtccatccctccgggcgtagcgccatcaacatcgtgccgctgtttgagaccatcgaggatctgcaggcgtccagtggcatcatggaccgcatgctgtcgctgcacgattaccgccgcctcgtggacagccgcggcagcgtgcaggaggtcatgctcggctattccgactcgaacaaggacggcggcttcgtcacctcgggctgggagctgtacaaggccgagatcaacctcgtcgaagtgttcgagcgccatcacgtgcggctgcgcctgttccatggccgtggcggctcggtcggacgcggcggcgggcccagctatgacgctatcatcgcgcagcccggcggcgcggtgaacggccagatccgcatcaccgaacagggcgagatcatctcgtcgaaatattccaacgccgaggtcgggcgcaacaatctggagatcctcgcggctgccacgttggaggcaagtttgctgcatccgcgccaaagcgcgccgcgcagcgaatatctgaccgccatggacgagttgtcgaaccttgctttcaaggcctatcgaagtctcgtctacgagacagacggcttcgtcgattatttctggtcatcgaccgtcatcaacgaaatcgcgacgctcaacatcggcagccgtccggcctcgcgcaagaagacccgcgcgatcgaggatctgcgcgcgattccctgggtgttctcctgggcgcaatgccgattgatgctgccgggctggtatggcttcggcagcgcggtcgagcagtggatcgcggaacatccgcaacagggcatgccgttcctcaaggaactctacagggagtggccgttcttccgcatgctgctgtcgaacatggacatggtgctggccaaaagctcgatcgcgatcgcctcgcgctatgccgagctggtgcccgacgaggcgttgcgcgaaaagatcttcggccgcatccgccgcgaatggcacgcctcgatcgagagcctgctcgacatcatggggcaggaccgcctgcttcagagcaacccgctgctggagcgctcggtgcgccaccgcttcccttatctcgacccgctcaaccacgttcaggtcgagctcttgaaagagcatcgcgcccagaacccggacgagcaggtgctgcgcgggatccagctgacgatcaacggcatttcggcggggctcaggaatacgggttaggagcgagttgcaaatagtgagtagcgaatagagctctgttcgccattcgccacccactattcgcttgtctcaacagaaatgcgcgccctgcgtctccacatagaccgcgtagagcgactggctcgcggtcatgaacaggcggttgcgcttcttgccgccgaagcagacattggcgcaggtctccggcaacaggatctgcccgatccgcgctccgtcggtcggcgcgaacacctgcacgccgtcgtagccgggtccgacccaaccggcgccgacccagatattgccctccgtgtcgacgcgaaggccgtccggaaagcctgatttgccgtcgagcttcatgtcgatcaacttcttcgcgttcgacagcttcgggccgtcgacgtcataggaccacaccacgttctccgcttgcggataatgcgtgacgccggtgtcacagacatagagcttcctgtaatcgtggctgaaggcgatgccattcggcttgaatggctcgtccgcgaccttcgcgacctgcccggtctgcgtgtccaggcgatagacggcttccttctgatggggctggggcgagccggtcttggcgagcttgccttcatagatgctgatcgctccatatccaggatcggtgaaccagatcgccttgtcgttgggatgcaccaccatgtcgttcggcccgttgagcggcttgccgttcgcctgctcggcgagcggggtcaccgagccgtcatgctcgaagcggacgaggcgggtgcgctcggcggtgagctgacggccctcggtatcgaacgagttgccgttggactcattcgacggtttacggaactgctcggagatgtggccgtcgtcgtcgagatagcggagttgccggttggcggggatgtcgctccagacgagatattgtccctgcgcgttccacgccggcccttccgcccaaaggcagccggtgtagagccgcttgatcgcggtgttgccgaccttggccttgaagcgtttggggtcgatgacgacgatgtcggggtcgggatagcgttgcggctcggcatgggcgccgaagtcgcgggcattggcctgtgatgccaggacagaggaggcggcgagtgttgccgcgcccttgaggaggtcgcgacggccgaggccgccggtcgcacggatgtccttggggttggtcagtattcttgtcatggtttcctcccatttcgttgggaggccaccatccgcccgcaatcgggcataaagcggagcaatctccggtgaagacaaccggagatcgcaaggcaggaatgtctgaaatgcggctggacgagatccttacacgggatcccaggtgaagatgtcggccgaacgatccagcttgtagaacgaacccttcagcgccggcatgccgtgttccgcgatcgattgcggcgtccagccttcgctccgctgcaccgagcggatcgggcggttctggctgaacaggaagatctcgttcatgcgcacgccgaagatctggccggtgacgtccttggcggaatcgccgagcagatagccgcagagcggagcgatcttctccggccccatctgcttgatcttctcgacgcgggccttctccgcttccgtctcggtcgggatggtgccgatcatgcgcgtccaggcgaagggcgagacgcagttggagcggacgttgaagcggcccatgtcaagcgcgatcgacttggagagaccgacaataccgagcttggcggcggcgtagttggcctggccgaaattgccgatcaggcccgaggtnnnnnnnnnnggtgaagtgcacgaacgagcccgactcctgctcccggaagatacgtgccgcggcatggctgacatagaacgagcccatcaggtgcaccttgatgaccgcttcgaacgcctccacgctcatcttgtggaaaatcatgtcgcgcaggatgccggcattgttgacgactccgtcgagccggccgaaatgatcggtggcggtcttcacgatcttgctcgcaggaaccgcttccgccaccgactcgaagttggcgacggccatgccgccgcgcttcctgatctcctcgaccacctcttcggcgggcgctgcgttcgcgccggcaccgtcggccgcgccgccgggatcgttgaccacgaccttggcgccttcgcctgcgcaaagcagcgcgatctcgcgcccgatgccgcggcccgcgccggtgacgatgatgaccttgtcttgcagtgatttcgacatgctagcctctcaatgttgtcttcgcggccgcggccaacccagtccgtcacgcgcgggcttgacccgcgtatccatcttcagaagatggattgccgggtcaagcccggcaatgacaagcatgtgttgttggcgccgcttacctctcgttcgtaaacacgatcgtgccactcgcggcgaacatgccgcctacgccgtggcacaccgaaatcttcgcattcggcacctgcgcgggcgcgatgccgcgcatctggcgcacgctctcctgcagcgcgtacatgccgtacatgcccgaatgcatgtagctcaagcccccgccattggtgttgagcggcagcttagccccgggccgcgtattgccgtcggcgatgaactggccggtctcttcatacggcatgaagccgagatccccgaggccgaacagcggcagatgcgcaaacgcatcgtagatcatgagatgatcgacgtccttgtgcgcgatgccggcctccttgaatgccaaaggccctgcgaccttgaacgcgcgcgaggaattgaaggtctccatctggctgaccatcggcgtctccacgctctcgccggtgcccatgatgtagacgggcttgcgcggaaagtccttggcgcggtcggccgaggtcaggatcagcgcgccgccgccgtcagtgacgaggcagcactgcaggagccggaatggataggcgatcatgcgcgagttgagcacgtcggcgaccgtgatcgggtccttcatcatcgcgcgcggatttttcgcggcccattcccgctgcaccaccgccactgacgccagctgctcgtgcgtaatcccgtaggtcttcatgaagcgcagcacgggaatcgggaacatgctgggcgggccgtagacgccgtagggcgcctcgaactgaccttgcaggctgtcggcagggatcgagcgcggcgccttgccgatcatcgacttgccactctcggcatgggtgatcagcacggtcttgcacaggcccgcctcgattgccgctgcggcatggcggacgtgcagcatgaacgagcagccgccgaccgaggtgccgtccacccaggtcggcttgatgccgagatagtggcagacctgctgcggcgtctcgaccgcagtggcaaagccgtcgatgtcggacagtttcagcccggcgtcggcaatggcgttgagcgcggcgtccgcatggagctggagctgcgaggcgttcggaatgacgccgagctcggtggtctcggccgcgccgacgacggcaacctggttcttgcgcatggcttatcccttggccggacggaagacgggcagggtgatcttgtcgtcgagctcctggaacgcgacctcgagcttcatgtcgagctcgagcgcctccggcgtctgcggacagtcgatgatgttgctcatcattcgcggaccctcctcgagctcgaccaccgcgatcgcgtaaggcggcgtgaagccgggcgcggcggggcggtggttgatcacgtaactgtagagaaaacccttgccgctcgccttgaagaccgagaccttgcgcgaggcgcaggatgggcagaacggacgcggcgggaagtacacatgcgcgcaggcgtcgcagcgctgcaggcgcaattcgccagctttcgtgccatcccagaaatgctgggtctccggcgtcggtttcggtcgcgcgcgctgcggttcggccatattggcgtctcctcccaaaggacaggcctcgcgcccgcctgtttcgaacttgatgcgacaatcgaccatcgcgcgtcaacggtccagcaatgcgcatgcatgccatcatgcgcacaatgcttgtgtcgaactgaggcagcgctatagattgcgcgcgccaatattccgtgagacagacatgcccgattttccgacactggcgaagctcgccgaagacctcgaaagcggccgcacgaccgcacgcaagctggtcgaggcgtgcatcgccaggatcgccgaccccgccggcgaagggcagcgcaccttcatccatgtcgacaacgacgccgcccttgcggccgccgacgcgatggacgccttgcggagggccaaggcggcgccgtcgccctatgccgggattccgatctcgatcaaggatctcttcgacatcaaggggcaggtgacacgcgcggggtcccgcgccctcgacgattccccgccggccgagcaggatgccgcgacggtggcgcggctgcgccgggccggcttcgtcgtgatcggccgcaccaacatgaccgagttcgcctattccggcatcggcatcaacccgcattatggcacgccgaagggggtctggaaccgggccgagggccatgtgcccggcggctcgtcctcgggcgcggcggtgtccgtgctcgacggcatggcgcatgcttcgctcggcaccgataccggcggctcctgccggattcccgccgccttcaacgggattgtcggctacaagccgacgcagcgccgcgtgccgctcgatggctccgtgccgctctcgttttcgctcgacagcatcgggccgctggcgcgatcggtcagctgctgtgccattttggatgccgtcctcgcgaacgagccgatcagcgcgctcaggccgcggccggtgaaaggcatgcggcttgcggtcccgaccacgatcgcgctcgacgacctcgatactgaggtcgccgcgaccttcgaacgcgcgctgaaatcgctcgccgatcacggtgcgatcatcgagcgcatcgagatggccgaattccacgacatcggcccgatgaacgccaagggcggcttcgcggcgtccgagagctatgcctggcatcgctatctcatcacgtctaagggcgacgtctacgatcccagggtctcggtgcggatcatgcgcggcgaggcacagagcgccgccgactacattgatctcctcaatgagcgccgttctctgatcgcccgcgtcaacgcgcgcgtcgcgccctatgacgcgctggtgctgccgaccacacccaacacgccgccgaaaatcgccgacctcgccgacgatcaggcattcacccgcgaaaatatccgcgccttgcgcaattgcagcctgatcaatctgatcgacggctgcgccatctcgctgccctgtcatcgcgacggcgatgttcccgtcggactgatgctggccggcgccggcggctccgaccgccgcatcttcgaacttgctgccggcatggagaccgtcatccgtgtttgatctcaccttcaccatcgacgcgcagggcaccaccacgccgctgacgctggcgatcgaccaggccgtcatagcgggttggaccggacgcgatcccgtggcccgcgacaagcacatcgctgaactcgaagccgtcggcatcgcacgtccggcctcgacgccgatctactaccgctgctcggcgcggcggctaacccaggaggacgtcatcgaggtctgcggcggcgattcctccggcgaggtcgagttcgtgctgatcggctggcagggccgcattttcgtcggttgcggctccgatcacaccgaccgcaaggtcgaggcctacaacgtcacggtctccaagcagatgtgcgacaagccgatcgcctcgacgctgtgggagatcgaagacgtcatcacccattgggacaagatgatcctgcggtcctacgccacaatcaatggcgagcgcgtgctctaccaggagggcacgctggacgcgatgctgccggtcgacgatctcatcgcgcgcggctttgacggcggcaagctgcccgatggctgcgccatgttcggcggcaccttcgcggcgaaaggcggcatccgtcccgccgaccgattcgacttcgagctggaagaccccgtgctgaggcgcacgatcaggcacggctacgacgtggtgacgctcccggtgcggggctgagccgtttcacccgtcattgcgaggagcgcagcgaccaagcaatccggaccggtggcgcagcggatactgggttgcttcgctgcgctcgctatgacggcgaggggcatcggaaatcgggtggttgttgccctcggtatctgccacacccccatccgtcattccggggcgcgccccttgggcgcggacccggactccatcgaacgcacactcggtggatgaatggatttcgtgttcgcgcatcgtcgcgtcgcggaatgacggaagtggagaaggtcgtcgccatggcaattgcgaaacgtgttcccgctgccgatgcggcgactgacatcaccgcccacgtcgacaccctcgactggtcccggatcaccggcgaactcgacgtccaaggctgcgcggtcttgaagggcttgctcacgccggaccagtgccgcgccgtcgccgcactttacccgcaggacacgcacttccgcagccgtatcgtcatgggccgccatggttttggccgcggcgagtacaagtacttctcctatccgctgcccgagctgatcgcgcagctccgcccggcgctctatgcgcatctgcaaggcgtcgctaatcgctggaacgaggcgatggggatcgacatccgctatcccgtcacgcccgccgcattcctgaagcgctgccacgacgccgggcaggcgcggccgacgccgctgctgttgcaatatgaggccggcgactacaattgcctgcatcaggacctctatggcgagcacgtgttcccgctccaggtcgcgatcctgctgtccgaacccgggcgcgatttcacgggcggcgagttcgtgctgaccgagcagcggccccgcatgcaatcgcgtgcggaggtcgtgccgctggggcagggcgatgcggtcgccttcgccgtgcatcaccgcccggtgcaggggacacgcggcacctaccgcgttaatctgcgccatggcgtcagccgtatcaggtccggccagcgccatacgctggggatgatctttcacgatgcgaaatgagcgctgcgattgacaggtgatctgttcgacagtgttgccgaggcgcagccgtcgcgcgaggagatcgccgacggcgccgtgctgctgcgcggcttcgtcacgccgatcgagagcgagctgatcgaagcggtgcgcgccatcgtggcgcagtctccgttccggcgcatgaccacgcccggcggccaccagatgtcggtggcgatgaccaattgcggcgagcgcggctggatcaccgatcacaccggctatcgttacgacccggtcgatccgcgcaccggcgcgccatggccggcgatgccgcctttgttccgcgatctcgcccgccgcgccgcggagcagggcggtttcgccgactttgcgcccgatgcctgcctcgtcaaccgctacgagcccggcgcgcggctgtccttgcatcaggacaaggacgagctggattattcggcgccgatcgtctcggtctcgctcggcctgcccgcgaccttcctgttcggcggcccggcgcgcagcgacaagccgcgccgctttcgcctggtgcatggcgacgtggtggtctggggcggcgccagcaggctctcctatcacggcgtggcccctcttgccgatggcgagcattcgctgctggggcggaagcggcttaatctgaccttccgcaggacgcgctgatccgtttcctcgcagcccttgctcgtctaagctggagacggggaggcggcgacatgacaaccacacagctctcggccggcacgggcgcggcgaatcggacaggcctctatctcgctgcgctgcaactgatgttcacgctggggtggacgacctatgtcgtttatctgccgagactcgcggccgaggttggcatcgctccgagcgccgtcatcctcatcctcatgctggaccaaggcatcttcaccattgccgacacggcgatgggtatcgcggcggacaagctgacgccccatgtcgggcgactcggcctgttcgtcgggctcatggctgcgatctcctgcggcgccttcgtcgcgctccccttcgttgccggcgccggtccggccgcgcaagtctggttcattgcactgatcgtgatctggtcgatcacgtcctctgcgctgcgcgcgccgccgctcactcttctcggaaaataccgcgccaagccccaggtgccgttcctcgcggcgctggcgatgctgggctacggcgtcgccggcgcggtctcgccctatctcggcgtggtgctgcgcgagcacgacgcaaggttgcccttcgtcatctccagcttcgtgctgctgctcaccgcgctggcgctgtcacggatcgagtccgatgtcgcgcaggatacgccgccgccgacgccggccgaggcggccaagccgcttggcttggtgccgatcgccttcatcgtcgcgatggtggccctggcgttcgggtatcaactgcactttgccatgaacagcggaccgtcctatctgcgctttgccaagcccgacgagctgcaatggctgatgccggtattctggataggcttcaacatcgcgatgtttccggcgagcctcgtggtcaagcatcgcggcggccttatcgtgatgggtgctgccggcctgttcggcgccgcggcgatcgcagcggccgaattcgccggcagcctcaatgttctgatcgccgcacaattcctcgccggcgccgcgtggggctgcatgctgataagcgcggtctcggcggcgctcgccatcggctccaccggcgcagaaggcaaggtgacgggcctcgtcttctctgcgctcgcgctcggaaccttcgcgcggatggcagcggttgccggcggcctgcagaagatgccggaatacgcgccgctgctgcattgggcgccgatcgcctgctggtcagtcgcaggcgccggcttgctggtgattgcagccgcgcgcttgcagggcgctgctcatatcaaggcttcggcgggtggatgaacgcccaggggctcacttccgaatccctgggcacctcgaccgcaatcagagacggcccattgtggttgagggccttctctagcacggccttgaactgatccggcgcggtgacgcgcgcagcggcgacgccaaaggactccgcgagcttgacgaaatccggattgacgaggtccgatgccaccacgcggccgtcgaaacgttcgcgctggtcgcggcgaacattgccataggcgttgttgttgaacaccagggtgaccacgccgatgttgaactgcaccgcggtcgaaagctcctgcacgccgaacatgaacccgccgtcgccggtgatcgccaccaccggcttgtcggggttcgcaaccttggcgccaagcgcggtcggaaagcccgagccgagcgtaccctgatagcccgacgtgatgaaggtgcgcggctggtaaaccgggaagccgtaccaggaggcgaagccgacctgcgacagctcatcggtgacgatcgcattcgcgggcaacacatcgcgaaggattttgaggtacgccatctgcggctggatgcgctggatttcggcttgcgctgacgccgtcgcctcccggattttctcccgtcggtcgctgctcctcacatagcccgccttcttcacggccgtcacgagatcggccgtgcctgccttggcgtcggccacaatagcggcatcggagataatccggcgcatctcggccggatcaatgtcgatccgaatggatttcagtcccgtgggctgatacggccagcggaagccagatgccggcaattctgctcgggtaccgatggcgatcatcaggtcagtcgtgggccagagcttgtaggcggcggccatggtgagtccgagctcatgcgcgttggagacgatgccgcggccgctgcggaaggcgacgacaggcgcatcgatcatctcggcaagctcgaggatctcctcgcctgcttcgatcgcaccgctgccgacgaagatcatcggcgccttgctgttcttgatgagcgtggccgcctgcttgatcaagtccgggtctggctgcggcgcgggcagcggctccagcatttgggctgccgccgtatcggcgcgctgtgtgaagacgtcccagggcatctcgaccgaggcgggtccgcgccggccagacatcatctcctggaaggcgcgcgcgacgatcgtcggcgcattgccgggatattcgatccgctcggcccatttgacataggtgcgcaaagtcgcgagctggtccggcatctcgtgcagatggccgcggcccttgccgaggaactgcgtcggtacctggccggtgacgcagagcaccggttcgttgcagccgaacgcggtgagcagcgccgcgctggcattgagcacgccggggccgggcacgacactgaacacgccgggccggccgctggaacgcgcatagccgaatgccatgtagccgcaggcctgctcgtgccgcgcgccgatcaccttgagctcggcctggtggaaagcgtcgaacaggccgtagacctgcgcgccgggcaggccgaatacggtgtcgacgccgtgagcaacaagcccgcttacgatcgcttcgccgccggtgagggtggtcattgcatcattccacttcgatggttggtcaggcttcgtcgacgacaccgttgcgcaagagtccgatgccctcggcctcgacctcgacgacgtcgccgggcttcaggtagcgcggcggatcgaaccgggcacccgcgccggtcggcgtgcccgtgacgatgatatcgccgggaacgagcgtcgcgaaggtcgagatatagttcaggagatagcggaccggaaacatcaaccggctggtgcggtcgtcctgccgcagctcgccgttgacacgcgtggtgagcctgacgtccgcaatctgcgattcctgagtgtagggcacgagccacggacccaagctgccgctggaatcgaaattcttgccctgggtcacattgaacttggcgtggcgcagccagtcgcgtaccgagccttcgttgcagagcgtgagcgcagcgacgtggtcgagcgcggcgctttccggaatgtgccggccttgcttgccgatcacgagcacgatctcgccctcatagtcgagctgcgcggacgcgcgcgggcgcaccagcggcgtgtcgtggccgacgaacgagcggggcgagcgcatgaacatgctcggatatctcggcgcgtcttggccatccttgtactcggcattgcggtcgggatagttgacgccgatgcagatgatcttctccggcgcgggcaccggcggcagccaggcgatgtcggcgaacgcatgatccggcgcgcggccgccggcttcctccgcaaggctcacgagcttgccggccgcgatcacctcgcgcagtgtgggatagtccttggcgtgacgcgcagagagatcgacgaggccgccgtccacgacggcgccatacctggttgcaccattgacggaataggtcgcgaagcgaggcagcatcatcaatccgccaccagcacgtcggcgacgaatttcggctcgcgcaccgcctggcccgtgaacggcgagccctgctcgaaccaggagcgcggggcaggggcgccccacagcgtctggcggcgcggatcgcgcagcgaccagcgcagcggctcgtgatcgtgatcgcccgtgaagtagtcgctggtgtagagttcgaggcggtgcccgtcggggtcgcgcacatagaggaagaacgcattcgagatgccgtggcgtcctggccctcgctcgatgttcttcacgaagccttgcgaggccatgacgtcacagagatggatgatgttcatcgcggtcggcgtccaataggcgaaatggtgcaggcgtgggcccctgccgttggtcatggcgaagtcgtgaacgttgcccttgcgatgcatccaggctgcggcgatgcgcccgctgggtccatcctcctcggcgtactcggtgagacggaagccgagtttggcgtagaattccatcgtgtcctgcacttcggcagcgaacacgttgaaatgatcgagccgctgggggtggcagccccggtagagatcgtagcgacgcaagagatgcggccgccggtccatcgacgcgtagagctcgatctggaagccgaacggatcggtaaactgcagcgtgcggccctggaagggctggtcggcgaacgaataggagaggccgttctcggagaggaacttggcggccttgtcgagatcgccatcattgcccaccttgaagccaagtcgcgcgcaggccggagcggcggctttgcgcaacaccagcgaatgatgctgatgctcctcggcggcgcgcagatagacgacctgatcgtccgcatcttcgacatgcagcccgaccgtggtctcgtagaacgcgcggctcaactgcaggtcggtcacgtcgagtacgacgtgactggaacggatgatgttgaacggcggctcgaagatgtgctgcggtaccggcatcggcgtttccccaattttgtcattccgggcggctcgtagagccgaacccggaaatccatcgtgcaacagagtcggtcgacgaatggattccggcccacgactacgtcgcaccccggaatgactcagatccccagtttctgaatcttgtgcgtgccccgcgccagcgagacgtgcttggtttccatgtagaagtcgaacgaatagtcgccgccgtcgcggccgataccgctggccttcatgccgccgaacggcgtcggcagatggcggacgttctccgaattcagccagatcatgccggcctccagcgcgtcgccgacgcgcagcgcccggcccatgtcgttggtccagacatagccggtgaggccgtagcggatgtcgttggcgatctcgatcgcgtctgcttcttccttgaacggcagcacggtgaggaagggaccgaacacctcctcctgcgcaacccgcatcttgccgtgcgcgccggtcaccagcgtcggctcgacatagtgcccgccgcccgggccgtcatgggttttgccgccgacggcgatcacagcaccgtcctgccgcgcgacgtcgaagtaggagcagaccttggcgaggtgccgctcgtggatcagcggcccgatctcggttgcgggatcgaggggatggccgaccttcagcgccttcacgcgcgaggtcagcctctccacgaatttatccgcgatggtttgctggatcagcaggcggctcgacgacgtgcagcgctcgccgttgagcgagtagatcatgaacacgacggcatcgagcgcgcggtcgagatcggcgtcgtcgaacacgatcacggggttcttgccgccgagctcgaaatgcacgcgtttgagggtcggcgcgccctgcatcatgattgcagaaccggtcgcgctctcgccgacgaagccgatcgccttgatggcgggatgctcggtcagcgccttgccggcctcttcgccgaaaccgtgcacggtgttgagcacgccgtcggggacgccggcctccttgacgagctcagccaggatggacgccgtcaccggcgaccattccgctggcttgtgcacgacggtgcagcccgcggccagcgccggtgcgatcttccaggtcgagagcatgaacggcgtgttccacggcgtgatcacgcccaccgggccgatcggcacgcgggtcgagacgttccagtgctcgtcgctcggcgtgttgagcccgtcgcgcgcctccgcgcatttgtcggcgaagaagcggaaattctccgcggcgcggatcgccgccttggccatgaagcgataggcctggccggtatcgatgcattcgagcaccgcgatgtcctcggcattgtcctcgatggcatctgcaacgcggtgcagcagcttcttccgcatcgccgggcccatgtcgcgccaggatctgaaggccagcgcggcggccgttgcggcgcgatcgacgtcttcggcggtgccgcgcgcgacgctcgccagtgtcgtgccatcgacgggcgatttggtctcgaacgtctcgcctgagatggaggcaacggtcttgccgtcgatcatgtggccgatgccgtcggcacgcagcttcttcatcaacggcgcgacgcggtcgcggttggcctggaacacatcggttttcggagcgggcttatccatgggcggcctccgctttcagggcgtcgtggatgttgttgcgtttccagctggtgtccttgtcgttgatctgcatgtcgaacgatagagcgaacttgctggcggcaaagacaggatcgaggtgtttcgagagcgcctgaaagacatgcctgccggccttctgacgcgtctcgagatcgcggccctcgccgatgcgcagcaccatatcgagaaagccgtaatcgtgccttgcgtcggcaatcgcatagtgctcgcagcggatggcgcgaacgcggatgccgccgatcgggaagatgccggtttcgaccgcggccttgcgcacgacctcgcacaccgccgcgatgtcgagacggccgtcgagattggctgaatattcgatcgtgaaatgcggcatcgcggtttcactccctgccttcttgttcgcctaagcgaagtagcagctcaccgagccgtaggcgccataatcggcctggattgtgtcgcccttgcgggtctcgatcggacggatgaaagagccggccagtacgacctggcctggctccagcgcgagcccaagcggcgcgatcttgttggcgagccaggccacggccgtggcgggatgattgagcacgccggcggcaagaccggtctcctcgagctggccgttcttgaagcacagagcgccgatccagcgcaggtccgtgtcgagcggacggatcggccgtcccccgagcacgatgccggcattcgccgcattgtcggcgatggtgtcatagatctttcgcgtcgttttggtcctgggatcgacgcgctcgatacgcgtgtccaaaatctccagcgccggcacgacgaaatcggtggcattgagcacgtcgaacatcgtgcaactaggcccggagagtcgcttggtcatgacgaaagcgagctcggcctcgacgcgcgtcgcgatgaagcgttcggtcgggatgatcccgccgtcggtaaagaacatgtcgtcgagcaacacgccggaatccggctcgtcgatgtcgagcgcgctctgcatcgccttcgaggtcaggccgatcttgtggcccttcaccacgcggccctcggcgatcttgacgtcgacccaggccttctgaatcgcgtaggcgtcagcgatggtgatgtcgggaaagtcctgcgagagctgccggatctgcgtgcgggtcttctccgcctggtgcagacgcctcgcgcaagcttggatatcgtcgctggaaagcgccatttgtgatcttacaaatcgtggtgctgaacgatacttaacatgttaagtgaatgcgtcaacacgatttcgacttgctgcactgcaaacgttttgcggcttgaaagggcgtcatgacgaagaaacttgctgatcccgccgacggaaacgcgcctgccgcccggcacgtgccgatgcgcgacttctcgcgttcgttgcccatgtcgttgctgcgggcccgggaggcggtgatgcggcagtttcgtccctcgctgcgcgagcacggtctgaccgagcagcaatggcgcatcctgcgggcgcttgcggccatcgaggcggtggaggtcacggaacttgcccgcaccgcattcctgctcggaccgagcctgtcgcgcattttgcgcgaccttgaggcccgcaatctgatcgaacggaagacagcgaaagcggaccagcgccgcagcatggtctcgatctcgaaagagggcgtgaagctgatggccgccgtggcgccgacgtcggaggcaatctatgccgagatcacgcgccgctttggggcgcgcaagctcgtcgaattgcaggagatgctcggcgaactcgaacagagtctggcggggcgcggaagcgcggatgagacaatagccgaggggtgaacccagatatgcgtgcgtgcgcggcaagagccatggacattcacgctttttttcgctcaaagtgcggcccaacgcgatccgcggcgagtgcgagcaacagggaaggaaggcaacgtggcgaacaaggtcaaggaaatctggaagtcgggcaaggcggtcgtcaacgcttggctggcaatcccctccggcttctcggccgagatgatcgcgcaatgcggctttgacagtgtcaccgtcgacatgcagcacggcgtgcaggactatctgtccatggtgcagtgcttccaggccatggacaagcatccggtcacgccgatggtccgcgtgccctggaacgagccggggatcatcggcaaggtgctcgatggcggcgcctatggcgtgatctgcccaatggtcaacacgccgcaggaagcccggaacctggtctcttattcgaagtaccccccgaagggcgtccgctccaacggtccaatccgcgccggcatgtacggcagcgcgggctcataccagaagacggccaacgatgagatcgtgctgctgccgatgatggagaccaggacggcagtcgagaacatggaagcgatcctcgacgtcgaaggcatcgacggcgtttatatcggtccgtccgatctcggcttctcctacggcctcgagcccaagcttgaccggaccgagcccgagatcctcgccatctatgagaagatcatcaaggagtgcggcaagcgcggcctcaatccgggcatccactgcagcggcgccgaaggcgcggcgcgcgccatcaacatgggcttcaagctggtgacgttgtcgaacgaagtcggcctgatgacgacctacgccaggatgcaggtcaacgcgacccgcaaggattccggcggcaaggcttaagaaacgcgcgaatggcgcatggggagtagcgaatagtgctactccccattttccattcgccactcaccattcgcctccgaaggagactcgccatggccatcagccccgtcatccgcctgcatccagatgatggtgtggtgatcgcacgcgcgagcctgccgccgggaacggtggtcgccgacggcgtgaccacggtcgatcgcattccctccggccacaaggtcgcgatcaagccgatcgcattgggcgaaccgatcaagcgctatggccagatcatcggctttgcgacccaggccattacgccgggccagcacgtgcacgtgcagaattgcggcatgggcgacttcgccaaggactacgcctattgcgcggacgtcaagccgacgccgaacttcgacctgccggcgacgttcgaaggcatccgccgcccggacggccgcgtcgccacccgcaactatatcggcatcctcacctcggtgaattgcagcgcgcatgtcgcaagcctcgtcgccgacgtcttcaagaagaaccccttcagcggcgacaatccgttggccgacttccctaatgtcgacggcgtggtcgcgctgacccacaagaccggttgcggcatgacgcagaacgagccgctggcgctgctccgtcgcacgctcggaggctatgcgcggcacgtcaatttctcgcatgtcatcgtgctcggcctcggctgcgaggtgaaccagatcggcggcctgatggaagagcagaagctcgccggccgcctgcgcgcaatggacatccaggaggtcggcggcacccgcaagaccgtggaggcgggcatcgccttcgtccgcgaggcgctcgccgatgccaacacagtgaagcgtgagacggtgccggcgagcgagcttaccgtagcgctgcaatgcggcggctcggacggctattccggggtgtcagccaatccggcgctcggcgccgcgagcgatctcgtcgtccgccacggcggcaccgtgatcctgtcggagacgccggagacctacggggcggagcacctgctgacgcgccgcgccgtcagccgtgaggtcggcgagaagctggtcgacctcatgcgctggtgggacgaatacacgacgcgcgaaggcgccgagatgaacgccaatccgagtcccggcaacaaggccggcgggctcaccaccatcctggaaaaatcgctcggcgcgatggcgaaggccggcacaaccaacctcgtcgaagtgctgcgctatgccgagcccgtcaccaagaagggctttgtgttcatggacacacctggctacgaccccgttgcagccaccggtcaggtcgccggcggcgccaatctcgtgtgcttcaccaccggtcgcggcagcgtgttcggctgcaagccggcgccttcgatcaagctcgccaccaacacgccgatgtacaagcgcatggaagaggacatggacgtcaattgcggcaccatcctcgaaggcgaggagagcgtcgagcagtgcggacagcgcatcttcgatctcatcctcaagaccgcctcgggaaagccgaccaagagcgagagcttcgacttcggcggtgccgagttcgcgccctgggtgctgggcgcgacgatgtagtcgcgttgcgcgagcgccgtcgcgggacccacgcagtcacaccggcagtcgttgctccacgccgatccccgcactcgcgtgtggttcaacgagatgcaacgacggctcgctacgtagtgctacggagtcgggcgccgcttgcaagattcccgagcttacattcggttaacattgttgtcgtagacgagggtatgatgcggctccacagcgttgtggggccggcctttgcgtgagggtccaacagatgcaagcgatacgtcccactggggtggagaatctcctcggtgaggaggagttgatcgtatcgaagaccgatctgaaggggcgcatcacctatgccaatgatgtcttcatccggatggcgaagtactcgtggaaggaactgatgggcgcgccccacagcctgatccgccatcccgacatgccgcttgccgtgttcaagctgttgtgggacacgctccagtccaagcaggaaatcttcgcctacgtggtcaatctggcgaaggacggcagccattactgggtgttggcccacgtcacgccgacattcgacgagcgtggtaatgtcgtcggctatcactccaaccgtcgcaagcccgaccccgcgcagatcgatcgcatcaagccgatctacaagacgctatgcgcggaggaagcgcggcatgccaatgccaaggaaggcatgcatgcgagcttcgaggcgatggtcgggctgctcaagcaacagggtgtcggttacgatgaatttgtgctctctctctaaggcgcagggagcgaccgcgctcgcgtgtgttcttgccctcgttgcattccttctttcatttctcggtgtgaccggaatcgccagtgccgctctgcctggcgcgacgttcgttctgcttggctatgccgtctggtgccagcatcgcacggcggtagacgtcgatgaggtcgccgacgtgtgccgcaaggcggcgcgcggcgatctcgaggcccggatcatgaccgagcgccaggccgggcggatcggtgcgatccagaagtccgtcaacgacatgctcgacatcaccgacgccttcgtccgcgaggcttcggcgtcgatggactatgcaagccgcggcaggtatttccgcaagatcctcgcgcgcggattgcccggctcgttccgtcgctcggcggtcgtcatcaatgccggcaccgacagcctcggccgccgcgttgtggagatcgccggcctcgcgcgagagttcggtacgcatctcgacgcagtcgcgggcggcctcatgtgcgccgcgaccgatctcgaatccgacgccggtcagatggccgcggcggcggagaagaccagccggcagacctccggcgtgctcagtgcgtccgaccaggcctcgcgcaacgtcgccaccgtcgccagcgccgcggagcagctcgcatcatcgatcgccgagatcaaccgccaggtggccggctcgaccgcgagcacggggcgggcggtgaacgaggccaatcgggccggcagcgagatccgcacgcttgcggatgccgcgatgcagatcggcgacgtcgtcaagctgatcagcgagatcgcctcgcagaccaacctcctcgcgctcaacgccacgatcgaggcggcccgcgctggcgaggccggccgcggcttcgcggtggtggcctccgaagtcaagagcctcgccaaccagaccgcgaaggcgaccgaggagatcagcgccaaggtcggcgagatgcagcattcgacgaccaattcggtcgcggccgtcgaggcgatcgcgcagaccatctccgagatcaacggcatcacggccagcattgcagcatcgatcgagcagcagggcgccgcgacgcgcgaaattgcccgcaacgtccaagaagcctcggtcggcacgtcgcaagtttcctccaacgtgacgggcatcagcgaagctgccgccgataccggccgcgtcgccggccgcgtcaacagcgcctccgagcgcgtctatggcgaagtcgagacgctccggcgcgaggtgacgcagttcctgcagcggctgacgtcggcggcgtaggctgcccggcgtctccttgtcgcgacgtttgcagcgagcgaacaggagatagcgaatggcgaatggcatcattgccgccattcgcccgtgccataggcacgctctgcccgttgttagtgcttgatcgcacccacctcaggtgttctgctcaaaaaagctgctggagcaccgcaccccgtgtcgatctacgtcgcgctacaccacgtcacgcactacaaatacgaccgtccgatcgatcttggcccgcagactatccggctgcggccggctccgcacacgcgtaccccgattttgagctattcgctcaaggtcacgccctccaatcatttcgtgaactggcagcaggatcctcaaggcaactgggtcgcgcgttatgtctttcccgagaaggccaccgagctgaagttcgaggtcgatttcacggcgcggatgaccgtggtcaacccgttcgactttttcgtcgagccttacgccgacagctttccgttcgaatatcccgatgatctcaagaccgagcttgcgccttatctcgagaccatcaagcccgatcgcctgttcgccaggtttctcgactcgatcccgcacgaggccccgaacaccgtcaacttcctggtcgagctcaatcgcgagcttcagaagaaagtccgctacatcatccggatggaaccgggcgtgcagacgccggaggagacgcttgcctccggcgcaggatcatgccgcgactccgcctggcttctgatccagacgctgcgccatctcgggctggccgcgcgcttcgtctccggctatctgatccagatccgtcccgacatcgatccgatcgagggaccgccggaagtcgagaacgatttcacggatctgcacgcctgggccgaagtctatctgccgggcgcaggctggatcggattcgacgcgacctcgggcatgcttgccggcgaggggcatattcccgtcgctgccacgccgcactatcgctcggcggcgccgatctccggcggggccggctttgccgaggtcgaattcagcttcgacatgagcgtgaagcgtatccgcgaggcgccgcgcatcacaaagccgttctcggacgaatcctgggcccgcctcgacgatctcggcgagcaggtcgatggcgatctcgccagcgcggacgtgcgtctcaccatgggcggcgagccgaccttcgtctcggtcgacgatcccgaagctggggagtggaatacggaagccgtcggcccgaccaagcgcgcgctcggcgacgatctgatccgccggctgcgcacgcgctttgcgcccggcggcctcctgcactacggccagggcaagtggtatccgggcgagagcctgccgcgctgggccttcggcctgtactggcgcaaggacggcgtgccgatctggaggaacgccgacctcatcgcgaagatcgagaatccacggcgtcccgaggtccgggatgccgaggccttcatggaaggcacagcggcgcggctcggcctcgatctcggctacatcatgccggcctatgaggatcccgcctattggctgcagaaggaggccgagctcccggtcaacgtcgaccccaccgattccaaactgtcggatccggaggcgcgcgcacgcatggcgcgcgtgtttgaccagggcctgaccacgccgcgcggcttcgtgttgccggtccaacgctggaatgcgccgccgcgctggcgcagcgagcgctggtcgctgcggcgcaatcatctattcctgacgccgggtgattctccgctcggcctgcgcctgccgatcggttcgctcgctcacgtcccgcccaaccagtatccctacatcgtcgagcaggacccgatggagccccggggcaagctgcccgtcttcacgcgcatggcccggccgccagcgccgccgcgtacggctcccgagcatctcaacacggcaattcctgtgcgcaccgcgttggcgatcgagattcgcgacggcgtgatctgcgccttcatgccgccggtcgagcgcatcgaggattatctcgagctggtctcggcgctggaagataccgccgaagagatgcagcttcccgtccatgtcgagggctacccgccgccgttcgacccgcgcatcgaggtgattaaggtgacgcccgacccaggtgtcatcgagatcaacatccagccggcgaggagctggcgcgacgcggtggagatcacctccggactctatgaggacgcggcgaaggtgcgcctcggcgccaaccgcttcctggtcgacggccgccacaccggcaccggcggcggcaatcacgtcgtggtcggcggctcgagcccgcaggattcgcctttcctgcgccggccggatctcttgaagagcctcgtgctgtactggcagcggcatccatcgctgtcctacttcttctccggcctcttcatcggcccgaccagccaggcgccgcgcatcgacgaagcccgccatgacagcatctacgagctcgagatcgcgctctcgcacgtgccgccgccgggcacccagacgccgctgtggctggtcgaccggctgttccggcatctgctcgtcgacatcaccggcaacacccaccgcgccgagatttgcatcgacaagctctattcgccggagggcccgaccggccggctcggcctcgtcgaattccgcgctctcgaaatgccgcccgatccgcgtatgtcgctggcgcagcagctcctgatccgcgcgctgatcgcgaagttctggcgcgagccgctggcgggcaagttcgtgcgctggggcaccgcgctgcacgaccgctacatgctgccgcatttcatctgggaagatttcctcgacgtactcaccgagctgaagcagttcggctatccgttcgagccggaatggtacctggcccagctcgaattccgctttcccgccttcggccgcgtgcatcatggcggagtgaccctggaactgcgccaggcgctggagccctggcatgtgctcggcgaggagggctcggccggcggcaccgtgcgttatgtcgattcatccgtcgagcggctccaggtcaaggccgagggcttcgtcgaaggccgccacatcgtgacctgcaatggacgccgcctgccgatgacctcaaccggccgctcgacggaagctgtggccggggtccgcttcaaggcctggcagccggcctccggtctgcacccgaccatccccgttcacgcgcccctgacgttcgatctgatcgatacctggaacggacgctcgcttggcggctgcgtctaccacgtcgcccatcccggcgggcgcaattacgacaccaagccggtcaatacctatgaggccgaggcgcggcggctggcgcgcttccaggaccatggccacacccccggtccggtgcagccgccgccggaggaacgcacaaatgagtttccgctgaccctcgacttgcggaccccgctcctgcaatgagtatgatgcgggggcatggagacgcgcatgggcgagggcgcagccgaacaggacgacaaggcgggcagggcgcagagccagcgcgagggccagcgccggctcgcacaatgggtgcgcgactatagccggctccccggtattcccgacgagttcttgggcccgaacggcacgccgcgcgccgtgtggagccgcttctttgacgcatttggtgcgctcgcgcccgacgagatcgagcggcgcttcggcatggccgaccgtcacttgcgcgaggccggcgtcacctatcgcgcgccgggcgatagcgccgaccggccctggtcgatcagccatctgccgcttttgatcgacgaggccgactggcagcagctctgcgccggcatcacccagcgcgccgagctgctcgagcgcgtgctgcgcgatatctatggcgaaggccggctcgtggccgaaggcgcgctgccggcggccgcgatcgccggcagccccgaatatcttcgtcccgtgtgcggtgtgccgccgccgggcggacgctatctctcgctctatgccgccgatgtcggacgcgggcccgacggtcgctggtgggtgctcggcgaccgcacccaggcgccgtcgggcgcgggctacgcgctggagaatcgtctcgtgctctcgcgcgccttctccgatctttacaagtcgatgaacgtgccgcgggttgcgccgttcttcgaggccttccgcgattccttgcgcgcgcgcgccgaccgcgacgagcccaggatcggcgtgctcactcccggcagcttcagcgagacctatttcgagcatgcgacgctggcgcgctatctcggtttccttctggtcgagggcgaagatctcgcggtcagcgacaaccgcgtccacatccgcactgtcgccggcctcaagcggctggacgtgctgcttcgccgcgtcgattcgaattcgctcgatccgctcgagctcgatgcctcctcgcggctcggtgtacccggcctgatcgacgtgctgcgcaaggatggcgtcgtcgtcgccaacatgccgggctcgggtgtcctcgaggcgcgggcgctgctcggcttcctgccggcgctcagccgccgcttgctcggcgaagacctgaagatgccgcatatcgcgacgtggtggtgcggccagcgcgcggcgcgcgacgaggtgctggcgcggctcgacgaggtcgcgatcgaaggtgcctaccggcgcgacgttcccggtttcgacagcaatggtcccgtgctcgcgagcgagctcgatgccgccgaccgccagcgcctcatcgacgccatcaccgcgcgcggcatggactatgtcggccaggaggtggtgcggctctcgaccatgccggtctgggagaaggggcaactcacgccgcgccccttcgtgctgcgcgtgttcgcggccgccacgcccgacggctgggcgatcatgcccggcggcttctgccggatcgccgagcagccggacgcccgcgcggtgtcgatgggtgacggcgcccgcgccgccgacgtctgggtggtctcggacaagcaggtctcgaccgcgacgctgctgcccgcgaccgacaaggtgcgcatccgccgcatcgccggcgtgctgccgagccgtgccgccgacaatctgttctggctcggccgctacctcgaacgcgccgaggcgacgctgcggctggtgcgcgctttgggctcgccgagcgggcccaacaagggcaccgcggcctcggtgcaatcggctgaacgcatccagcgcctgctggtggcctggggcgcgatctcgcagacatcgcgcaccgcctcgggccgcatcacggcagaagcgctgcagagtgcggagcgtttcggctcggcactgtcgctggtgcgcgcggcccagcgcacggcgacctcgctgcgcgagcggctgtcgcccgatgcctggcaggtcatcaccgagatggtcgagcgtctcgccctggaggtcgaggacgacgacagcgtgttaagcgccgccgagctcacgttgcaggagctggcgagctttgcggggcttgcgcaggagaacatgaaccgcgccgccggctggcgtttcctggacatcggacgccgcatcgagcgcgccatcaacaccacccgcttcacgcgccagttcgcctatgatgaggccggcgacgaggatctcgacatcctgctgacgctggtggactgccagatcacctaccgctcccgttatctgctggcgccgatcctggccccggtgcgcgacctcgccgtgctcgacggctacaatccacggtcggtggcgttccaggtgacgacgttgaacgagcacatcgccgcgctgccgagcctgagggagcacggcctgatcgagaagccgcagcggctcgcggtggcgatgcaggcgatgcttgcgacggcggaggccgagaagctcgaggtcaagacgctgttcgcgctggagcaggatctgctcagcctcgcggacgcgatcgggcagcactatttcccacacggtcccaacgccagccggccggaaaagctgacggggctggcgtgatctacgacatccgtcacgtcaccacctacgagtacgaaaatccggtcagcttcgctcgctgcacgctgcggctcgagccgagaagcggaggcggccaggaactgatctcgcacgatgtcgagatccatccacggccggccgagcgcaaccagcggcgcgatttcttcggcacactgacggaaagcgtcacgatcgaagccgcccatcgcagtctgcgcatcgactcgcgctcgcgtgtctcggtgtcacgccagcctcccgcccgtagtgcggccggcccgtcctgggagagcattcgggacatcgccatcgaggcgacgagcctcgggccgtcctcgcccgtcggctatgtcttcgcgagtccgctggtaccggtgctgcgcccggtcagcgcctacgccgcggaaagctttgcatccggcaccggcattctcgagggcgcggtcgacctgatgcaccgcatccgcagcgaatttcgctacgacccgaaggcgacggtgatcacgacgccgctcgaggaggtcttcgacaaacgccatggcgtctgccaggactttgcccatgtgatgatcgcggggctgcgtgggctaggcctgcccgcagcctatgtcagcggctacctgcgcaccattccgccgccgggccagcggcgtctgcagggcgccgacgccacccatgcctgggtgtcgctgtggtgcggggcggagcttggctgggtcgatctcgatccgaccaacgatctcctgatcggcaacgatcacatcgtgcttgccgtggggcgcgatttttccgacgtctcgccggtcgacggcatcatcgtcggctcgcccaggcagaagctcaatgtcgccgtcgacgtgctgcttgtggagtagggcgtgtactcataagcgttcggcttaccaacgcgaagcggaagtctgccatctagaatgtcattggcagctttgtgacccggaactgacatcaggacgcagggatcggccctttcgcgaacttcaagcttggtgcaaacttcaggtcatatttcgaaggattggatagggtgctgccgatgccaattttccttgaccggcacgatctctcggggctgaccgccgccgatatcgccgaggcgcatcgcaaagatctggaagtgcaagatcgatacggcgttcgttttctaacgtactggtttgatgaatcccgcggtacgggcttctgtctcattgacgcaccggatatccgaacggcgatgagggttcatgacgaagctcacggcgacgtagcgaaggatgtcatcgaagtggacctctcggcggtccaggcgtttctggggagggtgtccgacccggcacctggcggcgcggcagacgacatcaaattcgattctgcgctgcgagctatcatgttcaccgacatcgttggctctaccagcatgacggagcgtcttggcgatgcccgttcagtggagatggttcgggctcatgacgcgctggtgcgccgggcgttgaaggacgagggcggacatgtggtgaagcacaccggcgatggtatcatggcatcctttgccgacgcctctgcctccgtgcaatgcgcccgcgccatccagcgcgcatttgaagccttcaatctggcgagcaaggagaagcttcaggtgcggattggcatcgatgtcggcgagccgattgctgacagcaacgacctcttcggtgcgaccgttcaactggccgctcgtttgtgtcagttggccgaccccgatgccattctggtgtcaaaggctgtacaggattgcatccgggatcgcgtgcaagtgtcaagcttgggtgcccaccatctcaaaggctttcagcagcccattgatgcataccgaatcgaatggcgttaactgtcgcgccttcctggcgcccggcgatcttctcactgactttctcagcggcccagtgggggccaagacggaactcctcacgcataaattcgatcgcggcagactgtgccgctggcagaggcagtgcagcgccagcggcgttgaggtggatgcatgggacatcaaccataggtctcatctccttctcaccttgcacaagtatggtgcaaaacccatgcgatgctaacctgcgaatacatcagcccagatgatcagctgaaatttcttgtgacctgggcggacggcgattggacgctgggcttcgacggatgtcccgcccacacgtatgggagcatccttgctgatctgtctggtctcgatgagctcaccgcagtcgaacgctatctcgctgacgtcatcggcaacgtcagcgttattgctctcaggcgattttctggtgttccaagcgatggttggttaactgatgtcctgccgaagaagtggtgagctggcagaactacgcgctccggacgagacggttgaatttcggcgatcggatgggagcgtcgtacggccctgagttgccgcgtcctacatatatgaccaaccgtgctccgtcgcctcttggcccgttgcggccctgcgtgacgagcgcgcagacgtccggttggcgtggtggagactagcgcgtgatggactgccgaggccgcgtgtcgacccgaagcggactgtgagcatacgagcctcgggccgaacggctctcgctccgcgcaccgatcaaacatttcggaaccatagagttgttgccacgttttcccgggcgcggctgaccgcgtttcggtggagaggcgccagctcgcatcccattgcccgcgaactggcgcctttttggtgctaggtggagcgaacttcatgtttcgtaggcagctatgaaatggatgctcgtggtcttggttggcggcatcacacccgtgaacactgacctggtgttcgacaagttcgcggattgcctttcggccgaagagcagatgcgcaagcactattccgacgcgttcgaggcctgggaccgttgggcggcggccaacattgagcgccggcgcgaatactcgaaagcgcgagaactgcaggccaagagacttctcagcaatatcgggacctgtgtgccccatggggccgatgatcagaagcccgtcgcgtctcccaatccctctgctcccgcgacgtcaccctcgccagcccctcaaccaaatccgcggccctaaatctctgaccggaggcattccatgagattcattctgacaatcgtcagcctcctgggagtgctcacgtcgcccgcgcttgccgatcactggaaagatgaaagcggtaaggggcgctggggctacgaccgtggtcattaccgcgcttacaactacgaccgcgaatacaagcaagagtaccgccgaggcccctgcaagatcgagcgcaagtggggcaagcacggcgagtacaaggaggcgacgaagtgcaaaggttatcgcaactagggctccgcggcccgaggagtgcgggccgctactgaatgttacttgtggcccatctccgacctaccgtgaggcaggccaaggccgccatagaggtagagcggactctccaaaagtgcagcgcaggcttacgggtactcgccgatggcaaaggtcggcgcttgccggtcaccgaaccatggtctcgcgatcccaggccttgtaatcaggcgaaccctggatgcggatgggaccgtcgtagccgtactccaccatgtgcacggtcacataatcttccccaagaaatgcgacgccataggattgcggcagatcgcaagcgctcagcaggctcgtctcggagaacagcggaaagctcgcatggttggtaccgcgcagcgacgagaccgggacgcccgcaatcgagccggcaagaggcaagtgacaatgcccgaagaacacgtggcggatcttcgcccgatggcggctgatgagatgccggaatggagcatcgtcgagcaggccgatctggtcgaacgggacgagatgcaccggcatcgggttatggtgcatgaagagcaggaacggcccgtcatgctcggaaagccgcgcctcgagccagccgagacgatcgctgcaatagcggccggcgtgcgtttccggatgggcggtgtcgaggaacaggcagcggccggcgacggtgtcgtggatgccttgaacgaagccgttgtcgtcggcgaggtcggggaacacgctcaggaaggcggtgcgccggtcgtggttgccgatgcacagccgcaccggcagcggatatgcgtcgaggcgctgcttgagccattgatagtcggcgaggtcgccccagtccgagagatcgccggtgatcaccatcaattcggcgtcgtgatgatcattcagcgcatgcgcgagcgcccgttcgaaattgatgcgcgggtcgcggcccccgatggtcgagccaggcgccgtcaggtgaatgtcgctcagatgcagcagcttcatcgcaatctccggtcattggggcggcacggggcgccgagggcgtcccgtgccggtgatgtgaggatggtcagcgcgccgcgccggtggtcttcggcagcagcttctgcacgtccgcggtcatgtcggcgaggacggcctcaggctccttggtgcgggcgcccgagatgatcgagttgagatgatccttgatgacgtccgtgatcttcaggccgttgtcgccggggaaggcgtaccacttggtgagcagcgcgagctggctgaccgcggtgtaattgttggggttcttgacgtagaagtccttcagatagacgtcgttggctaccttgttcggaggcatgtaaccggtggtctccgccatgatcgcggcgcccttcgggccagtccagaacttcacagcttcccaggcggcgtcgcgcttggccttgtccttggcgaggatcagcacgacattgccgccggccgggagcctgccgttcggggacgcgacgtccgggaacggaatcgtcttcagcgcgaacttgccgccggtcatctgcgtgaccttgttgaggtcggaggtcgaagtgatgtggaaaccggtcttgccggcagcgaacgtcgcgcgcatcgacggctggtcgagattgggcatgccggcctcgttgacgagccgcgcaatcgtgttgatggcgaacttgccttccgctccgtcgaacgcgaccttggtctcgtcggcgttgagcatggtgccgccgcgcgcgaagaccggcgcctgccacagccagttgccggtgatgtcccaggcgtaggtgacgccgttggtgtcgttgccgagcgccttgatcttcttggcgagcgcgatcaggtcgtcccaggtcttgggcaggttgttcacgtcgccgccggcctgcttcaccagatcgagattgacgtagacgattggcagggagatcgcgaagggcagggcgtagaccttgccgctcgcggtgccgatgtcgaacatcgcctgatgaaagccctgcttgtcgaaatccttctcggcggcgatgtaaccgtcgagcgcggccgggatgttcttgtcgaccaggacgcggatgcggttcaggccctggaaggacacgtccggcatctggttggtcacggcctcgcgcagcaccttctgggtgccgtcctcgtaggattcgtaaggcgcccgcatcgtgaccttgatctccgggtgtatcttggcgaattcctcggcgatgcgcttgtgggtctcggtgaacagctccggatagggatactgcatcacgatctcggtctgggtctgcgcgagcgcagatccggccacgagcgacagagccgctgcggcgatgatggtcttcagcatggatagactcctgttgggttggtcggttacttgatgccggtgagggtgatgccctcgatgaagcggcgctgggcgaaaaggaaagcgatgacgagcggtgcgatgatcaccatcgccgcggccatcagcgggccgtagctcgtgccggcctcgttgttgcggaaatgggcgaccgcaagcggcggcgtgcgcaagtgctcgctgttgaggacgatcagcggccagaaataatcgttccaatgcgcgaccaccgagaagatgccgaaggcggtgacggccgggatcgcggccggcagcatcacccgccagacgatgccgaattccgagatgccgtccatgcgcgcggcgtcgacgagatcgtcgggcacggtcttgaagaactggcgcatcaggaagatgccgaacaccgagatcgtgaagggaaggacgagcgcggcatagctgtcgagcagccccgccttgtgcagcagcaggaagacggggaccgcggtcgcctgcggcggggtcagtatcccgaacagcaccagcgcgaacatcgtctcccggccgaggaagcgaagctttgccagcgcataggccgccggcagcgccaccatgacctgcagcaggaagatcgagaccgtgacgatgacgccgttgagcaggaagcgcagcagattggccttggcgaatgcctcgcgcagattctccgccagcgcgaactggtgtgggatcaggtgcagttcgcttgagaagatctcggtttgcggcttggacgcggtcgagatcatccagatgaagggcgccagcatgattgccgcgccggcgatcagcagcacgtggcggaggatcgcccggaatgggatgggatgtgcattgctcatgtgtagtgcaccccgcgatcggcgagtctcgatttgatcagcgtgagcagcagaacgaagaccaggaaaacaacggtgatcgccgcggcgtagcccgagcggaagaactcgaatccttccgtgtacatggtgtggatcaggacctcggttgatttcgacgggccgcccttggtcaacacgtggacggtgtcgaacacctggaaggagcgaatgccggagatcacgacgacgaaggtcgtgaccggtcccagcatcggccaggtcacgagccggaaccgcgcccagccgctcgacgcaccgtcgatttcagccgcctcgtagagctgcttgggaatggagacgaggccggcgagaaacagcaccatgttgaagccgaccgcctgccagatgccgatcgcgcacagcgcatagagcgcggtgttgcggtcctgcagccaggcaaatgccggcaggcccgcgccgcgcaacatcccgttcaccaggccgaattgcggatgcagcatgaactcccagaccacggccatggcgatcagggtcgccatcacgggcaggaaatagatcgtccggtagaggctgcgcaggctggtgccgctctggatcaggagcgcgatcgcaaggccggcgatcacggcgccgggcaccacgatcacgacgtaggtcagcgtattgcgcagcgcagtccagaacaccttgtcggcgaaaaggtcctggtagttggcgagaccgatccaggagaaatgcggcgcgccgagctggtaatctgtgaaggagagggcgatcacgccggcaagcggaccgagcagcatgatcagcatcagcgccgccgccggcgtcaccaaggcgtaggcggaatacgtgcgtcggctgccgtggaccggcaccgcgcgccttgccgcgctggcaggcgcgatcgcggcgtccattgtcatcgagccgtcagacatgggcgggctcacgaacgcgctcgggctgctccaccttgagctcgatccgcttcccggccggatcgaaaatccgtaccgcgtcgggggcgaaaccgaaggtgacggagctggccatcccgggcagatgccggacgtccgccagccgcgcgatcaggcgcaacccggagccttcgatcgcaaggtgcacgaatgcctcggcgccgagattctcgagatggacgaccgttccggagaacggcccggcgccgaggtcgatccgctccgggcggacgccgacccgacagtcgccggccgcagcccggcaggataatttcagggcagtccccagcacatcgacgccgccgtccttccggatccggcctggaaggatgttgatcttggggctgccgatgaattcggcaacacggatgtcctcgggatcgttgtagatctccgcaggcgtgccggcctggatcaattcgccgtccatcatgacggcgatccggctcgacatggtcatcgcctcggcctggtcgtgcgtgacatagacgaacgttgccttgaggcggcggtgcagctcggcgagctccgcgcgcatgtggacgcgcagctttgcgtcgagattggagagcggttcgtcgaacaggaaggcccgcggctcgcgcaccatggcacgtccgaccgcgacgcgttgccgctgtccgccggacaattgccccggcttgcgccgcagcaacggagcaatgtcgagctgctcggcgatggcttcgacgtcattgcgaatgtgccgttccttggcgcgccggcccggcagcaccgcacctaggagcggcaggcgctcgatcgccgagaggcgacgcatccgcagcggcaccgcaatgttgtcgaaggtatttaggtgcggatagagcgcgtaggattgaaaaaccatcgcaagattgcgcgcgctcgggcgaatgccgtccaccgggcggccgtcgatgcggacctcgccggaattctgcggctccagcccggcaatgacccggagcagggtcgacttgccgcagccggagggaccgaccagcgagatgaactcgccgtcctcgatccggaaatcgatgcccttcaggacgtcggtaccgtcaaaggatttgcggattgcggaaagttcgatctgcgccatgcgcgctggtcccctgctggccggttgcggcgcacgaggagtagggagcgcgtctgacattcacataacggtcaatggccatgcttatggtcatcccaggttttgctttcggtccggcagacggggaatctcgatcgtgagagtgttgtcgtggcgttgacgtcctcgcgtgtccgggcggtcaatgcggtgttcgagaccggcagcttcgcggccgcagcaaggcggctcggggtatcacagccggccgttgcgcagctcgtgcgcgacctcgaggccgagttcgcagtggcgctgttcgaccggcacggacagactctgatcccgacgccgctgtgccggcggctctacgctgcaacgaaccgcatgcaagccatcgaggcggatgcgctggcgatcctgcagcagcgcgatgagctcacggggggcgagctgcgcatcgggcttggcaatgccatgccgggcatggcgctgattgcggcgttccgcaatctgtatccgaagatccagatcaacatcgagatcggcagctggtcggcgatcatggccgcggtggtcgaccagcgtgttgacgtcgcagtattgcccgaggtgccgcaggacaatcgcttccggcgcgagtcctgcgtccagcagcgcgtcgttgcgatctgccatcccgttcacgagctcagtcgccaatcgcgcgtgtccatcgccgacctcgtgcgatatccgctggtgtttcgcacccgggattccgcgacccaacgcgccgtggacagggcgtttcgcgccgtcaacctgcgcgccagtccggcgatcatcgtcaatacgcgcgaggggatgctggaggcggttgccaatcggcttggtgtcggctttgtgtgggagcacggctcgagccgcatcgatcggatcgcgaaggtggcgatcgccgaaatcgaggcggactcgcccgagtacattttctcgctggccggcaaacgcggcaagctggtcgagctgttctatctggccagaagcctgtcgcgctcggctgaaggcgccgccatcctgtccgctccttgaagcgccgggcgtccctcggctattcgccccagcggttgtagtgaagtgtgacggcaaccgtgatgctgcgcagcggaacggcaggatatttgcgtatttttcctcccgcgtttggttacccggcccaagatgggctatgctccccgatgcgtcgacaacaagaatgagacgacgggagatggcacaccagcggcggacggggctgcatccatgatgaccttaccgagactggcggctgaatccctggaggaattcctcggcaggttcatgcgccgccggtacgatgagacttctgcaagtatcgtcgagagcgcgacccgcaccgcgatggaatgcatcggcaacagcgatgcgctctaccacaacatcgagcatacgatgctggtgacgctggcggcccaggcgatcctccgcggccgaagtcttcatacgcatctgtcggccgaggactacgtccatgtcctgatcgcctgcctcgcccacgacatcggctatgtccgcggcctgttcgaggaggacgacgccgaaggcttcatcatcgatgcggccgacaccaagatctcgttgccgcgcggtgcctcggatgcgagcctgatgatgtatcacgtcgacaggtcgaagctctacgtgacgcggcggctccggcatattcccggcctggatccggaccgcattgccagcgccatcgaaggcacgcgctttcccgcccgtgaagggcaggaatacgacgaggaagcctcgatcctgcgcgcggcagacttcatcggccagctcggcgatcccaactatctgcgcaaggccaacgcgctctactacgagttcgaggaggtcggcatcaaccgccagctcggctacgactcgccggccgacatcgtgaaccgctatccgcagttctattggaacagcgtcgccccgcacatccagaccgagatcggttatctcaacaagacggagatcggccggcagtggatcgccaatctctacagcaacgtgttccgcgccgagcgcgacatttcgctgtccggcccgcagagataggtcgggcccttgtagcccggatgagcgaagcgatgcccgggaccggtggcgcaacgtccggatgcttcggttatccaagccacgataccattcccagtgagccagccatgcaacaaaaaacagtcagcacggacatcctcgatattgcctatcgcgaatacggcgcggcggatggctggccctgcatccttggccacggctttccctatgatgtgaacgcctatgccgagaccgcgccgatcattgccgaagcgggcgcgcgggtgctggtgccctggctgcgcggttatgggccgacgcggtttcgctccgccgggacgctgcgctccggcgagcaggcagcgcttggcgccgatctgctggccttcatggatgcgctcggcatcgagcgggcactcgtcggcggttatgattggggcgggcgcgcggcctgtgtcgtctcggcgctctatccggagcgcgtgatcgcccttgtgtccggcaattcctacaacatccagaacatcgcccgcgccatggagccggcttcgccgccggaggaggcagctctctggtatcaatatctctttcacaacgagcgcggccgccgcgcgctcgagcgcaaccgccgcggctttgcccgccagctctgggcgatgtggtcgcccaaatgggcgttcgatgacgcgaccttcgaggcgagcgccgaagccttcgacaatcccgatttcgtcgacgtcgtgatccactcctatcgccatcgctatgcgctggttgatggcgaccccgcctacgccgcgatcgaggcccggctcgccgcgcagccgccgatccgtgtcccgacaattgcgatcgacggcgacagcgacggcgtcaatcccggcaccgcccaccacgcgcacaagttcgcggggtttttcgagcggcgcgtcttcaccaatgccggtcacaacctgcctcaggagcggccggccgaatgggcgcgggcggtgctcgatgtgcgcaaggcggtggcttaggcccggtctggcgtgctgccgatccgcctattttcccggacctcgggaaccttttccgattggcgccgtccaagctgagggccgcttgttcatgtggccgccggaaggggagaccattgatgacgtcacgagcgcgcaagttggagcgggtcgcggttgcgcaggcgccaagcgagcggcccgatcgggcggaggtcgagcaggcgatccggaccatgatccgctgggccggtgatgatcccgcgcgcgacggcctgcgcgacacgcctgatcgtgttgctcgtgccttcgaggagtatttttccggctatgcccaggacccgacggagatcctgcagaagaccttcgaggagattgaaggttacgacgagatgatcgtattgcgcggagttcgcttcgagagccattgcgaacaccacatggcgccgatcgtcggccgcgcctgggtcgcctatattccgcaagggcgcgtggtcggcatcagcaagcttgcgcggctcgtggacgtctatgccaagcgccttcagatccaggagaagatgacggcccagatcgccaacacgatcaacgacgtgctggagcctcaaggcgtcggcgtcatcatcaaggcgacgcatcactgcatgaccacgcgcggcgcgcacaagccggggacggatctcgtcaccagccgcatgctcggcgtgttccgcgacaatgcggtgacgcggcaggagctgttagggctcgccaactcggacagctgatccgcgcctgtaaagcgacgtgcaatgaccgagggcaggaagttgcgccttcgcgatccgacgacgcattcgatgttgatttgcgtcaatgttgctgcaggtgagggctgctccgctggctatcgtcccgttgcgatgcgtgctatcgtcgcgtgtgcccgcgggccttgcatgcaggagtggccgccatgacaactgcttcagacgcgtctcatcattccagtctcggctcaagtatctctgcgctacatgccaaatgggggtggatcgtcgcgctcggcgtcgtctacctcattgccggcttcgtcgcgctcggcagcatggtgatggcaacggtggcgagcgtgatcgtggtcggcgcgatgatgatcgtcgccggcgtgaccgaggtgatcggcgcattccagctgaagagctgggggaagttcttgatctgggccttgctcggggtgctctacatcattgccggcttcctcaccttccagaacccgttattggccgcagttgtgctgacgctctttctcggcgcggcgctgctcgcgtccggcgcggtgaggctatatctcgccttcagcatgaagcgcgaaagtccgtggggctgggtggcgctgtcgggcgcaatcacgctgctgctcggcctcctcatcgtggcgcgctggccggtgaacagcgtctacatcctcggcctgttcctcgggatcgacctgatcatggccggcgccggctggatcagcttgggctttgccttgaagcggcgcggccaggcgagccatcagcaactcgacgcaagaccatcttgatgaactccgctgatctgacgcgctgacgagaagcagcgcgccgcgcgaccgactcgcggcgatgatcatcggggagaaaccatgaaagccgctttggccctggctgcagcgctcgctgccgcttgtctgtccacgcccgtcgctgcgcaaaaatcctacggccctggagtcaccgacaccgagatcaagatcggcaataccatgccctatagcggcccggcatcgccgctcagtatcacgggcagggtgatctccgcttatttcgacgagatcaacgagaagggcggcgtcaatggtcgcaagctcaatctgatctcgctggacgacgccttctcgcctccgaagaccatggaggccgcgcggcggctggtcgaaggcgagggcgtcgccttcatcttcgcgacgatgggcaccgcgccgagctcggcgatcgcaaagtatctcaatagcaacaaggtgccgcagatcttcctgatcagctcggcttcgaaatggaacgatcccgccaacatgccctggtcgatcgcgttgccctgggcgccgaactacaccagcgaggccgcgatcgacgtcgcttacgcgcgcgccaagaatccgaatgcacgttttgcggtgctctatcagaacgacgacgccggcaaggaatatctgcgcggcgtcaaggaagccctcggcgccgacgccgacaaggcgatcgcgatggcctcgagcttcgaggtcgcggaccccaccgtggattcccaggtgctgacgctggccaacaccaaggccgacgtcttcctgatctattcggtgacgccgcgcgcctgcgcgcaggcgatccggaaagcgcatgaggtcggctggcagccgatgcgctttatcgcgagcggttgcgccaacaaggcgaccgtgatggtgccggcggggctcgatgccggcaagggcgtgctctcgctcggctcgctcaagccctttgtggccgagcccaagagcgacccggcgatgacggcctatatcgatttcatgaagaagcggctgccgaacgccgacgtcaacaacgtcgcgggactctatggctacaccgtcgccgaggcactcgtggtcctgctgaagcagtgcaaggacaatctgacgcgcgaaaacatcatggcgcaggcggcaaacctgaagaacgtgccgctgtcgctcttgatgcccggcattaccctcaacacgacgccgcaggatttccgcccgatcaaggacggctacatgctccagttcgacggcaacgactgggttgtcgctagcgagctgttgcgcgggacgtgaggggcgtctcgaagggcgaggcgtgcgctccacgctcggcatgaacaggagaccgccatggattttcaccactccgcccgttcgctggagctgcaggaccgcgtccgccggttcatgcgcacgcacgtcgagccggtcgaggatctctattacgagcaggtcaagccggaggcggtgcgctacaggacgccgcctgtgcttcaggacctgaagaagctggcgcgggagcaggggctctggaacctgtttctgtccggcgagcacggaccggggctcaccaatctcgaatacgcgccggtgaaggagatcatgggccgcatcctctgggcgcccgaagtgttcaattgctccgctcctgatgtcggcaacatggaggtgctcgccaattacggcaccagcgcgcagcaggagcgctggctgaagccgttattggatgggcgcatccgctccggtttctcgatgacggaaccccaggtcgcctccagcgacgccaccaacatccagtgcgagatcaggcgcgacggcgacgactacgtcatcaacggccgcaagtggttcacctcgggcgcgatgaacgaggattgcgagatcctgatcgtgatgggcaagacggcgcccgatgatcccgaccgccaccgccagcaatccatgatcctggtgcccaggaacacgcccggcgtccgcatcgtccgcgacatgctcacctacggctatgacgacgccccggtcggccaccccgaaatcgtctacgacaacgttcgcctgcctgccgaaaacatcctgctcggcgaaggccgcggcttcgagatcgcgcaaggccggctcggccccggccgtatccatcattgcatgcgcctgatcggctgcgcccagcgcgcgctggagttgatgtgccagcgtgcggtgtcgcgtatagccttcggcaagccgctggccgagcagggctcggtgcgagaggatatcgcgcactccttctgcgagatcgcgcaggcgcgtctgctgacattgcaggccgccgacaagatggaccgcgaaggaaacaaggccgcgcgcgacctgatcgccgccgcgaaaatcgtggtgcccagcatggccgcccgtgtcatcgaccgcgccatccagatccacggcgccgctggcgtctcccaggacacgttcctcgcgcgcgcctacgtttacgcccgcttcatccgcatcggcgacggcccggaccaggtgcacctggcggcggtcgggaaggaattgatcaagcggggcggggtgatgctgtagggctgtagggcggttcgccgaagcgcgcgggcagacggctatgagatcctcaccgacgacgaacgcgccgtcgtagtcctgctgggccgggccgatgagctctcgtatggccggaggccgttgacgccatcgtcgatcagcatgaggtgattgtagacggcaagttgggcgcacaccgtccgaagatccccgctgcgtctttcggtgccgagtgaggtcccatcatccggcggattcgttcgatcctcatcgacgcggacctggccatggcgacaggaacgtcgatcgctgcgcgccggaggtcgcaggaggaacaagcatagctcccgctggttgccctcgcgacgttcaattcgggcgaggctgatgatggctcacaccaatctcaccaggcgcgcggcggccgcccaagcccgaaccacgagaaccagccgcaacggctgtacggcgagcggtcgccgactgtgtccgcgtgtagcggtgcggccgtgaaccgttggcccggcacgcgcgcaatcgtcattgcaggagcatccagcggaatcggccaggcgaccgcgctcgctttcgccgcacgacgggcgagccttgttcttgtgggtcgggacaccggagcattggaggtggtggttcgcgcgtgccatgagcacggtgccgaagcggtcgcatgcgcggccgatctgaccgacccagctgcagtcgagcgcatccgtgacgcggcggtcgcggcgtatggccggatcgatgtttgggtgaactgcgcggcggttctcatggttggtcgattcgaagacatgccgatcgaggccttccggcgcgtgatcgacgtcaatctcatgggatgtgtcaacggctcccgggtggcactgtcacagtttcggacgtaaggtgatcgcggtgttctcataaacaccagctctcttctgggtatgacgggagagcctctgctcagcccttatgttgcgaccaagttcgccgttcgaggcttcacggcctgcctgcggcaggaatttgagcgggcggccgacatccatgtctgcctggtcatgccatgggcagtggacacacccgtctacagcaaaatgggcaacgtattcgggcggcaggcgcgctcgatcttcccggtgattgcggccgggcgcgtggcacgggccatagtaggtctctcggagcggcctcgtcgcgaggtcatcgtcgggatctcaggttacatgctgggcatcgcgctgaagcttgcacccatgctggtggagcgcattgttgcgcgcgtggcgccggtgctccagttcaagccagatccgcagccgcccacgatgggaaacctcttcactccgatagggccatacagcgtgggtggtggatggaaaagctactgggccgagcgcgcaacgcgcctcttccgtccggcctccgcgaacgtccagacgcaggatactccgccgaagcgcccttcacgcccggaaggtcgcgcggaggcagactaggcgaggcgggctccagctgctggcactcggaccttccgatcggatccgggggcctctctcgcgcaagcggactctcgctctcaagccgtcgccagcagcttctgcacttcggcgactgtcggaatgcgtccgctgctgaccagcttctcgttgatcacgagacccggcgtggacaacaggtcataggccatgatgtccttgaaatcggtgatcttgacgaattcggctggaacgttggcgcggccggcagcttcgcgcgcaacagtttccagcttcttgcagttggcgcagccggagccgaggatcttgatggtcaccatggtcgtcgtctccttcaattgtgtgaacggactaggcggtagcggccgcgcgctggcgctgccgcagccaggccagggagccggatattgcagccatgatggagaccagcgtgagagccagcgatgcccagctcatgccatccacccaggcgccgtaaatcaggccggcgctgatgctgaacaaggccaccgctcccacataggctgcggtcttcgcacggccgatcacgacggccaccatcaacacgctttgaagactcagctccgggtccgccatgaggtaggccagcagcggaccgcgatgcatgccgagatcgaggaacatgcgtgccaccggtacttccacaagagtaggaaagtacatgaagatgccaaagccgacccccagtgcattggcgagcagagtgttgctgccggcgaggctctcaatccattcgggccgaatgacctgacggaccatgcccaccacgaatacgcccactagaagcagtacgaagatttgcgtcacgaagcgccaggactcccatagccatgaccgccagtcatcttgagcgagcatgctcgcgaagtaccataccgcccacatggcgagcgctacggccaggactcggccagtcagggccacttccaatccgccgggctgcggggtcagacgcgcggcggccaccaacaaggtggtggccgagaggccgagtgcgagccaggtccagacgtttgcgccttcgatgatgttctccagccccctccaggcggttgcagcaatgagcaacagcagggcaatcagaaccgatccgtgaaagccgatgccctcctcgcctttggcgacatcgaatggcatccactcgaacagcgcggcctgccacgcagcggcccatggcaagggcaggtggacggtggccatgatagccgtgaacggccacaactttatggtgccagcaatcagcaccgctatcagcgacagcagaacgcccaaggctgcgggtgaaatgtcggcctgctcgctgaagagggcgtcagtttgggtgtcatggccgatgtcatcgcgccagaacagcagcgccatcagaaggccaatgccaatgccaaacagcaagcacatcacccccctggcgacggcaaattccagtcccaggatgctgccggtgtaggtgagtgccataatgttgccggcaggcgcgaagaacaggaaggcgatagccggtccgatgcctgcccctttccggtagatgcctgcaaacaatggcacgacggtgcatgagcacacggcgagcacggagccggctgcggctgccgcggggtaagacacataggccggggtgttgcgtccaagccagcgtgtaatgctggccttggggatcagtgccaccattgccccggcaatgaagaaggccggcagcaagcacagcaggacatgcgccgccagataggaggcgaggctgcccgtgccgccgatgagcaatttgatcgcgagttccatggtgatgccatcagaccggaacgcgaaattgcagcattgacctgggtcaacacaaaccgtcccccggtgaatgccgagttcatgccaatgaattgctcaggtgactgctgtgatcccattgcggatggccggatccggagccgctgtgcgctcggaagcttctgcttcgtcgccattgaggacgaaggtctgcaaagctcaccgccagaggtcggcatctctcgattccagcaaaggctccaggccttggccagacctcgtcccggctcgggccgccggtcgccatcgttgcatcatgtcgatgttttgcccgacgtgtcaaatagatttcgccaaatcagaaattgcccgccaggcattgaagatgctggcgattgctactgtgcatggggttgttttctggtttttgttgagcgactcgatcgccgagtgcggggcgggcgaaacccacaatcatcccgccttggcgatccggctgtccgccgatcctccgcgcaagttctggaagaacttctccacctcccgcgacagcgtctgcgccgtctccgtcacgctgctcgccgccgtcagcaccgaggcagccgccgtgtccgtctcgccgatggcatcgcgcagcgaggtgatgtttgccacaagcgtctcgttgccttgggctgcgctttgcgcgttcgaggagatctcgcgggtggcggcgtcctgttgactgacggcgcccgcgatcgccgaggtgacctcgttgatctcgcgcaccgccccgccgatctcgcggacagcgtcgaccgcgttgcgcgtcgaggcctggatcatcgagacgttctcgctgatctcggcggtggccttggcggtctgtcctgccagcgccttcacctcgtgagcgaccacggcaaagccgcggccggcatcgccggcgcgcgcggcctcgattgttgcgttcagcgcaagcaggttggtctgctcggcgatcgcctggatcaggttgagcacgccgtcgatgcgctgggtggccgcggcgaggctctcgatctcggagatcgatttctctgtgcgctggccggtctgctcgaccgccccggcactctgccgcacctggcggccgatctccaccaccgaggcagacagttcctctgccgcgcccgcgaccgccgtgacgttgtgcgaggcctgttcggtggcgttcgccgcggtgccggcacggctgctcgcgtccgcggtgacacgcgtgatggtctgtgcggtctcgcgcatggtggaggcgttgtcgctgaggccgcgcatgaccgcgccgatcgcctcgcggaacgtttcgacggatcgttcgatatggcgggcacgctcctcgcgcgcagccgagtcctgcgagacctgcgaggcgaggtcgcgattgcggcccatcgcctcctgaaagacctggatcgcgcgggccagtgcgccgatctcgtcggcgcgttcggagtacggcaccgcgacgttttcggcgccgtcggcgacctgcttgatggtgccggtgatcgcggcgagcggccgggcgatcgagcgggcgatgatgacgatgccgagcacgaccagggccagcgccacgccgccgagacaggtcagcacgaaagacagctcgcgactggtctcggtctgctgcgcgatctgtttggcccgctcggcatagaccttggacagcgcctcgagatccttgttcagcgcggaacgcacggcgcggttggcgtcgttgtcgccccattcgcggcctgcggctgcattgatctcgacgccgcggcgcaccagttccttgcggaactcgacgaactgctcgatgcgcttcctgaaggtggcgaactgttcggcatcgtcggctttgacgatggtctcccagcgcttcacgacgtcgaggatctgggcgttgaacttgagcagcccgtctccgtatttcttcaccaccgccggctcggtcgacatgtagacgccgcgcgattccatcacgacggcataaacgagcgagttgacgcgttcgacgttcagcgcggcggcgttcgccgtctcgatcgcgttggcgaggtcggcgctgcggcggctgttgtagtcggacagcagtgcgatcgccgccgtgagcagcgcgaacagcccaaagatcgcgtacagcttggtggcaagcgtgaatcggcctgccagcttcgtggcattcccagatcggtcggatgtcatggtgttcagcggcccggaatggcctgaaatggccggtgagcggggttggttggaactgatgcagaactttgcaggaggaaggtggacgtgacgttaacgccgttggtccggcaggcgagcgccccgcgctaggaagtcgaggtatttcagtgcgttgacggagcatcgtcggtttcggccggctgcagcagcgggatgccgcgaacatcggcgtgcacaccggccgccaagggcgtattccctgcggccgggatcgccttcaagatcgatctgccctcggccattggccgacgaactccggagaggcccttggtctaccgccacaccatcgacgccacgagctacacgttcccggacctgcgcgatctcctggccaaggcgacgccgccgcgctccggcgaccggctggccgcggtcgccgccgagactgcggcgcagatgatcgcggcgcggatggcgcttgcagacgtcccgctcgggcagttccttcaggaagcggtcatcccctacgaggccgatgaggtcacccgcctcgtcatcgacagccatgatgccaaggccttcgcgccggtcgcctccttgacggtcggagcttttcgcgactggctgctgtcggactccgcaacgccggaggtgttgaagacgctcgcgcccggcatcaccccggagatggcggcggcggtctcgaaactgatgcggaaccaggatctgatcctggcggcgcggaaatgcgaggtcacaaccgccttccgcaacaccatcggattgaaggggcggatgagcacgcggctgcagccgaaccatccgttcgacgatgccaaaggcatcactgcctcaatcctggacggcatcttgttgggtgccggcgatgcctgcatcggcatcaatcccgcgagcgacgatcccgccgtcatcgggcaattgctacggctgctcgacgagatcatcgcgcggctgcagatcccgacgcaaggctgcgtcctcacccatgtcacgacgacgctgtcgctgatcgggaagggcgtgccggtcgatctggttttccagtcggtcgccggcacggaggccgccaaccgtagtttcggcatcgatctcgcgcttctgaaggaggtgcagcaggccgggctgtcgctcaggcgcggcacggtcggacagaacgtgatgtatttcgagaccggccagggctcggcgctgtcggccggcgcccatcacggcgtcgaccagcagacctgcgaggcgcgggcctatgcggtcgcccgcgcctttgcgccgctgctggtcaatagcgtggttggcttcatcggcccggaatatctctatgacggcaaggagatcatccgggccgggctggaagatcatttctgcggcaagttgcttggcctgccgctcggggtcgacatctgctacaccaaccacgccgaagcggaccaggacgacatggacaatctgctgacgctgctcgccgccgccggcgtcaccttcatcatgggcgtcccgggtgccgacgacgtcatgctgaactaccagtcgacgtcttttcacgacgcgctctatgtccgcgacgtcttcggcttgcgccgcgcaccggaattcgacgcttggctggcacgctcgggcatcgcgggagccgattcccgacttgcaagcgatgcaggcctgctgccggattttgccgcgcggctgatcgcctgaggcggagcgcgagctcgctcaggaaaccattggtccctctggggattatgcttccgccacaatattgagaaattccggccgcagcattacgctatgtgtctggctggcaatttccgcaaccaggtcgtggcgggggagctttgatgcgagctgaaagtaacggaacgtcccggcggatcctctgtgtgtttccgcgctacacttcatcattcggcacgttcgagcattcctatccgctgaccgatggcgtccgcgccttcatgccgccgcaggggctgctgctgatttccgcctaccttccgcaggagtggcaggtcaaattcgtcgacgagaatctgcgccgcacgacgaaggaggagttcgaatgggccgaagcggtcttcgtcagcggcatgcatatccaacgccagcagatgaacgacatctgccgccgcgcccatgatttcgacctgccggtcgcgctcggcgggccctcggtcagcgcctgcccggactattatccgtccttcgactatctgcatgtcggcgagctcggtgatgccaccaaccagctgatcgagatcctgtcgcgcgacacctcgcgcccggagcagcaggtcgtgctcacgaccaaagaccgcgtgcccatgacggaatttccgattccggcctatgagctggccgacgtgaagaaatatttcctcggcagcatccagtattccagcggctgtccgtatcagtgcgagttctgcgacatccccggtctctatggccgcaatccgcgcatcaaggcgccgcagcagatcatcgccgagctcgaccgcctgcgcgaatgcggcatgaccgacacggtctatttcgtcgacgacaatttcatcggcaatcgcaaagcggcgctcgacctgttgccgcatttgatcgaatggcagaagaggacgggctatgtggtgcggctcgcctgcgaggcgacgctcaacatcgccaagcggcccgagatcctcgagaagatgcgcgaggcctacttcgtcaccatcttctgcggcatcgagacgcccgatcctgatgcgctgaaagcgatgcagaaggaccacaacatgatggtcccgatcctggagggggtgcgtaccatcaactcctacggcatggaggtcgtctccggcattatcatggggctcgacaccgacaagccgaacacctcggaagcgctgctcgctttcgtcgaggagtcccggattccgctgctcaccatcaacctgctccaggccttgccgaagactccgctgtgggatcgcctggagcgcgagggacgcctggtccacgacgacggccgggactccaatgtcgatttcctgttgccctatgatgaggtcgtcgcgtcctggaagcacgcgatggcggccgcttatgcgcccgaaaaggtctacgcgcgctaccaatatcagtgcgacaatgtctacgcccgccgcctcaagatgccggtgccggacgagatgaagacctggcgcaacatcaggcgcggtctcgtcatgctgcgcaatatcttctggaaggtcggtgtgctcggcgactacaggcgcgtgttctggaaattcgcactgggacgcatcaagcgcggcgatatcgaaggccttatcggctgcacgctgatcgcgcaccatctcatcacctttgcgcgtgccgcctccagtggcgagcagaacgcctcgaactattcgatccgcctgcgcgaggcggccgttcccgccgaatgatgcgacatgtctgatccggctgtcccgcgccgttcgacgcttgacttgcggaccttcacgcccgcgcgggtggcgctcgggcgcagcggtgcgagcctgccgaccaaggcgctgctcgatttcacgctggaccatgcccgcgcccgggatgccgtgcatgccgacttcgatgcggcgcgcttgatcgccgacctcggcccgcttggacttgccgtgaccgaagtcaggagccaggcgctcgaccgcagcgactatctgcggcggccggatctgggacgccggctcgaacccggctcggcgcagcttctggcacgaagcgcctcggcgccatgccagctggcggtcgtggtcgcagacggcctgtccgcggcggcggtccacagtcatgcggccgacgtcgtgaggcgcctgttgccttcgcttgccgaggacgaggctgtcgcgatcgaccatgtcgtcgtcgcgtcgggcgcgcgcgtcgcgctcggcgacgagatcggtgccattctcggcgcgcgcatggtcgtcatgctgatcggcgaacggcctggtctctccgcgcccgacagcctcggcgcctatctgaccttcgcgccccagcccggtcgcaccgatgccgagcgcaattgcgtgtcgaacatccatcatgccgggttgagccatgacgaggccgccttcaagatcgcctggctgatccgcgagggactcgcccgggaggtgaccggggtggcactgaaggatgagagcgcggagcgcgcgccgcgtcgaatcggcacattctcgtccggctgaccggcatctgcggcccggatcgccgcttcttgatcgattcggacacgctcggcctgcttgcgagaagacctgttgacctgctaaacccctcgcggcgattttccgcgcattttcaaagggcaagcctcccattggtatggcgttttcaagccgttcgcggagcgcgataagctctcaagaccgatgatttaggaactggacaaggcatgctcgaaaagcacagcgagaatgaggttcatgtcgacaaggtcgagcagggacctacgtcctcgatcgccttcgggctggagcggctcgggctgatcgccgtccgcgccccgattgtgtcctgcatcgtcctgcttgccctgatggtcggcgccgttttcggcatctaccgcatcaagatcgacgattcgctgtcgcagctcttccgctccgacacccgcgaattccgccagtacgaagaggtcacgaagaagttccctgcggaggagttcgacgttctcgtcgtggtcgagggcaagacccttctggaacggagcaacctggagaagctgcgcgatttcgtcactgacctgcaactggtcgaaggcacgcgtggactggtctcgctgttctcggcgcgtcaggcgccggccccgggtaagctgccggcggcgctgttcccggctgagttgccagagggcgacgcgtacaacaagttcatcgagaccgtaaagaacaacgagatcatccgcggcaagctgctgtcggaagacggcaccctggcgctggtcgtgctctcgctcgatccgaaggtggtcgcttccaacaagctgaccaagaccgttgccgacatccgcgacctggtgaaggaggacctcggcgacaccgggctcaacgtgcagctctccggcgtgccggtgatgcagcttgagatccgcaacgcggtcgagcgggatgggctcacctacaatgttcttggcatcctcgccggctgtatcatcgccatcatcttcttccgcaagatatcgttcatgatcgcggcggcattcccgccgatgattgcgatcctgctggctctcggtgcgctcggctgggccaacttcaatctcaacatgttcctgaacgtgatgacgccgctcatcatggtcatcagcttctcggactcgatgcagctcaccttcgccgcgcgcgaccggctgatcgcaggccaggacaagttcaccgcgttcaagaatgcggtgctggtggtgggcccggcctgcgtgttgacgcacggcaccgccggcatttccttcatcgcgctgcaattctcagactccgacctgatccgcaaattcggcgaggcgggccttgccgccaccatcatcgcgctgttcgcggtgctctcgctcgtaccggtgttcggcgtgctgctcgtgcgcaacgagaaggtcttcgcggtcaagttccagggcgccgatgccggcgtccaggccctgcgaaatttctgctactggatcgcggtgcgcatggtcggccggcccggcctgttcagcctgatcgcggtgctcttcgtcggcggcctcggcgtcatctacgccaatctggagccgcgctaccggctcgccgaccaggtgccggacaagcgccaggcggttgccgcaagcgaccggctcgacgccaagctcaccggcgccaatcccgtcaacgtgctgatcgcatttcccaagggcgagtcgctctactccccggagacccttcagaccatcgccgacgtgcattcgaccgtggagaagacggctggtgtcggcaacgtctggtcacttgagacgctgcgtcgctggctggcggagaaggcggggagcgccgatgtcgcgacactgaaggaatatgtcaacgtcattccagagcatctggttcgacgcttcatcgacgccgagcaggacgccgtcgttgtggccggccgagtgccggacaaggactccagccaattgctgccgattgtcgacaagctcgattccgagctcgacgccgtgcgcaagaagcatccgggctacgagatcgcggtgacgggtcttgccgccatcgctgcgcgtaactcggcgaacatgatcgagaagctgaatcacggcctcacgatcgagttcgcactggtcgcgatcttcattggtctcgcgttccgctcctgggtggtgacgctcgcctgcatcctgccgggcatcttcccggtggtgatgtcgggagcggtgctgtgggctatgggcgaggggctgcaattcgccagcgtcgtcgcgctcaccgtctcgttcggcctcggattgagtgccaccatccacttcctcaaccggctgaggctggagaacaagccgggcgtcggctcggcgctggcggtcgagcgcgccaccgtgctggttggcccggcgctgatcctgaccacggtggtgctggcctgcggcctcgtcgtcaccgtgttctccgacctgccgtcgctgcggctgttcggctggctgagcgctttctcgatggtcatggcgctcgttgccgacctcttcatcctcaggccgacggcaatgtggttgatcaatctgcacgacaagcttcaaggccccaacaagccggcgatttgagcggcgggtcggccgacgctgcccagcgcgctcacgcctcgatccgaatgatgccgcaacgatcgaacttgaagtcgcccggggcgtagtcctgctcccgcaggctcagcaggtagagcacgcccgtgtggttgaacagggccattttgtccgcttcggactgggctttctgaaacacgccgtcccagcacacaccgaacgagcgtcccatgtgcggatcgggtttggcttgcgggtaggtgcgtcgatctcgaagttgaagtcgctatagtctgggtcactgcctccggcagatgcagcaggctttcgtccttgcatgagaggcaaagcacgagacacggcttcacggacgaaggctgcctgttcgccagcaaaaagcccccggctcgtgagaaccggaggctcattccctcgacgtcagaaggaggtcagcccttcgtcatcgtgatgttgacgccgcggatctcgcccttggaggagatctgcaccgtctgcttggtgccgttggtgcgcagcgacaggttggcggcaaaaccgttggcttcgacgaacacgtcgatctggccaccaccggcggtgccctggagattgccgaagatgttgcggctcgactcgctccaattgccggaaatgcgttcgccctggctggtcacgtcactggttagattgaacttgtagctgtccgatgcgcaattcagcgcctgcttcaggttgaggccgctgccggcgaccttgtagtccgccttgcagcggatgcgctcggtggagccgtcggacaatgaaaccgtgccggtgccggtccacgcgccgtcgaaaccggcaaacggtccggacgactgagcatggctcgccgaaactgagaagagcagcgccgccccgatgccggccgtcctgagtgccagtccagatcgcccaaagaatgtcatcgcaaatatcccattttggaacgacgttcgcctaccagtgagaacgtctcgccacatcgaaagtttagtgctccgagccattgtcaggttcaaagccggactgccagagatggtggttcacggcgcctcgcgccatgcctgggcctggcgatataccgtgtttcgacgtgtttccgccgggacgggggcgccgagagatgcagctctgcaacagccgtgcagtaaaatgcgatgtctctgaattacgacgtagtatcaatcgcttacatctgccaaggagggcgcggggaagacttgattcggtgggcgcggcaccaatttggccgcatttgccagtgcttgtgacttctctgggccgcacctcccgcggcgactcgccatcagaacaatccgttccggccctccgccctgtgcagcccgggattggtgcgattctgccgtcagaatgaaggaatactatgcgtaagcttctcgtcgctctcaccctgctgtcggcctcccttccgacggcggcattcgcccaggcaggacgcggcacggacgccgagcagaaggcctgcacgcgcgacgtgcagaagttctgccgcccggtcattgatcagggcgatttcaccatcctggcctgcctcaaggagaaccggagcaagatctcgcaggcctgcgaccaagtcctgaagaaccacaaccagtaagtcggccactggcccacaagggcggtccccggggccgcctttccgggcacgatccgcaagggcggccatcgagcgacaggattggttttgcggccgtattcccctatatgggggccgcggcggcatcgccggcatgagcccgcgcgagcgaaaagccttcctgtccacgattgtaaaccagccctcgatgacctctgcgagcgaattgcgatccggtaagggtgaccgcgacgagaattttcccgtcgcgtcctggatcattcatccgcgtcatcgtgctctgatcctcgcgtattacaatttcgttcgcactgccgacgacatcgccgatcacgcgacgctgccccctgaccagaagctcgcttatctcgatctgcttgaggcggaactgctcggcaagggtgacacccaggccgaggccgtcatcctgcgccgcgcgctggccgagcgcggcatggcgccgcgccatgcgctcgacgtgctcatcgccttccgcatggacgtgaccaagctgcgttacgagacgtgggacgaggtcatccattattgccgctattcggcgatgccggtcggccgcttcatgctcgacgtccatggcgagagcacctcgacctgggcggcatcggacgcgctctgtgcaggcttgcagatcaacaaccacctccaggattgcggcaaggatttccgcgagctcaaccgcgtctacctgccgcgcgatgcgctggccgcgagcggagcctcggtcgagcagctcgggcttgcgcagtcgccgccggcgatgctggcgtgccttcaggggcttgccgcgcgcaacgaggcgttgctcaagcagagcaagtcgctgagcacggagatccgagattttcgcctcggcatcgacgtcgcggtgatccaggcctatgccgatcgtatcgtgcgcctcttgaaagtgcgcgatcccctgcgcgagcgcgtgcatttgaacaagttcgagcttctcaccttcagcctcgccggcatgatcggcgaagtcggccgccgcgcgatcggacgcaaggccatttccagaccggggactgcacatgacgcttgaggcgaccacgcccggcgccaattacggctcgactgcatccggcagctcgttttatgccgcgatgcgaatcctgccgcgtgatcagcgcgaagcgatgttccagatctacagcttctgccggcaggtcgacgacatcgccgattccgacggcccgcgtgaggagcggcttgccgcgcttcaggagtggcgcaacgacatcgatgctctctatcggggcaatccgccgccgcggctgaaggattacgtcgcctcggtgaagaccttcggcctcaagcgcgatgatttcctcgcgatcgtcgacggcatggagatggacgtgccgcaggacatccgcgcgcccgacatggcgacgctggatctgtactgcgaccgcgtcgccagcgccgtggggcggctgtctgtgcgggtttttggcctgccggaggaggagggcatccagctcgcctaccatctgggccgtgcgcttcagctcaccaacatcttgcgcgacatcgacgaggatgccggccttggccggctctatctgccgcgcgaggcgctgctgcatgccggcatcacctcgagcgatccgaaccgcgtcatcgccgagcgcgcgctgccgaaggtctgcatgccgctgacgcagcgggccaaggcgcatttcgagaaggcggacgagatcatgaaccgcaacaagcgccgcgtcgtgcgcgccccgcggattatgtcgaaatattatcattccatcctggacctgctgatcgcgcgcggtttcaccgcgccgcgcgagccggtgcgtgtgtcgaaggtcacacgggtcctgatcctgcttcgttacgctttcatctgatgcaaaacacagcgcacatcatcggtgccggaatttccggcctctccgccgccgtgcggctcgccaatgccggcttcaaggtcgccgtgcacgaggcgacgcaccaggccggcggccgttgccgttcctatttcgacggcgccaccaacctcaccatcgacaacggcaatcatctgctgctgtcgggcaacaaccatgcccgcgcctatgcgcgtgcgatcggcaccgaggcgggccttgtcggtcctgagcgtgcgcagtttcccttcgttgacatcaagaccggacagcgctggcagatcgatctcggcgatggccggctgccgacctgggtgctcgacgagagtcgccgcgttcccgataccggcctcaccgactacctcaagctggcgccgctggtctgggcatcggaggagacgctggtcggcaaatgcattccgacagaaggcgtgctctatcagcgcctggtgcagccgctgctgctggcggcgctcaacgtcgacccacccgagggctcggccgggctcgctggcgcgatcgtgcgcgagacgctgcttgcgggtgggcaggcctgccgtccgctgattgcgcgcgatggcctcagcgcggtgctgatcgagcccgcggtgaagttcctggctgagcgcggccacactgttcaactcggccatgagctgcgctcgtttgccaccggcgacggcaaggccagtgcgctgaatttcggcggcgacgatgtgatccagctcgatgacggcgatgtcgtcgtgatggcggtgccgccgcgcgccgcctccagcctgctgcccggcgtgaagacgccgaccgaattccgcgccatcgtcaacgcgcacttccgttttgagccgccgccgggcgcgccgcccatcctcggcgtgatcggcggcgtcgtggaatggctgttcgcgttcccgaaccggctctccgtcaccatcagcaacggcgaccgtctggtcgacagaccccgcgaggaactcgcgcaggcgatctgggatgatgtctgcaaggcgggcggtgtatccggcgaactgcctccctggcagatcgtccgcgagcgccgtgccacatttgcggcgacgccggcgcagaacgccctgcgtccgggaccggtcaccgcgctgaaaaacctgtttcttgccggcgactggactgctacgggattgcctgcaaccatcgagggatcggtgcggtcgggcgatcgcgccgccgatctggttctggccgccaaaggatcctgagtagcggccctgacgggtgaatgtcccggtcaatttcaatggactatcggagcaatcgagcgacatggattccgtgaacgcgaccagccgcgaggcattgaactcgaagggtttggattcgaaggtattggaatcgagcattgcatcggcggccgaaggcgtcctcggcttccagcagcccgacggccattgggtgttcgagctcgaggccgatgccacgattcccgcagaatacgttctgttgcggcatcatctcgccgagccggtcgatcccgtgctcgaggccaggatcggcaattatctccgccgcatccagggcgcccatggcggctggccgctggtgcatgacggcgagttcgacatgagcgccagcgtgaaggcgtatttcgcgctgaagatgatcggcgattccattgacagcccgcacatggtgcgcgcgcgcgaggcgatccgcgcgcgcggcggcgcgatccacagcaacgtcttcacccgcttcacgctggcgatgtacggcgtcgtgagctggcgcgcggtgccggtgctgccggtagagatcgtgctgctgccgttctggtcgccgttccatctgaacaagatctcttattgggcgcgcaccaccatggtgccgctgatggtgatcgcggcgctcaagccgcgcgcgaggaatccgaagggtgtcggcatcgacgagctgtttctccaggacccgcgctcgatcggcatgaccgcgaaggcaccgcaccagagcatggcctggttcctgttgttccgctcgctcgacgcgatcctgcgtgttgtcgagccgatgtttccgaagagcctgcgcaagcgcgccatcgacgcagcgctcgcattcaccgaagagcgcctcaacggcgaggacggcatgggcgcgatctatccgccgatggccaacatcgtgatgatgtacgacgcgctcggcaaggacgagaactatccaccgcgcgcaatcacgcgccggggcatcgacaagctgctcgtcatcaacggcgaggaggcctattgccagccctgcgtctcgccggtgtgggacaccacgctgaccgctcatgcgctgctggaagccggtggcgacaaggcggtgccggcggccaagcagggcctcgactggctgctcccgaaacaggaactcgaggtgaagggcgactgggcggtgaagcggcccaacgtccgccctggcggctgggccttccagtacaacaacgcgcattatcccgatctcgacgacaccgccgtcgtggtgatgtcgatggaccgcatgcgccgggagcacggcgcgaccggctatgacgccgcgatcgcccgcggccgggagtggatcgagggcatgcagagcgacgacggcggctgggccgccttcgacgtcaacaacctcgaatattacctcaacaacatcccgttctcggaccacggcgcgctgctcgacccgccgaccgaggacgtcaccgcgcgctgcatctcgatgctggcccagctcggcgagaccgagaagaccagcaagcacgtggctgacgggatcgcctacctgcggaagacccagcacccggagggatcctggtacggccgctggggcatgaacttcatttacggaacctggtcggtgctgtgcgcgctcaacatggccggggtcgatcacaaggaccccatgatccgcaaagccgccaattggctggcctcgatccagaacgaggacggcggctggggcgaggatgcggtcagctaccggctggactacaacggctgggagcccgccccctcaaccgcctcgcaaacggcatgggccttgcttgccttgatggcggccggcgaggttgatcacccggccgtcgcccgcggggtggagtacctgattgcaacacaaaacaaaaaaggactgtgggacgagcagcggtacaccgccacaggcttcccccgcgtgttctatctacggtatcatggttacccaaagttctttccgctgtgggcgttggcgcggtatcggaacttgcggaacaccaacagcagggtggtaggggtcggaatgtgactttggggacgggggactattttaccgcgggtaattccatcgatccgcggccaatattgattgtgactggactggttcaggaggcccgcatcgcggcggggcctggaatggccgtcatctgctcatccagcagcccggcccaattgcgggcgctgctgacggtggtggaccctgaaacgattcgcggcgtgatctcgttcggcgtggccggcggcctcgacccgagcttgcgctccggcgacgtcgtgctggcgaccgaagtgctctccggcgacacccgctgggcggccgggctctcgctcggcgacgacctcatcgagcgcctgacgtcgggacgccgccgcgtcgtgcgcggcagcctcgccggcgccgaggaggtggtcacgggccggtcctgcaaggcggcgctccattcggagacgggtgccttcgccgtcgacatggaaagccacatcgcggccgcctacgccgccgaggccgggctgcctttcgccgcggtccgcgtcatcagcgaccccgcccatcgcgcgctgcccgcgctcgcccgcgccgccatcaagccgaacggcaagatcgacctcgcggccgtgctgcgcggcgtcgtccgcaatccggcaacgctgcatgcgctggtctcgaccggcatcgacttcaatcgcgcgctgcggtctttgcgcggctgccgcgaccatctgatcggcactgagctggtcgagagcgaagtactggtctccaaggccgcctgaacggcgctttcaagctcacaaagaagaggcccggtcgccgttggcgatcgggccttctcttttggtgtccgcagcccggggtggctagatgccatcccgcgctcaggccgcagtcgaagccttctgcgccgtcttcgcctgcgccgcggccgcttcgtccttgcggatctcggagagcttcttctgcacctgctccgagaagatgtactgcgccgggcgctgcttggagaggtcgatctccggcgccatcgggccggtcgtcctgacgccgcgcagcgccacccacattgccttcagcgggttgttgagcgctgcggtcgccgccgtcggctcgtagccgcaatgggccatgcagtcggcgcacttctcgtaacggccggtgccgtaggagtcccagtcggtggtctccatcagctccttgaaggtcttggcgtagccttcaccgagcaggtagcagggcttctgccagccgaagatgttgcgcgcgggcatgccccacggcgtgcactcgtactcctggttgccggcgaggaagtccaggaacagcccggaatgcatgaagttccacttcttgcccttgcccatggcgaagacgtcgcggaacagcttcttggtcttggtgcggttgaggaagtgctcctggtccggcgcgcgctcgtaggcgtagcccggcgacatggagacgccgacgccgagctcgaccgtgaggtcgaggaacttggcgatctcctcggccggatggccgtcgaagatggtggcgttgacgttgacggtgaagccgcgcgccttggccgccttgatcgccgagacggcgcggtcgaacacgcccttctgcgacaccgccttgtcgtggtggtcgcgcaggccgtcgagatgcaccgagaagaacaggtaaggggagggctcgaacagatcgagcttcttctccagcagcagcgcgttggtgcagagtgagacgaacttcttgcgcgcgacgaggccgcgcacgatctcgccgatctccttgtggatcagcggctcgccaccgggaatggcgaccatcggcgcgccgcactcgtcggccgcgtcccagcactcctgcgccgtcatgcggcggttgaggatcgcatccggataatcgatcttgccgcagccgacgcaggcaaggttgcagcgaaacagcggctccaacatcagcacgagcggatagcgtttgcggccaagcagtctctgcttgagcaaatagccgccgatacgcatttccttgaagaacgggatagccattacaggtttctttctgggctttgaattcgggtgggtcagctcgcggccagctgggccggaagccggaattcgatgttttcctcgcggcccggcagtaccgagaccttcactggtccaatccgccgcatcgcttcgatcacgtcatccacgagtacctcgggcgccgaagcgccggcggtgacgccgacggtcctggcatttttcaaccactccggattgagctcactgccatcggcaatcaaataactcgcgacgccggcctcggtgccgatttcgcgaagccggttcgaattcgagctgttggcagcgcctaccaccaagatcacgtcgaccagcttgctcaagtcccttaccgcagattggcggttctgtgtcgcatagcagatatcccggatatccggaccttgaatgtctgtaaagcggacgtgaagggccgcgatgatgtctttggtatcgtcgaccgacagggtggtctgagtgatgtaggccactggcgtatccgctggcagcgtcagcgcctcaacctcttcaacgctctggacaagctgcactggccccgggacttggcccatcgtgccctcgacctcgggatgaccggtatggccgatcaggatcagggtacggcccttggcgacgtagcgcttcccttgattgtgaactttcgtgaccagggggcaggtggcattgagcaccggaagatcccgcgcggtcgcctcttcctcgacgctgcgggccacaccatgggcgctgaagaccgtcacggccttcggtggaacctcagagagttcctcgacgaagatcgcgcctttgttcttcaggttctcgacgacgtatttgttgtgcacgatctcatggcgcacgtagacgggcgggccatacttctccagcgcccgctccacgatttcgatcgcacgcacgacgcccgcgcagaagccgcgcggttgcgccagataaacctccattggacgcccattacgcaagttgcaccaattgctttcctaaagtcccggcggcaccccaatactaaccaatgaccagcaatatccgcaccatcggttcgcgcaggcggtagcgtttcacctcatttggggcgccggcgcatggaggcgcaatactttgtgtcaaaaaatcggcaatgaggaaaggtcggataaccccgagaaccgtggctggattgcatttgcggtattatagtaaggagaggggctcgcttgagcgcgtggcgtttcgtgcggaatgtttcgtcactttcccgcctcaagtgccgggctataccgaccgcccccgcatgattttttgccacggtctcccgccgtttacctcgaacctcccgacggcgagacccactcaaaacagcaataggtttcgcccgggaactccgataaacagcgggcgtttccggcaagctattaaccgcagaaagaaaagaagtgctgcaaagcgtcgtcgtcgccatcgtcagggcttgcacccggtttgcctccctcgtcgtcgttctcgggctcctgctgtcggtcggagcgggctattacgccgcgcgccacttcgccatcaacaccgacatcaattcgctgatttctcagaatctcgactggcgcaagcgcgaccagcaattcgacaaagcgttcgatcagaacgaaacgatcctcgctgtggtcgaggcccggacgccggaaatggcgagcgcggcaacagacgcgctctatgccaggctgaaggacgacaagaccaacttccagtcgatgcagcaactcggcggcggcgagttcttcgagaaaaatgggttgttgttcctgccgacggaagaagtcgccaagatcaccggccaattcgaagccgccgcgccgctgatcgagatcatggccggcgatccctccatccgcggcctgaccggcgcgctggaaacaggacttgctggcgtcaagcgcggccaggtcaagctcgacaacaccgcgcggcccttcaatctgatcgcgcagacggtcgagaccgtgctcaacaagggcaatgccagcttctcctggcgcgaactcgtcagcgacgagccgttgaaggattcggacaagcgcaccttcatcgagttcaagccgatcctcgactacaacgcactggagcccggcaaggatgcgaccgaggcgatccggaaagcggcggccgacctcgattttccaaacaagtatcaggcgcgagtgcggctgaccggcccggtcccgatcgccaacgaggaatacgccaccgtacaggaaggcgccgtcgtcaacggcattggcacgatcctcgtcgtgctgctcatcctctggctggcgctgcactcggcgaagatcatcttcgccgtcttcgtcaacctcttcgtcggacttgcgatcacgaccgctgcgggcctgatgatggtcggctccctcaatctgctgtcgatcgcgttcgcggtgctgttcgtaggcctcggcgtcgatttcggcattcagtacagcgtgcgctatcgctccgagcgctacaagcacgatgatctcacgggggcgctggtgctggcggccaagcgttcggcggtgccgctgtcgctggcggcgatggctaccgcagcgggcttcctctgcttcatgcctaccgactacaagggcatttcggaactcggccagatcgccggtgtcggcatgctggtcgcgttcatctcctcgatcaccgtgctgccggcgctcttgaagctgttgaacccgcccggcgagccggagcccgtcggctacgccttcctggcgccgctcgatcacttcctggagaagcaccgcgtgctgatcgtcgggggcacgctgctgctggcgcttggcggcatgccgctgctctatttcatgaagttcgacttcaatccgatgaatctgcgtaacccgcacgccgagtcgattgcgaccttcctcgacctgcgcaaggatcccaacaccggcgcgaatgccatcaatgtgatggtcacgtctgaggagcaggcaaagcaagtcgaggcgaggctggagaaggtgcccgaggtgctcagggtgatgtcgctcaacagcttcgtgccgcaggaccagggcccgaagctgaagctgctcgcgcagggcgccaaggtgctgaaccccgcgctcaaccccgagcagatcgacgcgccaccgacggaccaggaaaacgtcgagtcgttgaaatcttcggtcgacactctgcgccgaacagcaggcgacgcgaagggaccgggggcagttgcctcgcgccgattggcggacgcgctcgagaagctcgccaatagcgacgagactacgcgcaacagggcgcaggatgtattcgtcacgccgatgaagatcgtgttcaaccaactcaggaacgcgatgcaggccgagccggtcaccctgcaatccttgccgcccggtctcgtcagcgggtggaagagcaaggatggcatcatccgcgtcgaagcgttgcccaagggagatcccaacgacaacgaaacgctgcgcaaattcgcggcggcggtgctcgcggccgagccgaccgcgatcggcggacctgtgtcgatcctgaaatcaggcgacaccgtggtgaaggcgttcatccacgccggcatctacgcgctgctggtgatcgggctcctgctgtggatcacgctgggacgcttcgtcgacgtgctgatgacgctggtgccgctgctggtcgccggtgcggtgacactcgagatttgcgtgttgattgggctgccgctcaacttcgccaacatcgtcgcgcttccgctgctgctcggcgtcggcgtcgccttcaagatctattatgtcgtggcttggcgctctggcaggacaaacctgctccagaccagcctgacgcgcgcgatctttttcagcgcgctgacgacggcgactgcgtttggcagcctgtggctgtcgagccatcccggcacgtccagcatgggcaagctactggcactctcgctggttacgacgctcgccgctgtcctgctgttccagccggccctaatgggcaaaccgcgcgatctccgggagtaggcagatgtcgccgaccgggtcggcggcgttcttctgaccggacttggctgtaccggcggccttcggagttgcaggcgcaggcgcggtggcgcctgtcgtggcttgggctgcttgcgctccttgttgggccccttgggccctcggtgcagcgccgctggatttcggcgcgcccttggccatggcgttagccggactggcggggattggcgggctcactcgggtccaggtctcgccgccgcacaagaagcccatcacgcagcccttgatttcgagttgatcgggaccagccggcgtgatggtcgcgctgtagagctggccgtccttggcgttgtagacttggccttcccactgatcgatgccgggcttcttcttcatgtcgatcagggttgccatgcccagcgtcggcctgttctttttcgaggcatccggattgttctcgtcgcgcccaccgggctgcttttcccaggaaaccgcgccccacatgctgccatagcattgggcgacccgaatgttggcaacgccatcggcgacccgccagtccccggtcgggtcagcagcgagcgcgggtgtcaggcaggtgtaaccgccagccagtattagtccggtgcaaagggctaaacgcatgatggttccttggcagtgcaacatgatttaaaagctgtgcttgcgaagatggtccgaaaaagggcaaaaggccgcacagaccgtttctgtagcggtccgttttcagttgacgaaacggccctcaatcgaagtatgtagcggatgcacagcccaaatccagacatgtctcagcttttcgcggaccgtcaggcccagcgcagcaccctgcataaccggtatctgaacgaacagttcgttcgggtgctcaagaccatcggctacgatgtcggcttccagaaggggcaggggcagtacctctacgatcgcgagggcgctcgctatctcgacctgttgtccggctttggcgtgttcgccatcgggcgcaatcatcccgtcatgcgagaggcgctcaagagcgtgctcgatgccgatctgcccaatctggtccagttcgacgtctcgacgctggccggcgtgctggccgaacggctgctgaaatacgtgccctatctcgacaaggcgttcttcgccaattccggcgccgaatgcgtcgaggccgcgatcaaatttgcgcgcggtgccactggccgccccggcatcgtctattgtgcccacggttatcacggcctgacttatggcgcgctgtcgctgaccggcgattcgaattttcggaccggcttcgagccgctgctgccgggctgcaccccgatccccttcaacgatctggccgcgctggaaaaggctttggcctcccgtgaggtcgcggctttcgtggtcgagccgatccagggcaagggcgtgaacatgccgacggacgagttcctgcccggcgccgccgcgctctgcaagaaatatggcacgctgttcgttgcagacgagatccagaccggcatgggtcgcaccggccgctttctcgcggtcgagcactggaacgtcgagcccgacatggtgctgctgtcgaagtcgctgtcgggtggccacgtgccggtcggcgccgtgctgacgcgcaaggccatcttcgacaagatcttcaaccagatggaccgcgcggtggtgcacggctccaccttctccaagaacgacctcgccatggccgcgggcatcgccacgctggacgtcatggagtccgagaagctgatcgaatcagcggcaaagcgcggtgccgagttgcgcctcgcgctgacgcgcatggtgcccggctacgagctgatgaaggaagtgcgcggcaagggcctcatgatcggcgttgagttcggcccgccgaaatcgttgcgcctgcgcgcctcctggaacgtgcttgagaccgccaataagggcctgttctgccagctcatcaccgtgccgctgttcaaggaccacaagatcctgacgcaggtggccggtcacggcagccacaccatcaagctactgcccccgctcaccatcaccgaggaagactgcagctggatcgagcgcgccttcgatgacgtgatcgccggcagccacaaggtcccgggtgcgatctggtcgctcggcaagacgctggtggacaacgccgtgcgaaggtcggcgtaaggtcgagccgaggctgaactcagcaggcttggattgcgggccgccagcaaaatcaggtgccggctttcgcgtagtcccgcacggcttccaccacacgttctggcatttcctgcgcgacgcaatgtcccgcgccatcaaagacctgcgtgctgacgcggggaatcagcgacacggcgcgttgcgccatctccttgtagatcgcatccgactttgcggcggtcgtgacgcgcacaggacattcgatctccgtcagccaggcgaacgggttgccgcgagcgtccccaatatacacctgctccatcgcctcaaagatcggacgcaggatcgcggattcgatctcgggggtgcagcagagccggatgcggccatcgccgagcggtacgaagccgtggcgtacatacgcgcgtagcgaggtctcggtccaatcagcaaaggccggcgctgtgcggtagcgttcgagcacggcgtcggcactgtcgaactcggcgcgtcggcgcaacgtgcccgccacgagggattgggattcctcgctcaatccgccggcgcgcgccgcgcgcggatccatgatggtcggttccatcgcgaacaggcgtgtgaagcgaccgggcaagagtctcgccgcgagaaggagatccgtcgcacccgcgctgtggccgattgcgtagatgtcgtggagatcgagcgcgtcgaccacccggcagacatcctctgcatagtccagaaattgataggcgccgggcttatggctggcgccatggccgcggcgatcgagcgcgtacacggtgtgggttgaggcaagtgcgcgtgcgacctcgtcccagacgtcggcgacgaagccggtgccatgtaagagcagcgcagggggctttccgcgctcgccccattgcagcatggcgagctctgcgccggcagtaccgatcgaaaagcgccgatggatcatggtggcaagatgctacttcgcatcctccaggatcatcgtcgcccccttctccgcgatcatcgcggtcggcgtattggtgttgcccgacgtgatggtcggcatgatcgaggcatcgacgatgcgcagaccgtcgaggccgtagaagcgcagccgttcgtccaccaccgccatcggatcgttcgccgcgcccattttcgccgtgcccacgggatggaagatcgtggtgccgatgtcgccggcggcttttgcgagcgaggcgtcatcgtcgccgacggaggggccgggcaggtattcgctggggcggtacctggccagcgccttctgctgcatcaggcgtcgcgtggtgcggatggcgtcggcggcgacctggcggtcatcgtcggtcgacaggtagtttggcgcgatgatcggcttctcctccggcgttgccgcgcgcagtcgcacggtgccgcgcgaggtgggctggagattgcaggcgctgacagtgatcgcggggaagcggtgcagcggatcgccgaatttgtcgagcgacagcggctgcacatggaactggatgttggcgcgggcgcgcgttgcatcggagcgcgtgaagatgccgagctgcgacggcgccatggtcagcgggccgcggcgacggaaggcatagtcgagtcccatcaggccgcggcggagcagattgtaataggtctcgttcagcgtgcgcacgccttcgaccttgtagatcgcgcgctgctgcagatgatcttgcaggttgcgcccgacaccgggcttgtccatgacgatgtcgatgccgagcggcgacagccagtcggcgggtccgatgccagaacgatgcagcacctgcaccgagccgatcgaccctgccgagaggatcaccccgtgcttcgcacgcgcctcgatgatctggccgttctggatgaagcggacaccgacggcgcggccctgctcgatgatgagacgatcgaccaggacgtgcttctcgagccgcagattggggcggttcaacgcgggcttgaggaagccgcgggccgacgaccagcggcggccgcgcttctggttgacgtggaaatagctggtgccttcgttgtcgccggtgttgaagtccgggatgcgcttgatgcccatctcctcggcggcgtcgccgactgcgtcgagaatggcccatgacagccgcggtgcctcgatacgccagccgccgccggcgccgtgatgctcgctcgcgccgaggaagtggtcctccagccgcttgaacagcggcagcacgtcctcatagccccagccggtcagcccaagctggcgccagtgatcgtagtcggcagcctgtccgcgcatcgagatcatggcgttgattgccgagcagccgccaatcactttgccgcgggggtaggcgagcgatcggccgttcaggcctggctcggcctcggtcttgaacatccagtccgaacggggattgccgatcgcgaagagataaccgaccgggatgtggaaccagatccaattgtcgtcgccaccggcttcgaggacgagaacgcgattgcttggcatggccgacagccggttcgcgacgatgcagcccgccgtaccggctccgacgacaatgtagtcaaactcaccttcgagccgtcttggcattctgctccacccggatggtcattttgcgttccgcttaatacgcagacgcagcggatcgggacaagtccggccatgcgaagcaggcggggctcccccgatccccggcagttgggtggaccggcgcttgcatgatagacaatcctgcattcccataatgtcgagatctccatgcccatcgtgaaccgcgtcgccgaccttcagcccgacatccaggcctggcgacgggacatccaccagcaccccgaactgctatatgacgtcgaccgcaccgcagcattcgtcgcggaccggcttcgcgagttcggctgcgatgaggtcgtgaccgggctcggccagaccggcgtggtcggtgtcatcaagggcaataagccgcccggcgaggggctcaaagtaatcgggatgcgtgccgatatggacgcgctgccggtcgaagagcagaccaacctgccttacgcctccaagatccctggcaagatgcacgcctgcggccatgacggccacactgcaatgctgctgggagccgcccgctacctcgccgaaacccgcaactttgccggcgatgccgtcgtgatcttccagccggccgaagagggcggcgccggcggcgcggcaatggtcaaggacggcctgatggagcgcttcggcatcgagcaggtctatggcatgcacaatgggcccggcatcccgatcggctcattcgcgatccggccgggtccgatcatggcggcgaccgacgaggtcgatatcatgatcgagggcctcggaggccacgccgcgcgcccgcacaaatgcgtcgattccgtgctggtcggtgcgcaggtgatcacggccctgcagacgatcgtcgcgcgaagcgtcgatcccctcgaatcggcggtgatctcgatctgcgaatttcacgccggaaacgctcggaacgtcattccgcagacggcgacgctgagaggcaccatccgcacgctgtcgccggaggtgcgcaagctggtcgagaagcgcgtgcatgaagtggtcgcaggcgtggcgcagatcactggcgccaagatcgacctgcgctacaagcgcaactatcccatcgtgaacaatcacgcggcggagaccgaggtggcgcggcgcattgccgggcaagtcgcgggcgaagccaatgttcacgagatggcgccgctgatgggcggcgaggatttcgcctacatgctggaagcgcggcccggcgccttcatcttctgcggcaacggcgacagcgccggcctgcatcaccccgcctacaatttcaatgacgaggcgatcgtctacggcacgtcctactgggtcaagctggtcgaggagcagctggcggcgtcctaaggtcgagctggaagcatcaatgaaagggcccgtgcattccacgagccctttgttgtttgagagatcgcatcgccgacgatgcgtgaagccgtttctgcgcgtatttacgcagctcgtgcggacttcctctgtaagccggcggcgatcttcaaatcctcgacaaagcgtcgatactccagcaccttggcttccggatccggcagtcgcagcagatatgagggatgcaccgtcacgagcgctttgcgaccgtcgggaaggtcgatgagccggccgcggttcttgccgatcggagtgatcttgccgaacacgctttgcgcggcagtggcgcccattgcaacgatgagatcgggctggagtgccgcaacttcccgctcataccattgtcggcacgcccggatctcaggtgtgttcggtttctgatgcaggcggatttttccgcgcggcacgaatttgaagtgcttgaccgcgttggtgacatagaccttcttgcggtcgacgccggcttcctccagcgcgcgatcgagcatctggccggccggaccgacaaagggatggccggcgaggtcttccttgtcaccgggctgctcgcctaccagcatgatattggcggatttcggaccctcgccaaacacggtctgggtcgcatccttgtagagatggcacgcgcggcaatgcgcagcctcctcgcgaagcgcttcgagatcgtcgccgacagtcttgcgtttcatcggagcctccggtcgcttttgaggcttgtgcggatcggttgcggcattggcgatcatagcaccggtcatgcgctcggcatcctcgatcaaaggcttaatgatcgaagcctccggcaggttcctccaatatttcttcggcatctcggcctgcatcgccttcggcttgaggcgggccggattgaagatgctggcataatagcgccgccaggtttcctcgagccggtcttcgctcggagcctcactcttgctgacaccggatgtgaatgaaagtgcatggccatcccaatgcgcgcagaggtccggcgtcaggatcgaccagggcatgtcggcaaagcgcttggcgaagaagggagcggcgagctcgacgatgtgatgatccggttcgaaccatgcgacgtaatgcgcctggcgttcccggccgatctcgcggaagcgcacgaaggcatgcatcttgtgctcgtcgcgatagaccgccttcgccatggcagtgacctgtgcgacatcagggtcggtcgcgacctcgatgaggtcgtgattgtccttcaatcgccagagcagccgatagaggaccgcaaagcgctcggcatcgcgatgcaggattgcggccttcgcaagctcgatgaactttgtcgagacggtgaaggtggcgtcgttcacctcgaggatcggagatggcgagggcggtgcgaacaactccgcttcacggccttgcacgctccaggtgacgtcgctgggccgcacgtggtgaagcacgaggctacgcgcggctttgcgccagccgtcgaaatcggtttcggtgtcgaggatgatgtattgcatcagaagccaaatcccagctgtgtcgcttttggcttgaaccgttcgatcagtccggcggcatcgagacgatgcggagaggggcggtggtcgctgaggatgatgaacggcagtgccttgttgcggggcacgtgcagccgcgcgagatcggccacgcggatcgtggtggtgcgccgcgtcgcaatgatgcgttcgaccgccttggtgccgaagccgggcacgcgcagcagctcttcgcggttggcgcggttgacgtcgagcgggaagcggtcgcgatggcgcagcgcccaggcgagcttggggtcgatgtcgagcggcagcatcgcgctgccatcgacgatctctccgacgtcgaagccgtagaaccgcatcagccagtcggcctggtagagccgatgctcgcggagcaagggcggctgtaccagaggcaaagcgcggctggcgtcggggatcggactgaaggcggagtaataaacgcgccgcagccggtaggcgccgtagagattggcgctggtgtggagaatggtctgatcggaggccgcgtctgcgccgacgatcatctgcgtgctctggccagcgggtgcgaaacgctgcggcttggctctcgtctttgcgctatggctgtcctcggcctcgtctagcttcagccgcaaccggcccatggtgcggcggatcgcgcgaacattcttctgcggcgcgaattgctgcaggctggtttcctcaggcatctcgatgttgatggagaggcggtcggcatacttgccggcctccgcgatcaacgcatcgtcggcttcgggaatggttttcaggtgaatgtaaccgcggaaatgatgctcttcgcgcagcttgcgcgcgacgctgacgacctgctccatcgtgtaatcagggctacggatgatgccggaggagaggaacaggccttcgatgtaattgcgccggtagaagtcgagcgtgagcttgacgatctcgtcgatggtgaagcgggcgcgcggtacattggaggaggcgcggttgacgcaatagaggcaatcgtaattgcaggcgttggtcagcagcaccttgagcagcgagatgcagcggccgtccggcgcgtaggaatggcagatccccatgccgggcgcggtcgagcccatgcccttgcgatcactggaatcccgcttttcggtgccgctggaggcgcaggacgcgtcgtatttggcggcatccgccagaatctccagcttgcgttgtacgtccatggaggaatcctcttgattcagctcgtgaatctgaaagtgcgccaattcgattgactctgtggcgaccgttagctttatattagaacatatcatgaacaaatgggccagctgctggttcttcttttgaagaccacggcatcaaatttctgaggagcggcgggcatgcagagcgcgatcagcaaaagtggtcgccggttttgcgtccgatcgcgctcttctttttaagagggcacatgatcttgtcgccaaaccgctcacactttggcggatcatgcgcctccgcacgtggaagcgcgcttgcaatcttgcgcggccagatcgagcgcatcgagaccgcggtcgtgcatcagcacgagcgcgtcgcgctcggccatagcgaggcggacagcgcgctgaagggcgggcttgcgcgcgcggcgatccacgaggtgttttgcgaaggacgtcagggtgctgccgcgacagggtttgtcatgggacttgcggggcgcgtctcagcgcgtcggccgctgctgtgggtgcggcaggatttttcggatatcgaaaccggcgcgctgtcgatgagcggactcgccgaactcggcctcgatccgcgtcgcgtggtgatggtgcgtgccgccgatgtcgagagcgcgctgcgcacctcggccgatgcgcttgcctgcgacgcactgggcgctgtcgtgctcgagctctggggcgatatcaagcagttcgatccggtggcgagccgcaagctgacgctggccgcgcaaggctccggcgtcgtcggcctgatgttgcgcatggccgcgcagccgctgccctcgaccgcggagacacgatggatgctgcgcgcggcgcattcgccgccgggggcagcatggagtgcctggggtgcgccacgcttcgatgctgaactcctccgcaatcgtcatggcccgtgcggccggtggatcatggaatggaattgtgatgagtgccagttcaatgagccgtcgacgtattctcagcctgtggctgccgcgcctgcccatcgatcggatccaacggttctttgggaaagtcggtctgcataagagtaacgagccgagcatcgtcgtcatcaaggacaacaatgcgctgttgattcatgcgctggacgaggccgccgagcgcctcggcctgtacattggccagcctctggccaatgcgcgtgcgatgtgtcctgacctgaaggtgttcgacgccgataccgtggccgatgcgaagacgctcagcgatatcgccgactggtgcgaccgcttcacacctctggtggcgctcgatccgccgcacgggctgttcctcgacatcaccggctgcgcacatctgttcggcggcgaagccgcactgttgcggacgctggtccgggcgctcggccggcagggctttgccgtcagtgccgcgattgccggcacctcggtctgtgcacgcacgctgacgcggcaggccacgggcaccatcgtggccgatggcgaggaggcggtcgcgatcagttcatttccggtgtccgcgctaggggcgggcgaggcgatcaccaccggtctgcgccgcgccggtctgaaaatcatcggcgatgtcgcctcgcgcgcgccgagcgagatcacggcgcggttcggcgcgcgcttctccacgctgctcgcgcatgcgctggggcagggcgatgcgccgatcagcccgcgcaagccgttgcccgactacatcgtcgagaagcgctttgccgaaccgatcgcgaccgacactatgatcgcgatgacgctgtcgcggctggcggacacgctgatcgcatccatggagaagcagggcaagggcgcgcggcgtctggaggccgcgttcttccgcaccgatggcgcggtgcgcgcgatcacggtcgagaccggacgtccggtgacgcgaagcgccgtgatcgaccggctgttccgcgagcgtctcgatgcgctcgccgatccgctggaccccggctttggcttcgacatgatacggctgtcggcgagccgcaccgagatcgtggtacaggagcagcgcgatctcgatgcccatgtccatgacaatgacgagcttgctgcgctgatcgaccgcatcgccgcgcgcatcggcggaaagcgtgtcgtcgtacatctgccgcaggacactcatatccccgagtgtgcggtgctcgccgcacaggcgcagcatcatctcgccgccgccatgcaggccacatggccggcgcgcaccgagagcgagccgccgctgcgtcccttgcggctgttcgacaagccggagccgatcaaggtgcctttcgcgaccgtgccggatggtccgccgcatcaattcacctggcggcgcgcgctgcatgcagtggtgcgggtggaagggcccgagcgcatcgcgatggagtggtggcggcaggacggcaagcagctgacgcgggactatttccgcatcgaggatgccgaaggcctgcgcttctggatctttcgcgacggtctctacgagggggaagtgttcgacggcgacggcaagcccgcttctcccggctggtatgtgcacggtcttttcgcatgatctcgcccgcttatgccgagatcggcatcaccacgaacttctcgttcctgcgtggcggctcggacccgcgcgcctatgttcatcaggcgagcattctcggcatctccgcgatcggcattgccgaccacaacacgctcgccggcgtggtgcgggcctacaaggaactcgacaatgatgaggtgctgcacaagccgaagcttttgatcggcgcgcgcatcgtcttcgtcgacggcacgcccgacattctggtctatccgcgtgaccgcgcggcctatggccggctctgccagcttctcacccggggcaagcgcggcgacgacctcacgcggatcgagaaaggcgaatgccgtctcaccttcgccgacctccttgagttttcggaaggtcagcttctggtcctgaccctgccgcatcgcttcgacaacccgcaggcgctggatgttctcgcaaagcttagggatagccgtgccgcgggtgtgtggctggcggcgagcctgatctatcgcggcgacgaccggcgtcgcctggcgcggctcgacgatctcgcagcaagagccaaagtgccgctgctcgcgaccaacgaggtgctctatcacgatccccgccgccggcctctccaggatgtgctcacctgcatccgggaaaagaccacgatcgcggcggttgggaagaagctggaagccaatgccgagcgttttctgaagacaccgcgagaaatggcgcggctgtttcgcgatttccctgatgcgatcgcggagaccatgcgttttgcgggcaaggtcgatttctcgctcgaccagctcaaataccagtatccggatgagccggtgccgccgggcaagaccgcgcaagggcatctggaggatctgacctgggcgggcgtcgacaaatatttcgacggtaagatcggcgacaagctgcgcgcaacgctcaacaaggaactcgcgctgatcgccgagctgaaatacgcgcattacttcctcaccgtgcacgacatcgtccaatacgcgcgcagccagaacattttgtgccagggacgaggatcggcggcgaactcggccgtgtgctacgtgctcggcgtcacctcggtcgatccgaccaaggtcgatctgctgttcgagcgcttcatctccaaggagcggctggagccgcccgacatcgacgtcgatttcgagcattcgcgacgcgaggaggtgatgcaatatgtctatcgccgctatggccgccatcgcgccgcgatcatcgccaccgtcatccattatcgtccgcgcagtgccatccgcgacgtcggcaaggcgctcggcctgaccgaggacgtcaccgccgcactcgccgatacggtgtggggcagctggggcaagggcctcaacgacatgcaggtcaggcaggccggactcgaccccaacaatcccatgatcaacctcgcggtcgagcttgcgaccgagctgatcgaatttccacgccatctctcccagcatgtcggcggctacgtgctcacgcaggaccggctcgatacctatgttccgatcggcaacgccgcgatggacgaccgcaccttcatcgaatgggacaaggacgacgtcgatgcgctcagcatgatgaaggtcgacgtgctcgcgctgggcatgctgacctgcatcaggaaatgttttgacttgatcgatcagcacaagggtaagcgttacgcgcttgcggatatcaagggggaggatgacgacgaagtctatcaaatgctgcagcgaggagagtcgctcggcgttttccaggtcgagagccgcgcccagatgaacatgctgccgcgcctgaagccaaggactttctacgatctcgtcatcgaagtcgcgatcgtgcgtccgggaccgattcagggcgacatggtgcatccttatctgcgacggcggaacggacttgagaaggtgagctatccctcgccgtcgcctgagcatggccccgcggacgaactctacaaggtcctgcacaagacgaagggggttcccctatttcaagagcaggcgatgcgcattgccatcgaggcggcaaaatttacctccgaggaagccaatggcctgcgccgctcgatggcgaccttccgcaatgtcggcaccatcggtcaatacgaagaaaagctggtcggcaacatggtggcgcgcggctacgatcccaacttcgcccgaagctgcttcgagcagatcaaggggtttggttcctacggctttccggagagccacgccgcgagctttgcgcaactcgtctacatctcctcgtggctgaagtaccatcaccccgacgccttctgctgcggtctgttgaactcgcaaccgatgggcttttacgccccggcgcagatcgtcagcgacgcccgcaagaacggcgtcgaggtgcgcgacatagacgtgtcctatagctttgtgcagaacacgctggagcaggggagtggtagatactgcgccgttcgcctgggtttccgtcagatcgacggctttcactggctggatgaagatgaggagcggttgaagcgctcccagtcgtcattcccgggcgcgccacttggcgcgagcccggaatccatcgaaccgcatttgcctggaggactgggctccgggctcgatgctgacgcatcggcccggaatgacaagagaggggactgggccgatcgcatcgtcgccgcccgcaaccgccgtcccttcacctcgctcgaagatttcgcccgcgacaccggcctgcccaagcgcgcactgatcctcttggcggatgccgacgccttccgttcgctggggctcgaccgtcgcgaggcgctgtggcaggtgcggcggctgcccgacgacgtgccgctgccgctgttcgaggcggcggccgcgcgcgagcagccggacgaaggcgcaaggccgttgccggcgatgccgcgcgccgagcaggtcgtcgcggactaccagaccatccgcctgtcgctgaagggccacccgatggagttcttgcgcgagctgtttacgcgcgagcgcatcgtcgcctgcaaggagatcagtcatgagaacgagcggcgccgcgtccgctgcgccggcgtggtcctggtccgccagcggccgggaagcgccagcggcgtggtgttcatgacgctggaggacgagactggcatcgccaacgtcgtggtgtggcccaagatcatggagcagtaccgcaaggaggtgatgggcgcacgcctcatcctggtcgaaggctacatccagagcagtcccgagaaggtgacgcatctcattgcccagcgcatggtcgaccgctcgcatgatctggtcggtcttgcaaacgatgcgctaagccgcaagcatccgctgccggcaggcgccaccgtggtcgaaccactcaacgaagaccctcgcgcgctcgcagacatgcctgcgcagaaaatccgccatccccgcaacgtccgcatcctgccgccgtcgcgggattttcattgagattatgcacgaatttatgcacgactgtcgccacactcgtcattgcgagcgcagcgaagcaatccataatccctccgcggaaacagcctggatttgcttcgctacggtcgcaatgacagctttgttgagggatcgcgtgcgacgccctcggtcgtcatgcccgggcttgccccgggcatcccattgctcggcatcgcgtggatcgccgggtcaagtcgaccatgacggcagagcctgcctcgcgaaccaactcctcaaaagttcacccggttcgagatcgcgccatccacgacgagattggatccggtcgtgaaccccgacacggggcttgccagaaacaccgccgcgcttgcgatttcctgcggggtcgccatccggcctgtcggattgcggttcatcgcatccttgtagcgctccggcatgttcttctcgatcatctcccaaacgccgcccttgaaataaacggtgccgggcgaaacgacattcacgcgaatcttcttctttgcatattgccgcgccagtcctttggccatgtggatcagggccgccttgatcggaccgtaggagcttgcggtatcggcttgcgccgcggagatcgacgagatgatcacgaaggcggcatcgcccttgcctgcgccgctggcttcgagaaacggccgcgcggcatcgaacgcatgcaccgcgccgagcacgtcgagccggaaattctgctcccaggatgcgggatcgccaccctgcgccattgcaccggcgttggagaacagcaagtcgacgccgccgagctcctttgctgcagcctcgatccaggatttcagcgccgcgccgtcggtgacgtcgacagggcttccggtggcgttgatgccgcgcgccttcagctccgagaccgttgccgcaacctgatccgcgttgcgcgcgcacaccgcgacattggcgccttcaccggccagcgtcgccgcgattgcccgcccgatgccgcgcgtgccgccgaggacgatggcgttcttgcctttgagaccgaggtccattgttggtttccttgttgttggtaaccgggagtgtagctgtttcggacgacgtgctgaactttccacttcgacattgcgagcgtagcgacacgatccgaagtctctttgggggggcgaggccgtgcatgctgcattcatcgagagcatatcatcaggctcggcacgttgaacgcaatgcagcattcggcgctgctgtcgaagacaccggcgcaccggagccgtctggcgatgccgcttggagttattcgcccaaacggcagttgcgaagcttacatgaagctgacatgtcgcaaaattttaacgccaatcgcgaggcgtcctgcgctttttgggttgtttgcaatcagaattcggcactattagccgcgaccgatccggcaatcatttgccgagatcgctgcagacgcgaccgggcttcatggtagtcgaaaagaccaagagattgcagctgcttacaaagcgacggatgattgcatccgtagttctgctggctctcgccggtgctggcgcctatggcttgctgtattcgtctgccaagcagaagaaacattcagagatctccagtcagtcgcgcaagaatgcgcagacctttacgccgacgccatctgaatgggcgacgttgacgatcgagccggtgaaggccaggagcttccgcgccgagtatgtcacggagggcaaggtcgcgatcgacgaggatcgctcgacgccggtgttctcgccctatgcaggccgggtcaccaggctgctagccaagccgggcgagatgctgaagcaaggtcaaccgctgctcacgatcgaagccgccgacaccgtgcaggcccagaacgatttcatcgcggcgatgacctcgcagaacaaggcgaactcggcgctcgagctttccgacatccagttcaagcgcgccaaggacctttatgaaggccatgccattccgctgaaggactatcagctggcggaggcggcgcaggtccaggcgcggaacgacatgcgctcctcggcgacggcgctggaagctgcgcgcaacaagctgcgcatcctcggcttcaccgacgagaccatcaaggccttccgggacaagggcgtcatcaacccggagatcacgatccattcgccgatctccggcacggtcgtgcagcgcaagatcggccccggacaatatgtcagcgccggtgccagcgatccggtgttcgtgatcggcgatctctccacggtctggctcaccgcctttgtgcgcgagagcgatgcggcggcgatctgcatcggccaggacattatcgtcaacgtgatggcgctgccgggccggccgctcaccgccaagatcaactacgtcgccgccgcgatcgatgcgaccacccgccgcctgctcgtccgcgccaccatcgacaacaaggacggactgctcaagccggagatgttcgcgaacgtcacgatctattcggccggcggccgcgccgcgccggcggtgccgaagcaggcgttgatctttgaggcggacaaggttcgcctctgggtcgcgcgcgaggacaagtcggtcgagctgcgccagatcaagatcggtctcatcaacggcaacctggtcgaggtcaccagcaacctgaagcccggcgagcagatcgtgaccaaaggcagccttttcatcgaccgcgcggcgtccggcagctgatcgacgattcaagagaattgaagacctgaatggatcgtctcgttgcccttgccgtcaaccggcgcttcctgatggtcggcctgttcgccgccgtgctgatcggcggtctgatcgcattcaaccggctcaacatcgaggcctatcccgatccgacgccgccgatggtcgacatcgtgacgcagagcccgggcctgtcggcggaggagatcgagcgctacatcacgatcccgatcgagacccaggtcgcgggcctgaagaacatcacgaccatccggaccatctcgctctacggtctctctgacgtcaagattcagttctcgttcgcctacacctatgacgaagcgttgcagcaagtattgaatcgcctggcgcaactcgcgccgctacccggcaacgtgcagccgcaaatctcgccgctcagcccgatcggcgagatcttccgttatcgtctggtcgggccgcccaattacagcgtgctcgacctcaagactgttcaggactggatccttcaacgccgcttccgcgccgtgcccggcgtcatcgacgttaccggctggggcggcaggagcaagacctacgagattcaggccgacttcaacaagctggtcgccaacggactgacgctaccgcagttgctccaggccgtcggcaattccaacgtcaacgtcggcggcaacaccatcgacatcggccagcaatcggccgtggtgcgcggcgtcggcctgatccgctcgatcgacgacctcgccaacaccatggtggcgcagaccggcggcaatccggtgctggtcaaggacgtcgcaaccgtcaccgtcggccaaaaaccacgtctcggcattgccggcctcgacgaggccgacgatatcgtgcaaggcattgtcctgatgcgccgcggcgagcagagttcgccgaccatcaagcgcgtccacaaactcgtccagcagatcaacaactccagcatcctgccgcccggcgtgcgcatcgagcgcatctacgaccgcggggacctgatcgagctcaccacgcacaccgtgctgcacaacatggtggtcggtatcctgctgatcgtgctgctgcaatggatcttcctcggcgacctacgcagcgcgctgatcgtcggcgccacaattccgtttgcgctgttcttcgcggtgatcatcctggtgctgcgcggggaatcggcgaacttgctgtcggtcggcgcgatcgatttcggcctgatcgtggacgccaccgtcatcatggtggaggcgatcttccgccgcctgacgcaaaccacgccgatcgcggaatccgaacagatgtcgtccgagacgctgttcggcatgaagagccatgccatcctcagcgccgccgccgacgtctcacgctccatcttcttcgccgcggcgatcatcatcgcagcgttcctgccgctgttcacgctctccggggtcgagggcaacatcttcgggccgatggcccgcacctacgcctatgcgctcgcgggcgggctcctcgcgaccttcactgttacgccggcgctgtccgcgatcatcctgcccgcgcatgtcgaggaaaccgaaaccaaggtgatgctgatcctgcaccggttgtactcgccgctgctcaattgggccgtcgccaatcgcaacatcgtgctcggcggtgcagtcggactcgtgttgctgacggtggcgctcgcccgcctgctcggcctcgaattcctgccgaagctggaggagggcaatctctggatccgtgccacgttgccgccgaccatctcgcttcaggaaggcaattcctacgtcaacgagatgcgcaaggtgatccgcgcccggccggaggtcgagtccgtcgtatcgcagcacggccgtcccgatgacggtacggacgcggccggtttcttcaatgcggagttcttcgcgccgctcaagcccgcgagccagtggccaggcacccgcgacaaggaggagctgaccgcgcagctgctcaagcagctcgatgacagcttccccggcgtcgagttcaacttctcgcaatatcttcaggacaacgtctccgaagccgtctccggcgtgaaaggcgagaactcgatcaagctgttcggcagcgatctccaggcgctcaccgacaccgccaacaagatcaaatcggtcctggccaccgtgcagggagtgaccgatcttgccgtgttcacctcgctcgggcagcccaccgttcaaatcgacatcgaccgcgccaaggcggcgcgctacggccttgcgccgggcgacatcaatgccaccatcaaggtcgcgatcggcggcgacaccgccggcgatctctatgagccgggaagcgaccgccactttccgatcattgttcgcctcgcgccggaatatcgtcgcagtgccgaggcgatccagaatttgcggatcggcgcgcccgggccgaacggcatggttacgcagatccccttaagcgaggtcgcaaccatcagcctcgtctcgggcgcggcctatatctatcgcgagcagcaggagcgctatctgccgatcaagttctcggtgcgcgagcgcgatctcggcagcgccatccgcgaggctcaggacaagatcgccgatcaggtgcagctgccgccgggctcgcacatggagtgggtcggcgagttcggcaatctccaggacgcgatccggcggctgtcgatcgtagtgccgatctcgctggtgctgatcggcgtgctgctctggttcaatttcggctcgatgaccgatacgctgcttgcgatgagcgtgatcccgatggcgatcttcggcggggtgctgggcttgttgatctcgggcacggcattcagcgtctccgcggcgatcggcttcatcgcgctgttcggcatcgccgtgatggacggcatcatcatcctgtcgcagttcaaccagctcatcgaagagggtatggaccgcatgagtgcggtggtgcgcaccggcgagcttcagctccggcccgtgctgatgacgtgcgtcgtcgcgggcgtcggcctgttgccggcggcactgtcggagggcatcggctcgcaggtgcagaagccgctcgcggtcgtcgtcgtcaccggcatgatgctggcgccggtggtgatcctcctgacgttgccggtgctgatctcgtttttctcccgccgggcgcgctgatcgtcagaagccgtagagccgcgccggattatcgaccaggatcttcttacgcacgtccgcatccggcgcccacaccggaagctggttgagcaaccgaccgtcgtcgatttgatagaacggcgcaatgtcggtgggcttgcgtccctcgacgtggcttgaatccggatgcggccagtcggtgccccagactatgcggtccgcgttcgccgctatcaacgcgcgggcatagggaaccatgtcctggtagtccggcgccagcttggacgaacgataggcgcccgagactttcacataagccttgccggacttcacgagcgctatcaggtcgtcaaacccgggttgctccagtccgagcggggcctcgaggccgccgaaatggtcgaacacgacgggcaccggtgcagccagcaccagatccttgatcgccgagatcaccggcaatgtcgtgtagagctgcacatgccagccgcgtgtcttcatgcgctcaacggacgccgtgaagcggcttcgtccgacgttgggatcgctgatgccgtcggtcgccagattgatgcggatgccacggaagccgtctgcctgcatcgtgtcgagctcggcctccgtcgtcttgtcgtcgatcacagcgaccccgcgcgcggtcgcgccgcgcgccttcatgccgaacagcgtcgaagaattgtcggtgccgtacacgctcggcgtcacgatcaccacgcgctccatatgcagcgccttgtgcagcgcagtcatttcctcggggctcgccggctccggcgtatagacgcgcccggcaaagaaaggaaatctcccgacgtcgccgtggatgtgggtgtggcagtcgcaggcatgcgccggcacgtcgaagttgacccgcgtcgcgggctgtgccgcacgggcgtggacttggtcgatcatggttactccggccgcgagaaggcgaacaggaaaccgcgttggcagagcatggtgtctctctcctgcttcgttgccgagcaatgatagcacgccagcaaggctctatgcggcttctacacgccaggagtcgaagctgtgatggttccttcgcaggagcgagagggaagtttcggctcctactgccctgatggcgtgcgtaggccgtgccaggcgtcgcggacctgatggtagtgcacctcgggcagatagtccggcgtgttcaggttcagcgtcttgacgtcgagatggccgatggcgctgaggagcgtgtaggaggcgatcacgcggtcgcgttgtgcgccgatcaggcgggccttggccaggatcagatcggcctgcgagttcagcacgtcgacggtcgtgcgctgtcctccggcggcctcgcgctgcacgccttggagcgcgaccgtcgcggccttcacttcggactccgaggcggagaccgcgaccttggcgccttcattggcgacccaggcgctcaccgccgcagcgcgagcctggttgcgcacctggtcgagcacgagccggctctgcgccgtgatctccttggcttgccgggtctgcgccgcggcctggccgccatcgtaaatcggcgcagtgacgttggcgacgatcgaagcctggtcttcggcgaaggtgccgagtgtcgggtcgttgttgcggctcttgctcgcgctgccctggatggtcgcgctcggcagcaatgtgccttcggcgatgcggatgttggtggaggcgacatcgacgtcgaagctggcggccatcaccgccggatgctgtcggatcgccttcgtcatcgcgtcctcgcgactcttcggcagatagcggtcgacggcctcggcggggcgaagctgcgagggcgcattgccgatcacctgtgcatacatcgcctgactgacggcgagcgcgacctcggccgcgttgagatcggcaaggccgcggttgagacgggcctcggcctgggcggtgtcggtcggcgtgacatcgccggcattgaggcggcgctgggtcaccgaaagtgtttcgcgcaggaaggcgacattggagcgctgtgcctcgacgagcgattggttggcgagcacgttggtgtaagcggtgacggcgtcgagcagtacgccttggccgacattgcgcagcgcttcgcggcccgactgcacctggagttccgcggcccgcacgctgttggcggtgcggaagccgttaaacagggtctgcgtcacggtgacgccgatgatccagggtttcaggttggcggtctggatggtgttgtcgggcagcagattgcgcaccgattgcaggccggcgctgaggctggccaagatctgcggccggtagccggcaagcgcctgcggtacgttctcgtcagtcgcacgctggcgcgcacgctcggcattgagctgcggattggtctgataggccttggcgagcgcctcgggcagggcctccgcccaggcgggagaggcgagggcgcaggagagcgccagcgtggtccatgtcgcaagcacgggagccacgcccgatcgatgccgcgtcagcacgcgaccagctctggcggtacgcccaatcatgtaattccacaaaccctggctattcgcccccgccgatggcggtcctcttaactgtttaaccagccgaggtcccgcaggcaaactgccgcggggaaaacccccatgaaatccgtgcttgttgcagctccgtcacagggttctacgggaacgcggcagagccttacacgagcatggccggttgcgcgccttaccgattcctgttcaccggcttgcgcttttcgatgaaggcagccatgccttcggagcggtcctcgagcgcgaaagtcgaatggaacaggttgcgctcgacgctcatgccctcggcaagcgtggtctcgaatgcgcggttcaccgcctccttggccattgcggccgcagggcgcgacatcgcggcaatcttctcggctgccgccatcgcttcgtccatcagcttgtcagccgagacgatgcggctgacgaggcccgagcgctcagcttcggccgcatccatcatccggccggtgaggcagaggtccattgccttggacttgccgatcgcgcgcgtcaggcgcggggtaccgccgatgccgggaatggtgccgagcgtgatctcgggctggccgaattttgccgtgtcggcggcgatgatgaagtcgcacatcatggcgagctcgcagccgccgcccagcgcataaccggcgaccgcggcgatggttggcttccggcaacgagcgatgcggtcgccgccgatcgcggcgaagtcctcggagaacatgtcgatgaagctcttgggctgcatctccttgatgtcggcgccggcggcaaaggccttctcgttgccggtcacgaggatgcagccgatggcatcgtcggcctcgagatcgtcgaccgcggcagcgatctcgcggaagacgccgaatgagagcgcgttgagcatcttcggccggttcagcttgatgatgccgaccgcgcctttgctctcgacgataatgtgttcaaacgtgctcatgctccacccacgcttttgattgagcgggcaatgtgcccgctggcgcggtgggcttcaaggggggccggaggcaggacgcgcgggctgtgcgcgtcctgtttgcgtcctggcggaactggcaatcaggctatgaacatccgcgcggcagaggccagcgtcagcagcgtgccgacgccgatgaagatcttgccgatcagggagctctggtcccaggccgagctctgctggctgcttgccatcaccggggcgggccgaggctgcgcctcggttgcggcaagcaccgccttctgcgccggcgggttttcctgctgcacggcgcgatcgatgtcgttgagctgatcgggtgcgacgacctggctttccggggccgcggcattggtattatccgctgccgcctggacattgtcgttggcccggttcgtcatcgccgaggcggcagctgcggtcggcgtgtcgtcagcgagctgcgcattggcattggcgacctccggcggcatttggttcgatgccggcccctcaccgtcggtcttgacaccctcggtcttgccgtcagccttggcctcgtcggtccttgcggcagtgtccttcttgccggccttgctgacggagttcttcaccgccttgttgctgccggtgcggcgcgaatcgtggcgccggtgcttggccgtgtcggcctgcttctccgcgctatccggtttgttgccggccgccgaactcggcgccgcctgtgcaacgcccccgaacagcaagaaaagcccggccacaacgatcagggccgcgcgcgcgctggctttcatcatgtcgacgatctccccaattccgcccgtcccaggagtgaacagagacccttgggcgtgacgacagcggggcagaaaatgggaatcttcgggttagacccgccaaaaacggggcagaccgccccttgcggctggctggccgatgcggcatgggccgatcggtgttatgagccttagcaatgttacgactacatcggccgcgaggttcgggacttcatcacgaattcgtgataattccggccgcctgcgtaacaaattgaatgagcagccgaattgcatgatgaggggcgcgggtgcgcggacgtgaagacgaatggaccggcctgatgcggtcggccatggctggcgatgacgcggcgtatcagcgcttgttgaaggcagtcacgcctgtgctgcgcgctgccgcgaggcgcggcttggcgcgggcgggtcagcctccagaccaggccgaggatatcgtgcaggagattttgttggcggtgcatctgaagcggcacacctgggacagcgaagcccccttcgcgccctggctgtttgcgatcggccgcaacaagctgatcgacgcgcttcgccggcgcggcaggcgcgtgttcgtgaacatcgacgacttcgccgagacgctgccgggcgaggcgccgcaggagaccgcttcggccggcgaggtcgccgcccaattgggcaccctgccgcaacgacagcgcgacgtgctgcaatcgatcgcagtcgaggccgcctcgatcaaggacacggcggcaaagctctcgatgagtgagggtgcggtgcgggtcgcgctgcatcgcggacttgcggcgctgacggccaaactgcgggacgcctagtcatggacaccgatcaactcatccgctcgctcgcggccgacaacgcccatcgcgcgccgcgcgtcggcgccgtgctgacgatggcgctgctggtggccgcgccgctgtcgatcctgatcttcgcaacgttcttcggcgtgcgcgccgacctgatgagcgccatgcgcaatccgttcttcgacatgaagttcgcggtgaccctgtcgctcgcaatccccgcaatcatcatcagcctgcatttgtcgcgtcccgaagccctgctgcgcggctggggctggctgctgctgcttcccgtcgggctccttgccgtagcgatcggcggcgaggcgatgatggcgccggccatgccgatgacgatgcgcctgatgggcaagaactccagggtgtgcctggtcgcgatccccgccatgtcgctgccgctgctggcaggcgcgctgttcggcctgcgccacggcgcgccctcgcgtcctgcgctggccgatgcgctcgccggcctggtgtcggccggcttggctgcgaccctttatgcctcgcactgcaccgacgactcgccgctgttcgtcgcgacctggtacacgttggcgaccgcgatcgtaacggcgatcggggcgctggcgggatccaaagttcttcgctactagcgccgccggcttcacgccgccggcgtcgtgcccagctgcatgcgatggaatcgcagcacttgttgcgcggtcgacgagcgcagtgcctcgtaggtgtcgcgcagtgtcagcatgtccgcctgcgcgccgccggagagcttctcgcgcatggcgatgatggcgcgcacgcacggccaggacatgcccgcgaccttggcgaggatcatcacgccttcggtgcggctctcgatcatcatagtctcggcggtctcgaccgcgacgccggcgagtgccgccaatcctgcattggcctcgtcgaacttgccctgctcggcgaaggcggtgacctcaagttcgtcgaggcgaccgtcctcgtgcagcgatttcaccagcgcgcgcgccatctcggtctgcttcgtcatggcggcgattcggaccctctgcgccgcttcctggaccacgcgcgatacttcgttggtgagctcgggatgcgcggacgcaagcttcctgcgcacgctcgatgatgctttggcgaccagcctcagatagtggtggcgcggcaggtccggccggaggccgatgcaggcggcgaggtcgtcatcgcgttcggcccgcgtgacgaggtcggtgagacttccttcggagagccgggcgcccggatttccgacggtcgactgcaccacgtcctggttgccgcgtgtcaccagcacgtcggtcagcgcttccgacagcacccgccgcagcgagatcgccttgagatgcggctggcccctgctccgcgcgatctcgatcagcgttgcttcatccaggcgctccgacttcgtcagcaccggtccggagacctcgatgacctcgtcgagggcgagtgtgcggatgatattcggcggggccgccgcgatcggtgcgagccggtcggcgagccgcgccctcgccgaggtctcgatctgctcgatcaagcattggaacacatcgtcgaagacgcggatgtggtcgtcggaatagtccaccgcgttacccacgaagagatcggtgacgcggtggagcgtctcgacccggcgcgcgacagtgccgtgcgcgagcgcagtctgcaattcctcgagcaggttttcggattgtttcgcgatcttggatttcattgccctgtcctggagcgttcggctccgcggcgcattctgtcgcaccgggagaaaatggattggtcagctcgttgcaatgtggttgcggccttgcgccttggcggaatagagcgcgcggtcggcgcgcgcgagaaacgtgtcggcagtatcaacgtcgcgcagcgtcgcgacgccggcggaaatcgtgacgtgcatacccggggaaaatgcgctccagtcgaggtcggcgacgatgccgcgcaaccgctcgagcatgcgcgaggcgacctcaccgtcggtacccggcagcagcagcagaaattcctctccgccgtagcggccgaagctgtcagtcgggcggatgttggcaaaaatggtgatcgcgaaagtgcgcagcacctcgtcgccgaccggatggccaagggcgtcgttgatgcgcttgaaccagtcgagatcgatcagcgcgatcgcgaagggcgtggatgcctgccgcgacttctcgatctcgagttcgagaagccgcatgatgcagcgccggttatagcagccggtaagctcatcgagttcggccaattcctcgatgcgctgataggcggccttcagttcaatgctgcgccggtacagtatcttgcgcagggtggcgccgaacaggccgaggaaagcgcactggccgatcaccagcgcgaagcagagcatcgaggcggctctctgcagccgggtcgtgactggcagtccgatcggcaggtcagatcccaagaaaaccaaggcaagcccgcaggtggcaagcccccaggtgagcaccgcctggctcgacgtcatgcgcagcgtgccaaacgcgaaaatcaggaacaacaccgcgaggaaggcgacccccacggtcggcaccgcgagcaggaacaccagttgcagcgccatatgcgccgagatctggtagacggtgaggtaatgatcctcgaaacggtcaccgaaaccggcttccgataacaccgtgaacgttccaatgatcagcagaccgccgagccagaacagcgacgggacgcccatggagatcgtgccgtcataggcgtagagcagcaggaccgaggcgcccagcgaatagctcgcgacctgcccgatatacatctggcggcgctgccgggcccggcgggccctgacttcaggggccgcggactcgggcgcgaggacgagatccgcgacctctgcggcattcctctcgggaaaggacgtcgcggccgtgctcatggtcccgccagtggtggatgtcagcgcaagaatctacgtgccaagcctttaggtttggtatcctttgaaaccgaatccgaaacgcagcaccgaacaagctgatcagccagcgcgagaatccacgggcgatcaaagtgtgcgatgcggtcgagccaaatcacgggttggtgcgacaaacgtggtgcagagtgctatggaaccggacgagccgggtggcctgtgcccaggcattctacagggaaataactcggtatcatattacctattctgaccggcggcgttgatcgacgcgggtggcacaagaagagcgcgtatgtggcctagctcacactgttctccgtatgactgcggtagtctgaacaattttgcacccccggtcgaaccgtccgccgcatcgacccgaccaactttgcgagacggccattgagtgtgacacaggcggcttcggacgagatcctcatcgccaggatcgctcaaggtgaccggctcgccatgcaggtgctgtacgggcggcaccatgtcagggtttacaggttcggactgaggctcgtgcgtgacgagcaggcggcggaagacctcatcagcgaggtgtttctcgacgtctggcgtcaggccggcaagttcgagggccgatccgccgtttcaacctggctgctggcaatcacccgattcaaggccatgtctgcgctccggcgcaggaaggatttcgagttggacgaagaagccgccaacgcgatcgaggatacgtccgacgatccggaaacggtggtgcagaagaaggataccagtgaggcgttgcgggagtgtctgacgggcctctcgccggagcaccgggaaatcgtcgatctcgtctactaccacgagaagtccgtggaagaggtggccgaaatcgtcggaataccggagaacactgtgaagacgcgcttgttctatgcgcgcaagaaactggccgaactgctgaaggcagccggcgttgagcgaggctggccatgatggcattgagcaagaagatgctggagcaagagcccagtgagattgaactgatgctgccgtggcacgcggctggcacgctgaatccgcgcgattcccgccgtgtcgaggaagcgctggcgcgcgatcccgaacttgccaaacaatatgccgcgatccgcggcgagtatgaagaaaccatccatctgaacgagagcctgggtgcgccgtcggcgcgcgcaatgcagaagctgttcgccgcgatcgatgccgagccggcacgggcggccggctcgctgccgctctcggcgcgcatcgccgtcttcttcgcgagcctgtcgccgcgcacgctggcctggtcggcgagcctcggcgcagtcgcgctcgtgctgcaggccgggatcatcggcgcggtgctgatgaagaaccagccggcgaccttccagacggcctcgctctcgaccagcgcgccggtcacgcgcgagctcggcagcgcggccgcgccggcgcgcgcgctggtacgcttcacgccggaggcgcgcgtcgccgacatcaccgcactgctcgacagctaccaggcttcgatcatcggcgacgcgaagggcggcatgttccgcctccagttcgacaaggcgatgaaccaggacgagctcgcttcgctgctcggcaggatgcagcgagagaagttcgtcaacctcgccgtcgcggcaccctaggcgcgccgctcaagccgatgacgggccagtccaagacgaaggtacgcgccgtggcctacggttcgtcggtcggagccgcgcttctggtcgccgcctgcctcggcttcgacgtggcgcaggcgcaggcgatcatgcgaacgccaacgatcagcgttccctcgcgcacgccgaccatttctccgagcattgccccgcgggtcagcccgaatgtggctgcgcgtgccgtcagcgtcgatcgcggcccgcgaacgatggcgaccattcccaatgccacgacgtcgcgcgtacggccgacgacgccggtgctgccccatgcgcgctactcgccgaacctctatccggcctgtaccgctccccatcgcgcggccgacggcgaatgctctggccagtcgaatgcaggcggcgagggcgcgggcaaatcagccaagaagagcgccggcaaggggcgtggcaacaacacgccggccgtggtcacctctcgcagcattgccggcgaattcgtcgccgagatcgacggtgcgctgtcgacgaccgaggccgacgagctggcgcgtcgccacggcctgacccgcgtcgcttccgaaaatttcccgctgatcggggcgacgttcggcctgttccgtatcactgacggccggccgtacgagacggtgcggcgcgaattcgccgcggacgccagcgtgcgctcgctccagccgaacttccgatatgcgctccaggaccagaaatcgtcgcggacgaccgagggagatcctgcgcaatatgcgctgacaaagcttcggctgccgcaggcgcatacgctggcgcaaggcgccaatgtcacaattgccgtgatcgattccgggatcgacaccaggcatcccgaactcgccaattccatcgccgacaatttcgacgcgctcggcagtgccgaggggccgcacgtccacggcaccggcatcgccggggcgatcgcggcgcacgcccgtctgatgggcagcgcgcccgaggcgcgcatcatcgccatccgggccttcggcggcgccaacggcggcaccgagagttcgtcctacatcatcctgcgctcgctgaactacgccgccgagcacggtgcgcagatcgtcaatatgagcttcgccggtccgaaggacgctgtgatcgagcgcgcaatcgccgcgacggccgcgcgaggtctcgtgctggtcgcggccgccggcaatgccggtgcgaaatctccgccgctgtatccggccgcgaatcccaatgtgatcgcggtcagcgcgacggatcagcaggacaagctgttctccgcctccaatcgcggtaactacatcgcggtcgcagcccctggcgtcgacatcttcctgccggcaccggacggcaaataccagatgacgtcggggacctcattctcagccgcctatgtctccggcgtcgccgcgctgctgctcgagcgcaaccatgccttgaagccggaagcgctgcgcatgacgctggcgaagaccgcgcgtgacctcggctcacccgggcgcgacgagcttttcggcgacggtcagaccgacgcatttgccgcggtcatggccgttcccgccaacagcgcgacgccggtcgcggccgcgtccggtacaacaaaacgtgaagacgccgacaagcgtcgcgatgcgcccggcagccgtgcgatcgagcagccctcgctgtcgagctcggacgataaatccgcgatttctcagatggatagaccggccactcgatagcggctgcgacaaagatgcgcgcccggccgagctcaaaaaagcgaaccctgcattgaacgttcagccagctgccacgaccaaattatgtgggagcggtcatccctccccatcagtcatatcaggcgcgagcgcccatccaccccaagcgcccatatggctcgacccgtccggttgtccccccggacgggtcttttcttttggcatcccattttgacaggcctcgcattcgttctgtcggctgaggagcggtagggcgtcggtcgctgaggttcgcccgacgcgccgcaactccggtatgcttgtgcgaagcttgactccgacaccctaggaaaaatccgcacgactacggtgtttgatgacggagctcgtgtcgttgctggacaagtcaaaacttttccacaaaatattcatgtcgcgtctaaattgattcgtgtgcgttgcgtccccgcgtccgtaatttctcacgacgggctggttcatgacacatcgccaagagtttattcgcgacgcggtcgcaggccgcgacatcgcggcgcgctggtgcgctcttgccgagcagcgcctgcaacatctctccgagatgttcgagaccgggcgctggcgccgttatcattctgagatcgcgtttctcgaaaacatccaggaagccaagcgtgccgtccagacttggcgcgcgcttgcgactggcggggatgtcgccgaggcggctgcgagcgtaacgcctgcattcggctggtcgcccgcgacgatgccgcgcgtgtttcctcgggcgcaacaggggcagatcatgcagcccaaggccgtccacattgctctcgaaaccgccgtgccggtcaggctcgatccgaagccggacattctggccgagatggccgaagctccgatcgcgccgcgtgtcgcatctgcgcctgccgcagcggcctcgttcaccgcgccccccgagatgccaccgctcaaggctcccgctgcgaagcctgcgctcaccgcacctgccatacggtcgccgctcgcgcctgccgccatggcgccgttcaccgcgccggaagtgaggccgccggcagcagcgcccgccgcgcagctgccgaaggccgcccctgcggctatggcagcgctgctgccgcaattcgccccgccggccgaggagatcgtcgcggcccccgagcgcgtggtcgaattcaccttcagcctcgacggcctggaagcgaagtacccgctgctcaggaacgcgttctagggcggcgggagaggggctctcccctgtcatcactgaggctcgaacttcgcggctgcagagcaccgcggagtgagcctcgaaggatgaacggcccgtccgtcagccatgcctaccttcgcaccgcattgccgccgagcaccacctgggcgaatcgctgtgcgccgtcggccgacagatccggtgtcacggcacgcgcgtgatcgagaccgacgacggcgccccgcggggtctccgagatcatgttgttgttcacgagcgcggtgccggcgcccggcacgatggagacgccgacacccgccagcgccttgcggatcacgttgcccgtgatcgcaacgtcgcgcagatactttccccagccggcgacgatgccgtaggacggcgcattctcgatcacattgccggtcacagatgaatccgcttcgatgtagatgccgacaccggcgtcgtcgtccggcgcagtgccgatcggccgcttcgggatcaggttgcggatgatgttgccctggaccaccgcgatgcggccgccttcgttgaaattgcagacggatacgccgacggctgcgccgtctacaatgttgttggcgatcaccgcggcttcgaacgcgaactcggagtagagggccacctcgcgcacgtcgctgacactgttgcctgtgatgtgaatgttcgaggccgaattgccgcgcacagccgagtaatcgcagttcctgatgcggttgccacgcacgatcacgttgccggcgcggaaggcgttgatggcattgccgtactggccggagccgcccggaccggccttgatgttctcgatgcggttatcggcaaccagcgtgccgtcatcgccgatcgccgtgcgcaggatctcgatgccgttgtcgtttgtgccgagaatagtgttgcgggaaacgctgaggcccctggcgtcgaatgagaccaccgccgtcaccgcgatactggtgaagatgttaccggagatgtcgcccgcgacctgctcgagccagatgccgttgccgcccgaaccggtgatctcgcaatcggcgatgcgaacgtcgcgcccgccgagtacatggatcaacccgcgccgcgtcgccagcgggatgttgccgccgtcgaaggtgataccggtgaggccgatcgcatcggagccgtcgctctggatcatcgaggccccgccggtgaagaccagcctggtcgcgccgcgcacgccgatcagttgtgcgccgttcggcaggcgcagagatccgctgcggtagatgcccggaggcaaggcgagcggcatttgcgtccgcgcggcctcgtcaatggcgcgctgcaacgcgcgcgtctggtcctcgttgctgccgggccgcacgccgtattgcgtggcgtcgcggccgagcagcgacgtcagcggcgcggcgcgcgcagcgtcggcaggcatggtcagagcgccggcgacgccgacagtcgaggctccgatgagatgacggcgattgaggtccatgacgcgtcctccggcggacgcgggagggtgtccgcgccgactaggtagcgcagggcggcggggatcgtgagaattgttcgcggtagggttaaatgtttacgcaagcgggctgcgtgtcttccttgccagccgaaccgtctccatcagcatggcttcccctgcgtccaccagttcctccagcgtgatgcgtggcgctcctttgcgccgtaccgcgccgccgcgcgcaagcaggggaatatggatgaacgccgcaagctgtggcccgccagccctgacgcgttcgattgcgcgccagctcaggtaattgcagagataggcgccggcatcgcgcgaggcgcgcgcgtcgatgccggtgaggcacgccgcgcgcagcagcctcgccgtatgcggcccgaacgtcatcgcgtcggcgtggccggcgatcccgcgcttgctcgagcgggtgttggcggcgtcgggccagagcatggtaacggcgttgcgcgcacgagtctcgatgcgcaggtaaggcgtccgtgcggcgaggccgaacatcagcagcgcatccggcttcacctccgcgagcacctcaggcaattgccggtcgactgcggcgtaagtcaccgggaagatgtggctcgagatcgcgacatcgtcgagcgccggccggcgcagccgggtcagccgcgccacgagcggctcggtcggattatagggcgcgccggggaaggggccgaagccggtgaggagaatgcgcaggccggtcattgcagcaactccagaatccgctcggctgcgagggcgggggtgaggtggccgtcggcaacctcggcttcgatcttccggactttcgttcgcaccgatgcctcgctgcgcagccgcgccagcatgcgctgctccagcattgaccacatccacttcacctgctgatcgcgccgccgcgcggcgaaatcaccggacgcgttcatcgctttccggtgatcgaggaccttttgccatatcgttgcgatgccatcgccggtgagtgccgaataggtctcgaccgggggatgccaatgctcggacctcggggcgagaatatgcagcgcgctgcgatagtcggccgcggtgatcttggcgcgcttgaggttgtcgccgtcggccttgttgatcgcgatcatgtcggcgagttcgacgaggcccttcttgataccctgaagttcgtcgccgccacccggcagcatgagtgcgaggaaaaagtccgtcatgtcgcagaccgccgtctcggactggccgatgccgacggtttcgaccagcacgacgtcaaagccggcggcctcgcagagcagcatggcctcgcgcgtcttggcggcgacaccgccgagcgtgccagacgacggcgaggggcgaatgaaggcatccgcggacgccgacagccgtgccatccgcgttttgtcgccgaggatcgagccgccgctgcgcgccgaggacggatcgaccgcgagcaccgcgaccttgtggccctgtgcgatcagatacatcccgagtgcatcgatcgtggtggatttgccgacgccgggcgagccggtgataccgacgcggaatgccttgccggtgtcgggcaacagcatctgcaccagctcacgtgcgagtgcctgatgatcgccgcgccggctctcaacaagcgtgatggcgcgggcaagggcagcacggctgccggcgcgcaagtcgcgggcaagggtcttgatgtccagcgaagccttcttctcgatcatgccctgctttacaacgccccggcggggcaggcgagggctgctggcctggaatcaccgggatgttgccgccgcggcctgtggccgcttcaccttgcgccatacccacaccatcaccggccagagcagcgcgccgatcgccatggcggcgaggatcgcggcgaccgggcgctcgaagaacggcaggatgctgccatcggacttgatcagcgaggtcacgaaagactgctcgaccatcgttcccatgacgatgccgagcaccatggccgcgacgggatagccgttcgtctccatgacgtagccgatcacgccgaaggcggcgacggtgacgacgccgaacatgttgttgccgatcgcgaacgagccgaccgcgcagcacagcatgatgaccggcatgatggccgcgcgcggcgccagcaggatgtaggctgcgacgcggatcatggcgatgccgagcgggatcatcatgatgttggcgatgatgaacatcagatagatcgcgtacatgctcgacgctttctcggtgaacagcgtcgggcccggattgagacccttcatgtagagcacgccgatcgcgatcgccgcgatggtgtccccggggatgccgaacagcagcgaaggcacccagcccgaggcgatgctggcgttgttgctggcgccggcctcgaccaggccctcgacatggccggtgccgaacttctccggctcctttgagaaccgcttcgacatcgcgtaggagacccaggcggccatgtcggcgccggcgcccggcagcacgccgatgatgatgccgacgatgttcccgcgcgtcatctgccagtgatacagcttcgtgagcctccattggccggccaggatgcttccgaattttcgtcgcggcagcggtggcggctcgggcgccagcattgcgcgcatcacctgcgcgactgcaaacaccccgaccagcgccgggatcggctcgatgccgccgaacagatcggtcaggccgaaggtgaagcgcggaatgccgccgggattctcgatgccgatgcaggccacgagcaagccgatgaacatgccggcaatcgccttcaccggcgaggagcgcgccaccagggtggcgcacatcaggccgagcagcgccagccagaaatattcgaaggtcgagaacgacagcgcgatctcggcgagcggcggcgccaggatcatcagcgacagcacgccggcgatgccgccgaccgcggagaaccagacaccggcgcctagcgcgagctcggcctggcccttgcgcgtcatggcataggcctcgtctgcataggcggcagaagcgggcgtgccggggatgcggagcagcgcgccgggaatgtcgccggagaagatcgccatcgacgaggctgccacgatggttgcgatcgccgcaatcggggacaggtagaaggtgacggggacgagcagggcggtcgccatcgtcgccgacaggcccggcagcgagccgatcaccagcccgtacaccgaggccgcgaatatggagatgatgacctcccaggtggagatcagcgcgaacgcatcaatcagggtcttcaacatcaatcaccagggcgtcggcagcaggccggccggcagcggcacgcgcagcagcttgccgaagatgaggtggatggcgaagggcgagagcgccgcgagcggcagcgccagcttccatttcgccccgagcgcggtcgacgtgatgtagacaatgattgccgcggtgatgatgaaaccgagccggtccgcggcaaagacgtagaacagcagcaacgctggcggcaacaacgcgcgcaggccgtagagcttgccttgcggcggcggtgcggccgcctggccgtcctcgaacgggaccaactcttcctcctcttcgaaggaatggccaatgccgaacgcgatcgcgagcccacacagtgcaagaccgcagccgatcaccagtggaaatacgttcgggccgaccggctggcccggcaccggcggcaagatgtagccgccataggcggcggccacgccgagcacgacgagaaacgatcccgtgacggagtcgggaagacgcatgagaaaagtcctgtcagaattctggcaagcgcactcgctcttcccgccggcggggaggggcgatcagagcgtcgcgatgccagatcacgccttgctcaggcccgccgccttcatcgcctcgcccatctgggcatcgcccttgtccatgaagccggcgaaatgagcggcatcgccccatacggtgccaaagccgcgattgctcatgaagtctttgtactcggcggaatcgtagaccttcttcagcgccgctgtgagcttggttgcaatctccggcggcaggttctttggcccggcaatgccgcgccaggcgcccgtcgcgtagtcgatgcccatcgcctccttcagtgtcggcacgtccttgaagatcgggttgcgggccggtgccatgatggcgaggctcctggctttgccggcctcgatgatggcgcgcgcctcgggcaccgaacatgtggtgaggtcgaggccgccggcggcgaggtcctgcatcgcgggtgccgcgccgttcgagggcacccaagccacttgattggcgggcagacccatcgcctgcatccagccgaccagggccagatgccagatgccgccctggccggtgcccgacgccttgaacttgccgggaggcgccgccttgatggcgtcggcaagttccttgaccgtcttgtacggcgaggaggaggagacctggatgcccggcgggtcctcgttcatgagggccagcggggtgtagctcttgggcgtcaagtccgtgaggccctgccagtgcatcatcgagatttcgacggtgagcatgccgatggtgtagccgtcgggctgggcggtcgcgatcgcgctatggccgaccacgccggaaccgccggtgcggttgaccacattgaagggctgaccgagatccttttcgagcagcgctgcgacaatgcgcgcggtggcgtcggtgcctccgccggcgccccagggcacgatcaccgtgaccggccgggccggataggcctgtgcgagcgcaggcttgaagccgaaagcggcggatgccgcgacggcggccgaggaagccgcaaaggtgcggcgcgaaatcttggacatttgaatgcctcccagcggcgcccgtgatgccgggcgctcttgtcgatggcgtcattctagtcggctttgcagagccgccgcaagatagcgctaccaacgagatcgcgtgctgcatgtgaaagttgggcatccaacccggccttcggaaaccgggtgggttttgcccgcgcaagaaaccaaactcggtgcgtaaccgaaaccaaaggcaagccaccgatgacccaagcctatttcagcgccgtgctggaccacccgctggaccaagtctggtcgctgatccgcgacttcaacaattatcccgcctatatcgacggcgtgagcgagagcgtcatcgaggacgacaagcgcggcgacgaagtgggtgcgatcaggcgcttctgttatctcggaagctggattcgccagcgccttgtcgatcactcggaccggcagcatagcttgacctatgccggtctcgaagcgctgccatatccggaaaacgacggcggccggagtccggcgccggtgcgttaccaaggcaccatgcgcctgcgcccgatcattgccggcgatcgcaccttgatcgaatggtcggtcgccctcgataccgaacccgcggatgccgatcgctggcaggcgttgtttgcctcctggattcccgattggacggactcgctggcgcggagactggctcggacgcgcccgcgatccagctagccatcgttcatcgcccgtccgcgtcacccttcgggcgcctgccgccgaagatgcgggtgccttccgcggtgagataaggcttcagcgtctcccacggcacgaacgcgacatattcgccttcggcgtaggatccgacagcatagggtgggtagtggaaggtcaggccggagcttttgccagcttcggtcgaaggcgccagcgtcaccgcgccgatcttgagcaggctcggcgcgacctccttgaaccactcgtcagtcgcggtctcgctggtgccccgcttttccttttcggccttgagcgaggcaattacggccttcaccatcgccttcatggtggctccgttgtccgctgtctcggcaaagaacgggcggatggagatgcgcttgttgtcggccttgtcccacagaatggtgttcacgtcggaattgggatgcgcgccgcgcgtgttcatgtggtcgttgcggaggacgctgatgtagcggtcggcaacgacggagcggatttcatatttgcgctcgaagtcccagccaccgtccttgaagaactgcggatcctccttgcgcgaggctgctgcctcggccgcactcttgtcgagccatttcctgccttcggcgaggcaattcgctgcgagcgccgcatccgccttgatcctgtcgtcgaggaaaacccgcgcctcgatgctcctggtcttgacgacgtcggcgggtttgggatcggcggcgtgggcggagccggagagcgcgcagcaaacggcggctgcagcgacggcgcgcatgaacgttggcgcgggaaacatgacgcaaatccttcttgccggacgctcgagggcgacggctactccgccgcctcgctatggccgagccgggcattcagcttgcggatcaactcctccgccgcgtcagcgatgacggtccctggtgggaagatggcctcggctcctgcggcataaagcgcgtcgtaatcctgcggcggcaccacgccgccgacgatgatcatgatgtcgtcgcggccctgcttcttcagcgcggccttcaattccggcacggcggtgagatgggcggcggcgagggaggagacgccgagaatgtggacatcgttctcgaccgcctgccgcgcggcttcatcggcggtggcaaacagcggcccgatgtcgacgtcgaagccgatatcggcgaaagccgacgcaatcaccttctgtccgcggtcgtggccgtcctggccgatcttggcgaccaggatgcgcgggcgacgaccctcggcctcctcgaaggcatcgatcagcgcctgaaccttctcgacctggttgcccatgctggacgcctcccgcttgtagacgcctgtgatggatttgatttcggcgcggtggcggccgaacactttctccaatgcgtcagagatttcgccgacggtcgccttcgcgcgtgctgcgtcgatcgcaagcgcgagcaggttgccgttgccttcgccggccgagcgcgtcagcgcggcgagcgcggcgtcgacgtccttctggttgcgctcggacttgagccgcttgagcttgtcgatctgaagccggcggacattggtgttgtcgaccttcaggatctcgatcgggacctcgtcggtcggcttgtatttgttgacgccgatcaccgcctgcctgccggcgtcgatgcgcgcctgggtctttgccgaggcctcctcgatgcgcagcttcggcacgccggcctcgatggccttcgccatgccgccgagttcctcgacctcctggatgtggccccaggccttggcggcgaggtcgcgcgtcagccgctcgacataataggagccgccccagggatcgatgacgcgggtggtgccgctctcctgctgcaggaagagctgggtgttgcgggcgatgcgcgcggagaagtcggtcggcagcgccagtgcctcgtcgagtgcgttggtgtgcagcgactgggtgtggccctgcgtcgccgccatggcctcaactgtcgtgcgcatgacgttgttgaagacgtcctgcgcggtcagcgaccagcccgaggtctgcgaatgcgtgcgcagcgagagcgagcgcgggtccttcggattaaacggcttgagcagcttcgcccagagcaggcgcgcggcgcgcagcttggcgacctccatgaagaagttcatgccgatcgcccagaagaacgacagccgcggcgcgaagcgatccacgtccaagccggcggcaaggccggctcgcaaatattcgacgccgtcggcgagcgtgtaggcaagctccaggtcctgcgtcgcgccggcctcctgcatatgatagccggagatcgagatcgaattgtacttcggcatcttctgcgaggtgtaggcgaagatgtccgagatgatccgcatcgagggcgcaggcggatagatgtaggtgtttcgcaccatgaactctttcagaatgtcgttctgaatggtgcctgagagcttttccggcggcacgccctgttcctcggcggcggcgacgtagagcgcgaggatcggcagcaccgcgccgttcatggtcatggacacgctcatctggtcgagcgggatcccagcgaacagcgtgcgcatgtcgtagatggaatcgatggcgacgccggccatgccgacgtcaccgccgacacgcggatggtcgctgtcatagccgcgatgggtggcgagatcgaaggcgaccgaaaggcctttctggcccgccgcgagattgcggcggtagaaagcgttggaatcctcggccgtggggaagccggcatattgcctgatcgtccagggctggttgacatacatggtcgggtaggggccgcgcagatagggcgcgatgccgggatacgtttcgagaaaatcgagtccggcgagatcggcctcgccataggcaggcttcaccagaatgccctccggcgtcagccagggctcggcgtttccgatggggacggccgtggcagctcgctcgaaagcgacatcggcgaaattgggaatgcggctcatggcttcaaccatatcatagggcgctcaatcatggtccggatgctgatggctgacgatggtcgccatcttctccggtccgtaattctgctgtgtggtctggctcggcagattggcgatgccgaccacccagccgaggcgggattcggtgccgaactgccgcgtcggcaccacgcggtcaggccggtcgaaggcgccggtcatgatctcgatgcggtcgccgtcgatgcggccgaagctcagtggcgtgccgcaggcagggcagaagccgcgttcggcgatcgtggaggagcggaagaacgagggctgtcctctggtccaggcaaaatcgttcttgttgatgtcggcaaaggaggcgaatggcgcaccggccgccttctggcacatccggcagtgacagattgaaatcctggtcggcgccgtcatgactgcaaagcgcacggcgccgcattggcagccgccggtgagaacgggtttgctggtttcggtcatgcctgctccatccgttggtaggcgtcctgcagcgtggcaagcgcatcgcctccggcgaagacataacccgtgacgccggcggcccgcagcgccgcctcggcatctgtcgggcggcccgccaggtagatatgtctgctgcctgcggtttgcagggcgcaggcggcaggttccgcctgatcggcgtagaccttgtcgctggaacagaggcaggcaagctgcgcgcccgaggccttgaaagcggctgccagtttggccggatcggcaaaaccctcgctgtccaccgcctgaatgccgccggcttcgaagaggctcttggcgaaggtcgcgcgcgccgtgaagtcggccggcgtgccgagattggccaggaacacctttggccgcgcgccccgcgccttcaacgccgcgtcggatttgtcgcgcagcgcctcgaacggttccgcgagccggatcggcggcagcgcatcgaacttgtacttctgctcgccgtagggggcgagcgtgaccggtgtcgcttccaggatggtggcttcactctcttgcagatttggaaactcgctggcgccggtcagcacgtcgcggcgttttgcgatgttggcgtcccgggcctttcgcgcggccgccaccttgctctggaacacgccctgctgaagcgccgcgaaggcgccgccggccgtctcgctctcctggaacagtgtccaggcggcgtcgcacagctgcgccgtcagcgtctcgatgccgcctgcgcctgccgccgggtcactgaccttggcaaggttgctttcttccagcagcagaagttgcgtattgcgcgccacgcgccgcgcgaacggatcaggcaggccgagcgccagagtgtgcggcagcacggtgatcgcattggcgccggcgagcccggcggcgaatgtcgcgatggtcgcgcgcagcatgttcacgtaagggtcgcgctgcgtcagcatgcgccaggccgtatcggcggcaatgaacagcggcttgggcgtgagcccgcaggcttgctcgatgcgcgcccacagcagccgaagcgcgcggagtttagccatcgtgaggaattggtcggcatcggcggcgagccgcgcataaaccatgccctgcgcctgctcgagcggaatgccggcgccttcgatcgcacgcagataagcaaccccgcaggcgagcacgaaggcgagttcctgcacctcggagcccccggcatcatggatcacgcgcccgtcggcggacgcgaacggtccgtcaaagccgagcgcggcaaggcccttgatcgcatcggtgacggcgggggcgatctcatcccacgtgtaggggctgtggccccacaccgccgcggccgcgaacgggtcgaagccgaagcggatgttgcaggccgcgggatcgagccccttgctcttcacatattccgcgacatggatcgcggccatccgcgattgcggtccgatctcgagctcgaggccaatgccggcatcgagatgaacgtccttcagaacctttgcgatcgcctcggccgagggttccaggccgaaaccgcgcgcagcattggcgccggcgaacaccagcgcgagcccggtcgcgccgttctccagatcctgcaacgcttgcgcattcgcgagcgccgcatcgggatggtcgatccgctggatgatttgccaggcagcggcggccggtcgccccacgacgggagcgacgcccttggcgcgcggatagagcggatcgatcttgatgccgtcataggtcttgccgaccagcttctcgaatggcgcgcccttcagcacgccgtcaacgagcttgcgccagtcctcaacggtggccttgggaaaatccgccgccagcggcaggtcgtcagtcacggaggtcatgcggcgaggggctcccaaacgtctcgttgttcgcgggcgaaattgccacggcaggccgtccctgcaaacggttgtttttggttaaccggtatccggaagctgctcaatgccttgcgccgagacgctggcgaggccgtcacgcacacgaatgcccgagatgacgcggtccgccgcgatttcggccagcggcacgagcacgaaggcgcgctcgaacaggcgcggatgcggcagcgtcaggtcgggcttctgcaagctgacatcgtcataggcgatcatgtcgagatcgagcgtacgcggcccccagcgccgctccttgtcccgcgtgcggccgaacttctgctcgactttctgaagcacgaacagtagcgcgtgtggatcgagaccggtctcgatctcgatgcaggcattgatgaaggactcctgctcggcgtcgccccagggcggggtggcatagtccgaggagcgcgcgatcagagcgacttgcgccatgccgcagatgtgggcgatcgccttctggaacgtcgcgcggacatcgccgacattaccgcccagcgcgatcagcacgcttgccatggtcagggatgccgcgcgcgtgtcagcatgacgccgacatcgtcgaaaatcgcggcgatcggcgcatgcggcttgtgcaccgtgatcttcacggcgcggatgcgcgggaaatttgacaggatggcatcggccaccgcgcccgccgcgcgctccaggagcttgtaattggtgttcttgaacgccgcagtggtcgtcgccacgacgtcggcgtaggacaccgtgtccgcgagccggtcgctgcgcgacggctccgacaggtcggtatggagttcgagatcgatgacgaaacgctgcccgacttccgtctcatgatccatcacgccatggcgggcatggatcgacaggcctttgacgaagatcgtatcggtcatggcttgctctcgatggcatgcgccacccgcagcgcctgcagggtttcgccgacgtcatgggtccggatgatcttggcgccgcgctgcgcggcgatcagatgtgccgcgatcgaaccggcgagccgctccggcggttccgacggcgacaccgaggcgatgaagcgcttgcgcgaggcgccgaccaggatgggcaggccgaaagtgtcgagttcgcgcaagcgcgccagcgcggtcatgctctgctcggcggtcttgccgaagccgatgccgggatcgagcacgatcttgtcacgcgcgatgccggcctgtgcggcgatagcgagcgagcgatcgaagaatgtcttcatgtccgcgacgatgtcgatggcgggatcgacgctgtcgcggttgtgcatgacgatgacggggacgccccttgcggcgatcagcggcgccatctcggcgtcgcgttgcaggccccagacgtcgttggcgatggccgcgccctggtcgagcgcaaacgccaccacctcggccttcatgctgtcgatcgagacgggcacaccgagtgccgccacgccggatagcaccggcttcaatcgcgccagttcgtcttctgcggtgaccggccgggcgcccttgtacggtcgggtggactccgcgccgacatcgatgatgtcggcgccggcatcgatcatggcccgggcccgtgcgagagcctgctcgggcgcgatgaacttgccgccgtcggagaaggagtcgggggtgatgttgagcacgcccatcaccgcaggaagcggtcgttcgagcagcgtccgcagcacatctaaccctgccgagccggccggcgggacggaaggagagggcgaggcattcatgcggcccgctttgcgcggtcgggcagggggagtcaagacgggagtggaggccgttcggccgtggccggacgttcccgcgggatgcggagaaggaacgcacggccgttggacaagatgggatcggaacaaccccgctaacgcatgatgggctgaggcttgctcgcagggacggaggtgcactccctctcccggcgctttgcaccgacctctcccgcaggcgggagagctgaaccacccgcggcgatcgattcaacgtaaagccattccgcgctagtacgtgatcttcggcggcagcttcttggccttcgcgatgatgtcgccgaccgacttctcggaggggaggacacggacgagcttctttttctcgttggcctcgcgcatgctctgcgccaacctcgctggatttcgataggcgagttcgcgcacggtggtgacgcctgcggcgcggaccaggccgaccttggccttgcccatgccggggatgcgcatgtagtcggagacgttggcccattccagcaattgctgctcgctgatgccggtcttggcggaaagcgccttgcggcccttcacggtggaggccgcctcgagcagcgcatcggtggtgcggattccttgcgccttcagcttggtggcggcaaaggccggcaggccctcaatctctgagatcggatatgtcatgatactcgatgtgaaaagcgtcgctcaggcgaactggctgaggcccggcgtccccgcgatgatcttgcccatctgatccgctccgattttgtctcggccgtagcggaaaagttcacgggcgactttctgaatgtcggacatgccaaggcccaggcccatcaggcgcgtgccgaccgccatcaagccgccgcccatcagccgcgacaggccgccgccgctcctggacgcctcgatcgcagcttccgctccggggatctggtcgatcagggcctgcacgctgtcggaagggccctcgctgcggaggaagcccaggataatgccgacggtcttttcggccacagcaccatctatgctggcgtttgtcgccagccgtccgatcagttcgtccataaggcccgcccctcaccggtttacatgccggagttttacttcgaagatgatcttgagccggtgcaatgtgaaattcaagcgatgaacgcacgcaccgcgcgattcatcttcgaacgcgcgaaaagtgttgcagccgtgcaagaggcgagatcgaatcggcgaaaaattgccgcgttgcgaacgcgttggtcctactttcggctgatgtcgtccgctcgtgtccggcgatctcgcatccttgggccgcgttggacggtttaaattggtgcccgatatgcgctaaactgcggaactggagcatccgagtttcaataggcgagctcggcagagagatcagagagaataatgaccgcacaggacagcaagctcggcgataccgacgacaagatcttcgtcggcaagggagacgagcaggcttggctgacgctggcgctcgccaatcgccacggcctcgtcacgggtgcaaccggaaccggcaagaccgtgtcgctgcaagtgatggcggaaggatttgcgcgcgccggtgttccggtcttcgctgcggatatcaagggcgacctctccggcatctgtcagatcggcgaagcaaaggacttcatcctcaagcgcgccaccgaaatgggactgaggtttcagccggatcaattctcgaccgtgttctgggacgtgttcggagagcagggccaccccgtgcgcgcgaccgtcacggaaatggggccgctcctgctcgcgcgcatgctcgacctcaatgatgtgcaggaaggcgttctcaacgtcgccttccgcgtcgccgacgacaacggcctcaccttgatcgacatgaaggatctgcgtgcgctgctcgatgccatcgtgccgggcagcggaaagaagggtgcggacgctgaggaggatccgctcgaaccgatccgcaaggccgctcaggggttcggcaacgtcaccaaggcgaccgtcggtaccatccagcgccagctcctcgtgctggagaaccagggtggcaccaagttcttcggcgagccggcgttgatgctgaaggacttcatgaggaccgaccgcgacggccgcggcatggtcaacatcctggtcgcagacaagctgctccagaaccccaggctttacgcgacattcctgctctggatgttgtcggagctcttcgaggagctgcccgaagccggcgatctggccaagccgaagctggtgttcttcttcgacgaggcgcacctgttgttcaacgatgcgcccaaggcgctcttggacaagatcgagcaggtggtccgcctgatccgctccaagggcgtcggagtctacttcgtgacgcaaaacccgatcgatgtgcccgaccgcgtgctcggacaattgggcaaccgggtgcagcacgcgttgcgcgccttcaccccgcgcgaccagaaggccgtcgccgctgcggcgcagaccttccggcccaatccgaagctcgacactgccaaggtgatcacggagcttggcaagggcgaggcgctggtgtccttcctcgagggcaacggcacgccgtcgatggtcgagcgggtgatgatccggccgccgtcggcccgcatcggaacgatcacgccggacgagcgtcaggcgatcatggctgcaagtccggtgaagggcagatatgacagcgccgtcgattccgagtccgcctacgagatgctccagcagcgcatcgccgccacggcggccacggcgaatggtccggcaggcgggggcggcggtatcctgggtcagatcggctcgatcgtcggcaccatcttcggcaccaacgtcaagcgcggccgtctttcgaccggccaggtcattgcgcgggacgtgacgcgatcggtcaccaaccaggtgatcggcgggatggctgccaacatcggcaagtcggtcggcggccagctcggcggctcgatcggccgcacgctggtccgcggtgcgcttggcggattgctgcggcgaagctgagaggccgctagagccggcgctcgacccgtggcagccggctgctttcggcgcactcacaggccgcgtcaggggtcctccggcgttcgctggtctgctgcgtcgtgtcgtgactggtcctggcgcggcgccggcgttaaaagcgcagacatatcgagaccccgcaatcaggaacacgccaatgtccaacacgcagctccaatccgtgctcgaccacatcgacaaggatttcgacaacagtctggagcgcctgttcgccttgttgcggatcaagtcgatctcggccgacccggccttcgcggacgattgcaaggctgcggccgagcatctcgccaaggacattgccagcctcggtgtagccgccgaggtacggccgaccgcgggccatcccgccgtagtcggcaagaccggagcgggcgggcggccgcacgtgctgttttacggccattacgacgttcagccggttgatccgctcgatctgtggcaccgtccgccgttcgagcccgccgtcgcggatcatgccgatggccgcaagatcatcgtcgcgcgcggcgctgaggacgacaaggggcaggtgatgacgttcgtcgaggcttgccgcgcctggaagaaggtcacgggctcgctgccgatcgacgtcactttcctgatcgagggcgaggaggaggtcggctcgaagaacttcgtgcctttcatcgaagccaacaaggacgaattcaaagcagactacgtgctggtctgcgacaccggcatgtgggatcccagcacgccggcgatcacgacttcgctgcgtggcctgctttacgaggagctgaagattaccgctgccaatcgcgacttgcattccggcgtgttcggcggcaccgcgatgaacccgatccgggtgcttacgaagattctcggcggcctgttcgacgatgacaaccgtatcaccattccaggcttctatgatggagtgaaggacacgcccgctgacatcctggcacagtggaagaagctcgaattcacgcccgacacgttcctcaagcccgtcggcttgtcgcttcccgccggcgagaagggccggctcctgatcgagcaggcgtccacgcgtccgacctgcgacgtcaacgggatttggggcggctatatcggcgagggctccaagacggtgatcccctcgcatgcctcggcgaaggtctcgttccgcctcgtgcagggccaggacccgcagaagatccgcaaggccttccgcgattatgtgacttcgcggattcccggcgactgcaaggtcgagttcggcgaccattccgccgcgcccgctgtcgccctcgactggagcatgaagccgctcgccgccgccagcaaggcactgacggaggaatggggcaaggagacggtgctgatgggctcaggtgcgtcgatcccgatcgtcgccgacttcaagcgcacgttgggcctcgactcgctgctggtgggttttggtctcgacgatgacaatatccattcaccgaacgagaaatacgacctgcggagcttccagaagggcatccgctcctgggcccgcattctcgcggcgctcgcggaggtgaagtaagaggtcggcatcagcggcgtcattgccgggcttgacccggcaatccatcaggccagatcattctgcaatggatgcgcgggtcaagcccgcgcacgacgagcggattggctgccagataaaaacgccgcccgggattgggcggcgtttcattccaaaaggcgtagaggttcgttggagctattctacaccaggtcacggatatctcaagacctgtagccggggttgacgcggtcgagcttgcgcagcaagggcggccataccaggttggtcgcgcgcagctcggcgcggtcgcggttcgacagcaattcggtgttcttgtcgatcgcggtgccatcgaccgggtagaccggcgtgcccagcgcgcgggtgcgcacctgcatcgagcaggcgcgctcgagatgatacatgcgttcgaaagcggaggcgaccgagcggccgaccgtgagggtgccgtggttgcgcaggagcatgtggttgtggtcgccgagatccttctggagccgcggccgctcgtcgtgatcgagcgcgatgccttcatagtcgtgataggcgaggtcgtgggtgaccagttgcgcggtctggttcagcggcaacaggccctccgcgctgctcgacaccgcggtgccgtcgagggtgtggagatgcagcacgcagatggcgtcctcacgcacctcgtgaatcgccgaatggatggtgaagccggccgggttgatgctgtattcgctctcggagagctggttgccgtgcaggtcgaccttgacgaggctggaagcagtgatctcctcgaacatcagcccgtagggattgatcaggaagtgatgctcggggccgggcacgcgcgcggagatgtgggtgtcgaccagatcgtcccagccgtacagcgcgacgaggcgatagcaggcggcgaggttgacccgttgctgccactccgcctccgtcatgttggacggcacttccctcagacgggcttctgctggcgacatggctggtctctccgaacttcgttgttgcggagcgaagcgtagtcttggtcgaagtttgcggcaaggcgcggggagcttggctgtcgcgcgcagcccgcatgcttgtccgccgtagctcgaagagtgaaggcggaagcgatacggcccggagaaaactgctacggcgccgggatcgacaggaggctggaaatgctgcggccgcggatgtcatagacgcgggcgaacaccacgtcgtcgcgcttgatctcgaccatgacgggcgccgtgaggcccttgcagtagaactcgccgagcgtcatggcgaaatcggccgcgttggagtcccagccgatggtgaagtcggggccgagcgcgacctgggccgggcgctgcggaccgcagaccgcgactttccatttgcgactgctgggcggcacttcctggcgctcgacgagctgttcgcgcagttcgtcggaggcctgcttcagcgcgaggccccaatagtccagcatgaaacggttgtccgcgccgcggacggtgcctgcgatgtgattgaagtgggtgtactgataagggtgcagccggatcatctcggcgagcgggagcgccaggccgaagcagaaggtcgcgagtacgaccggctgccatgtgcggtgattggcgcgcaggcgctccatcgtccaggcgaaggcgacacccccgagcacagccatcggcgggatcacgaagacgaaatggcgaatgccgttgtagagcgccggccgcttcaccatggcgatcacgagcggcagggtcgcggcgagcgtcagcatcaggaggatggtcttgcgccgcgcggggaccttgcggtgcaggagcatggcgaaggtgccgactacggcgcccgccatcagcaccagcatcacctcgggcaactggagtgcgaacagcgtgggcagataggaccagggcatgtcgggcacggacacgatcgcgccgtcgaacatctccttccagggtttctcgaaaaagtgcgagaagtaggtcagcgcctcgaaaggattggcgggctccatgatcgaccacggccagatcagccccattacgaggtagccgagcacgaggccgggcagcagcacgtagatgacatgggcgaagcggcggacagactcgcgaaagccctcgttgcgcaattcctcaaggaacagcggtatgaagccaatgatggcgtagacaagcgcgagcccgccgagaacgcggcaaccgagcgacaggcctgcgcccaagccgacgatcaggatcgtgcgcggcgatggctgcggatactcctcggcgaggcggacgagccccagcatcaggatgatcatggacaccgcgaagggcgcatccttcgggttcatgaacatgtggccatagaagatcgggcagagcgcgagcagcaggagagaggccagaccggcaaggggacccccgatccggcggccgagccgccacgtcacggcaagcccgatcacgccgacgatggcgccgaccaggcgtcgcgtctcgaacaactcgagtgggatgaccttgtggagcagggccgcgaccatgtcgaagccgccgccatacatgtagagattggcgaaggagagcgccgcggtatccttgaagccggaaccgaacatgcgcagcagcaagtccgcatattcagcgtgggtgtaatcgtcccagccgagcccgtagtctcggaaggtcaggcctgcaatgacggcaaccgcagccagcaccagcatggcgagatcgtcgcaagtccgttcgaccgagcgccgcaggggcgtctcgatcgccgaggtcgtgatcgatgtcatggctatcggtgccccggaatcccctctaggcccaactggtgcgcgcgggcctgctccccggattccctatagcgcagttccattaccaagtaattggccattatggctaaattcctgatgcgatgcagcaattccgcctgcctgagagcagccatagcagtagtgagccggagctgaagggaatgtgaataagtccctgatttccttccccttgggaacacggccctcaattcgccgttggcgtggaacatcgtatgacggtatcgtggcgtagcggttgtcgcgtgtggatgcgcggcccccgggggtgagttcgatgaacttggcattgttgatcgtggggatttgcgccgtcctggcgggtctccttgcgatcatttccggcctgaccatcagggaattcagcctcggcgggaccctcataatcgccggcaccattggcgtctgctccggaatgttactggtcggcatgcatctggtgctgctcgagctgaagggtatcgcgcgccggctggctggtgcgatcgcgccgtccgaggttcgggtcaggcccgtgctgcccggcctggccctgcctgacggcctcgcgcccgagccggtcgctgctgcgaggggcgagcctgcgccgccgccggcaagcccgccaccctggcagagcgaagctgctgcgcgcgagcggccgcgcgccgagggaccgcaggagccggaagccgctacgccgcccgccgcgcctgaagcgccgcgtcggcgcaacctgctgttcgcctcgacctcacgcaaggagcgtgagcgcgcagagacgaaaggcactgaaagtgcgctgccgcccgaggagtcgagcggagccgctgacagtccgcccgcgagctttgatgttgcctggccgaagccggaccgcacacgcccgccggagccgccaggcggctcgcgccgcccgccgccgcgctcgccttcgacctttgcggaagccgccccgactcctgcgcccgaaccgccgccgcctgtcgagcccgcacccgtgacggtcctcaaatccggcgtcgtcgacggcatggcctattcactttattccgacggctcgatcgaggcgcagatgccggaagggatgatgcgatttgcctcgatcgacgaactccgcgcccatctcgatcagcgcggttgaggtcgcccggctcaagtagagcaacgccgttcccagtaatcacggcatcgtcgtcagttgtcctgtttcagcccaatgtattcttgacacggaatactttggcatcgtcaatccggtgagacgcaggccggagaagggatggatgcatgtcggacgcgggagcgaagaatttcatcgagctgaccgcgagcatcgtgtcggcctatctcagcaacaatccgacgcccgcgaccgagattccgaacctgatcagccaggtgcatggcgcgctggtgcgggtgtcgtcaggccgtaccgagaccgcgccgctagagccggccaagccggccgtctcgctgaagaagtcgatcgcgcccgactatctggtctgtttggaggacggcaagcgcttcaagtcgctgaagcgccatctgcgcacgcagtacaacatgacgccggagcaataccgcgagaaatggggcctgcccgccgactacccgatggtcgccccgaactatgcggtggcgcgctcgcagctggccaagcagatgggtttggggcagcagcagcggaagcggaagtaaatttctacgacgcttccgcgagtgcctctttcgcgtcggtcttgatgcgctcgaccatcgagcgcaggccgttggagcgctgcggcgtcagatgatcgcggaaaccgaactcgttgaacaccgcgatcgcatcggtatcgaggatttgctgcggcgttcggcccgaatagagcgcgagcacgatcgcgaccagcccgcgcacgatatgggcgtcgctgtcgccgcgatatttcagggttagttcgccgttgctgcggtcgaccagcttctgcagccagacttggctgacgcagccctgcaccttgttggcggcggagtgttccgcctccgacatcggttccagggtgcggccgagttcgatgacataccgatagcggtcgtcccactcgtcaagaagctcgaaattgtccctgatttcgtcgattgtcgtcatgctggccaatagttccattccagccaatatagggacgcggagccgtgaaatcgatagggttgggtgctaattcgcagcttcgggtccgcgccattccagcgcgaggtcgtcctggctgagggtgtcgcgcggcgcctcgctcgcagcaatgtcgccttcgccggccatcgcgattgagccggtatggtcgggcgccttcttgtcggtcttctcgttcttctcgttcgtgatctgctctttcttgtcgttgatgatctggtagatcttcttcgcgccgtcctgggctcgctggccgatgatggtcgcggcctgtccgccgacctcgcaggccgccggctggcgcttgcagaactgggtcatgtcggagacggccgcggtcgcagcctgcaccgcgtcggcggcgccgatctgcggcagcttctccgattcgggcgtcttgtcccgcggcaggagcacaagcaccagcccgagccagaatgtgatgcgaagcagaaagcgcatcctgcgacctgtctgttagagtccgcccgcggcgatctcccgcggaggccggacctagcaagcctcgataaatcgcaagtgattgccttgagcttaattcgcggaaaatttacgcagaattcttcgcaatcggcggtgtcgtaaattttcgattgacgttcgcgcccgtgatttgccgtggcagccccgcatccaccaattcgaaaccatgcgcggcgaggtgaaaccctgtgttcaccatccctaatgaagacatctccaaatcgtctaaaaagctacgcgatggggcgatgtccggccacatgcggtggcgccttagcactcgtttaaggtcgctctgacacggtggctcaacgacaaggaggcgttccggcgcgtcttccaagagacgattgagtcgaagcgcgagacccgtgacagttttgagtatcatccgcgattgtctcgatgcgctgctgcatccctccgcgcgctacgatgcgctgatgcgagcgcgccatcgtgccttcatggcgccgcggctgctcggcagcctcgcagccttcgccgcattcccgctctatctcgccatgcgcggcgcacccggtgcgatcgaggtcgccgcctttgcctggctgatcgcgccaatcacgctgtcctggttcttgtcgcgcaccggccgctttgagggcgcgcatgtgctgtcttcgctggcgctcgccggcctgatcatggcggttgcggtcacgacgggcggcatcgaatcattcgccgcggtctggctcatcgtggttcccctcgaagctgcgctgtcggcctcgcgtcgcgtcgttgcctttgcctcggtgctcgcgctgtcctgcgccggcatgctgatcctgatcagccaattcggctggctgccggtggccgagccgagcgctgccgagcgcgccgtgctgatggccttcggcgttgcgtctgcaaccttttatgccgcgggcctcgcctttggcgcggagtcgctcgcgcgcaccggagtggcgctcttgtcacgcgaggaagagcgttaccgcctgctggcgcggaacatgagcgatgtgatctcgcgccatcagcgcagcggcgcggtacagttcatctcgccggcggcggagtccatgctcggcacgcaggtggcagggctgctcggccacggcctcttcgaccgcgtccatgtcgccgatcggccggcctatctcacggctctgtccgacgcggcacgcggcgacgtgcgcagcgtcgagttccggctgcggcgggagcctggcgactccgagcgcggtcaggtcgatttcatctgggtcgagatgcgctgccgcccgctcgaacgggatccgggccgtcagggtatcggtcgtgattccacccacgaggccgaggtcgtcgccgtgatgcgcgacgtcaccgatcggaagcttttcgagcaggcactggatcaggcgcgcagcgcggcggaagctgccgatgccgccaagacgcgtttcctcgccaccatgagccacgagctgcgcacgccgctcaatnnnnnnnnnngatcgcgcaggagcaggccctgatgctgggcgcggcccagcgcaaggaatacgctcagctcatcaacgattccgggcagcatctgctctcggtcgtcaacggcatcctggacatgtcgaagatggaatcgggaaatttcgagattgcatcggagccgttcgcgccgcgcgcctcgctgctccattgctgcaatctgctggcgctgaaggcgcgggaaagcggtatcgacctcgtcaccgacgcgccgcaggacctgccgatcatgaccggggatcccagggccttcaagcaaatcgtgctcaaccttgtcgccaatgccatcaaattcaccgagcgcggcggtcaggttcacgtggcagctgcggtttccggttcgcagctgacgctatgcatcagcgataccggggtcggcatcgctcccgacgacctcaaccgcatcggcgcgccgttcttccaggccggcaagacctatcagcgccgtcacgaaggcaccggtctcgggctttcgatcgtgaagagcctcgtggcgttgcatctcggcgaattgacggtacaaagcaggctgggcgagggcactgccgtcaccgtcaagctgccgctcgtctacacgccgccgcaggtcaagcctgccaacgagaagccgagcgagagcaaaatcgcgaccctgacgcctgtgctgcgtcaggaccttcaagatcaaactcaggacgaacccgcaccggtgaagaaaagtgcctaggaagcctgccaaggacgaaaccgctccgcgccgccgtggcgccaaggccgcggtcatcgacgtcgagaccgagcgcaacctcgtgatgcgcgtgctgctgcacagccccaaggatacgctggctggcctcgtcgccgtcggcgcgatcggtgcgatcgttgccaatgcgctgttcctccagaccgggcggcaccccgcgccgatgttcggcacggtgatcaatcttcccgcgccgtcggcggtgccgctgtcgaatccgttgccgcgtccgcggcccgtcggcgccgacacctcaccgctcgagccgcgcgcgaccgagttccgcatcgagcccaaacacgccgaacgtgccgccgagaagccgccggaaaaagccgtcgagacgaccgcggcgacgcgcgcgaatgatccgatggccaatctggtcaaggcgacgacttcgacgccgccctcggctctccgtccgcctgcgccggttccggtgcaaagcccggccgcgcgccgtatcgccggcgtgcagcgcgcgctctcggaatacggctatggcaatctgaagatcacgggcacgatgagtggcgagacgcaatccgcgattcagaaattcgagcgcgagcacaagatgccggtcaccgggcagctgtccgatcggctgctgcgcgaacttgccgctgcgataggccatcccgtcgaatagccgaacgtcaattgtcattgacgcaagtcaattgccggcgtcggcacgacaggcgggatccgctacaatcgcgatttgagtgggatcaatgacggccggcggccgcaggaccatgatggctcatcttatcaaggaagagaggtcatcatgttcaaggtctcgattctcgtctggatcatgctcggcacgacgctggcgggcatcagcctcatcgtggtgctgatggtcccgagcttcgccgccgatgccatcaggaacattccttatgccgtggcggtgggatttgcactcgcaatgccgctgtcatatttcatcgcgacgcagattcgcggtggtcaggacggcacgcggaaggcgtgagacgtacgaggtgaggctggcgtgaggcctcgcgctggcctatcgtcggactcatgcgtttgaaatccaacatttgggtggcggcttacttgcgccgctgccagaccgagggcgtgttcggcgccgtgcggcgtcgtggcgccgaggaggcgggggcggtgttcgtcaaggtgtcgctgctcgacggcaatgcgatgctttatgcaccggcgccgcagaccgtctacgacgacggccggcccgtcgatcgcttcttcgtgccggtcgcgccgcagccactgccggagcaaaccgtcgaggaacggctgacgaaggaaatccgcttcgatccggacgcctggatcgtcgagaccgaggatcgcgccgggcggcatttcctggatttggcgaagacgtagccgctgcttcaccgtcattgcgagcgcagcgaagcaatccaggctccgtccgcggaggggttctggattgcttcgtggcaggagctcctcgcaatgacgagccgagatgccgcgcgcctcacgcttggcagcggccgtgcaaatcagcgctccgaagatccatcggtgccggtgcggcgcggcggtatcgcaccgggctgcatgctctgccgcgtctgacttgctccggcacgggcgcgctggcgttcgccgtcgtgcagaccggcctggtacttcgcccgcgtcacggcaagcgtcgagccgcgccaggctgccagcatcaccagggccgcgcggtcgctgaggcgatcgtagagccgcgacagccggtatacggcgttcacggacgtcccgatctccggcttgaagaacagcaggatgcgctggaagacggggctcggcatgtcgagcgcgcgcgcggcgaccgcgagtgcctcgccgccggcatcgtcgacgatctgggctgcgacgcgcgagggcaggatcaggctgtcgccgagctcgaaagcgaagctctcgacgtcgcccgcgatcgcggccatctccaggatctggatcgcgcgcttggcgcgcacggtcggaatgcggggggcggctttcagcggtgtctgcgcaagattgtgcaggatcagcgcgcgctcggaggcgccggcgcggaagaacatgtcgtggatctcggccgcttccttcggctgcatcgccatgttggcggccatgcgctgctcggcatcggtccgctcgcgcggcggtaagggcgcggccggcggagcgggaatctccctggccaacggcacccggcggccttcttgcgtcgcgaccagcccgagcttctgcagaacggggacgggcgtatgcggatagaccgcgagccgcgccttgacggccgcgcgcgtcgcatcgtcaacctggtcgatcagccgtgtcgcaagctcgacgaactgccgctgctcgtcgtcgctgtgggtgctcgtctggacatacaggtcggtcagcacgcggagcagcgtcggacggacatcgacaccttcgcgacgggagagggtcatcagcccgtcgaatccgggaaacagcgacttggtcatggagacttacgcaactcggaaaagagtacttcccaaggaacttagcgcaggttcttttaaagcctcgttaaggaaaacgaggcgtgaagccggccccgtaatttgagctgttgtcgtgccgcaacgggacggcatgcccgtgccgtgaggctacggtccggccaccgcgtttacaccccgttaaccatgagctgatcttaatgaatgcatgttgcaggggcgcgttcggtcgcgcggcaatcgaagagagctgacatggggaccatcattgaatttccggccggtcgccgggtgggctcgtcgggggatgtcgctccgcgcgcggacaagggaacggtcctgatccttcccgtgatccgtatcgagcgcgaggcggacgaaaccagcggcgaccgcgggccggagcagggcacggcgcccaggcgccgtcgtcgtcgccgctgacatccggctccatgcaatgccggacgccatccgccagatccggcccctcctatcggccgccctgctcgcgctggtaggcgcgttgctcgcggcctgcagcggcggcgatttcggccgcacccgcgagagcatgcgcagcgacgacatgcatcgctggctgggcgcggaggtcacgtccagcgtcggcttgagaccatcgcaattccagctcaccgacgaggagcgccagcttcgcgatctcgcttatcccatgatcgagccgccgctatcccgcccggcgtggaagagcgtgttcggcgactacaaggcgctgccctcgccctggcggcagaaggtcgtattcgaccgaaccatgtacggacgcacgctgatcgacgagccgcaccgctcgcactcctcgcgctatgcacagctgatcgaggacgtgcgcaacgacatcacccgcttcgagccgttcttcggcactgcgatccgtgtcatcgatctcgacaggaagcgtgatgccagcatggcgcgtgtctccgcgctctcgccgcgggagaaggccgacgcggtcgcgcgcatgcaggagaattcgctgatcatccagtgggtgcagcagtgcctggagcagcgtatctcatcctatcgctgggcgctggagcgcctggtgatccaggcgcccgacggcatggccgccgacgccgatcgcctgatcggggaactcgccgcccagaccgccaacccgccggtcgcggcgcagccgccttacggccgggcggtcgtctccaaggggtgacgcgcggctttcgccgcggtccatctgcgcgaccggcctggagccgcgtatccgtgcgtgatcctcggatcgcatgccggccagagccgggccggccccgttgaggcggccgggaacctcattgattgcccttgtccttccccgcggtcgggataggatcagctcgtttcttaaagtcattttcccaaaggtccttcgatgagcttagacgccattggtccgtttaagagccgtccggacgtcacctcgcgccagctgctggcacttgccattctgcttctatcgaccggctccgcggccgcgctgtccagggaggcggcgatcgagaattgccggatgacggtcggcaagccgatcgtgcaggcctgcatgcgctccggcggcgccaatctcgaagcttgccgcgccaaggcttcgccccaggtcagggcctgcgcgatggcggcgctgaacgccgccaatggccgcgccaatgttgccgtcgagcttccaaaggagactgcccccaagcttgaagccggcactgcacttccgaaggacttcgtcgcgccgccgcgcagcattgccgacatcacggcggtactcgacggcgacaagcccgacgagaagatgatcgccgaattgaagtcggacgccgatgccgtacccaccggcaaggaatcccgtcaggacctcgctcagctctacttcgatcgcgccaacgcgcgcgcgcagctcggccggctcggcgaagcgatgtccgacgctgacaaggccgtggaagtcgggcggggcgccgtcaatccgaacttgctgggccggatgctgcagcttcagtccctgcagcacgccgttgccggcgatccgaggcgctcgctcgagatcatgcagaggctcttgcgcgaatcggccagcatgcccggtgccaagggcatgcagttcgtgacgaaccgcgggattgcagctgttctcatccagatgggcgatctctcacaggccgaagcctatctccgccgcagccagaccgcgatccaggaggcccgcaccagcggccatcccaattggcgggcggcctatgcgaagttcggccagagctgggaaggtgaactggagctcgctcgtgccttgatcttcgaggcgcgcggacagtttgccgatgccgaggccgcctaccgcaatgccgagctgcgcaagcgcgcaagcatgaaggcaatcatggactcggacgatccgccggcggagaccattctgctgcaggcgatcgacggggccgtgttgagccaggcgcgcatgaaagcgaagcaggggaggctcgccgaggccgaggtggatgcgcgccgcgcgctgctctcgcgactgaaggacacgggcaagtacaactctgtcacgccgcgtttcgtgatgggcctggcgggcattctggtcgaccagggccgttacgaagaggccgagaagctcggccgcgtcgcgctcgagatcaacaagaccgtgggcgtgccggaggactcgcaggcaacggtgcaattgctgtcgcagctcgccggcattctgacgctccggcgccagaacgccgaagcgagcgagatgtttgcgcggatcgacaaggccgtcgccggatgggatccgcagcgccgtcaggtgttcgagctcaatccgtctcgtatcctgtcgctctatggttccgggcagttggacgcgggcattgccgccgccgagcagctcgtgaagaagcagatcgcccgggtcggggacaatcatttcgacaccgcctcggcgcgcggcacgttggcggtcggattgatgcgcgcccgccgcgatgcagaagccatccgcgagttcaaggccgccatcccggtcatgatggcgagcgccaacgaaaacgccgatgacgagaacacgactgtggtggccgcgcgcagccagcggctgcagaccatcgtcgagagttatctgctgctgctcgggagggaaggagcaggcaaggatatcggcgaagaaacgtttagcctcgccgatgccgtccgcggccgctcggtgcagcaggcgctggcagcctcgagcgcgcgtgcggcggcaaaggatcccgcgctcgccgaactcgtgcgcaaggagcaggatctcaccaagcaggtcaacgcccagctcggcacgctcaacaatgtgctcgcgcttcccgcagcggagcgcgacgaaaaaggcgtccagcagattcaggcctcgatcgggactctgcgcggccagcgcgacaaggcgcggcaggagatcaagcagaaattcccgacctatgccgatctcgtgtcgcccaagccgccgagcgtcgccgagatccgcgcgacgctggccgacgacgaggccatgctgtcgttctatttcggtcagaacggcagctttgtttgggcggtgccgaggtcgggaccggtggtgttcgcgccggtccaggccaagagcggcgacatcgagaccaagatccgcaagctgcgcgaagcgctggagccgcaggccgcgatgatctcggacattccgccgttcgatctcaagctcggccacgagctctacgagctgctgctcaagccggtcgagagcggctggaagccggccaagaacctgatcgtcgtgaccaacggggcgctgggattgctgcctttgtctctgttgccgaccgcaccggcggaggtggcctcggaggaggacccactcttcgtcggttatcgcaacgtgccgtggctggcgcgaacccatgcggtgtcgacggtgccgtcggcggcggcgttgcgcaccctgcggcaattgccgccgggcaagcccggccgcggcgacctcgtggccttcggcgatccctatttcaacagcgaacagcacgccgaggcggaaggcggcggggagaagatccaggtcgccgatgccggcggcaatatcacgcgcggcggtccgctgaagcggcgcaacagtcccaagctcgaaggtgtcgacagcgccgagctcggtctgttgcctcgcctgcccgacaccgccgacgagctaaaatcgatcgcattggccctgcaggcggacccctcgaaggtgctgtttctcggcaagagcgcgaccgagagcgcggtcaagagcatgaacctgtccggcttcaggatattggcctttgccacccatggactggtcccgggcgagctgaacgggttgacgcagccggcgctcgccttgtcgtcgccggcggtgacgggcgagggcggcgacggcctcctgaccatggaggagatactcggtctcaagctcgatgcggactgggttatcctgtcggcctgcaacaccggagccggggccggagcaggggccgaggcagcgtccgggctcgggcgtgcgttcttctatgccggaacgcgcgcgctgctggtgacgaactggtcggtgcattcacagtcggcgcggcagctcgtgaccgacctgttcaagcggcaggccgaggatcccaagctgccgcgcagcgaagcgctgcgccaggcggcgatggcgctcgtcgatggttcgggctatctcaacagcgaaggcaagacagagttcgcctatgcgcatccgctgttctgggcgccgtacacgatcatcggcgatggcggcttacgttgacgatcaaatgagggaaggggggcagggaatgaagcggaatgtcttggtcgggttcgttgccgcatgtctcttggttccggggacgtcgcatgcgattcaattgatcacggaggaggaagccaagctgccgcctccgaaaggcgcggtcgctgcggacaggcgcggcatcttgcgcggtccaaaagtcgaattcgtttcccccggcgcttccgtcagctcaccgatgcagctgatgttgaagttcgagtcgttcggcgggaccaagatcgatccggagtccgtcaagatgatcttcctccggacgccgaacgtcgacctgacccctcggatcaagcccttcgtgaaacccgatggcatcaacatgcaggatgcagagctgccgccaggtgaatacgcggtgcgggtcgacatcaaggacagtgatggccggccgggcacgaccgtcttcacgctgaaggtcgcacccaggtgacatgtccttactgcctttccgagaatatggagggcgcgctggtttgcgcgtcctgcgggcgcgacatcgccgctcccgccacactggttgcggacgcgatgatctcctgcgcaagcgcgaggaactgcgcgacgagctgaagcgggccaggagcgaggtcgaggctttcatgaggcggagaaagtcgctctagcgatggaatgtccgttctgcgccgagacgatcaaggacgaagccatcgcgtgcaagcattgctcgcgggatttacgcgtcgtgcgaccgatgctgctcgaaatcgaagaaatcgttgccgatctggacaagctcaggcgggaccttgatcgggtcaatgtccggctcgagcgctacaacaatccgctgcgctattacgcaacgcatgcggtgctctatgtcggtattccatcgctgctgctggtgatcgcgcatgtgctggtgaccatcacgttcaacgtgtcgccggtcccgcttcggattgcatcgatcgtcataccgctcctgttcggttttctcgcctatccgctgcaccgggtgtccgcgctgacggccctcgtgctggcgttcctggccgcaagtgtcagtatcctcgcgatgctcacggtgacaggagtgcacgatggtgttcccattctcccgacggtctggatcgagtggcgggaggtgttcgaatatggtgccagcatcctgcttgccttcgtctcaggtaacatactcagcgtcgtgatcttccagatcgcaccgcgtgtgctgacccaaggcggcaagccgaacgcgttcgccttccgcgtggcgcgcctgctggggcagcatgtcggcgaagagcaactgcgtcgccgagcccgcctgattcaggatctcatgcagactctggggccgctggccggcgttgccgcgaccggcgtcggctcgatctatgcggggttgaagggattgctcggataggtccgcatccacgcggctcgctcgcggcgtttgccgctatgggcaccgcaagtaaggctcgtaaaaagaggccccagctcgcgggggatatcggggggcattgagctggggccattcggggtgcccttggggaagggcatcgggaaaacttggcaatcgcaggattgttcccgtctcaagctcaagtcgagaggtgtccaggcggcgcaaggttatggatgagggccggacgccgccggttcctctcccgttgctgcagattccgttctgccgccggaacaaaccacgttgtgtgcacttttagacagagtagcggtaacgggggacgacatggcgacggaactgccattaattttggtgatagaagacgaggatgcgatcctggctgttgttgaagacgcccttgcagagggaggctttcagatcgcaactgcgaagacgggcaaggaagctatcgcgctgctgaagggtggtctcgtgccctaccgcgctctcgtaaccgacgtcaatttgctcggtgatcgcgacggctgggaagtcgcgagagccgcccgtgagatcgatcctcactttcccgtggtttacatgaccggcggcgccgccgacaagtggcctgtactcggtgtgccaaacagcattttgcttcaaaagccgttcgcgccggcccaggtcgtcgcggctgtttcccagctcctcaacgcgggctcgcagcaggcgggtcccgcctgattccacgctccgtgttctgcgcgccgatcgagcggcgcgaggagacgcgctggaagcctatcgcgcttcgaccacttcgccgtcttccttcacgaagcggccgacgggatcgtccaggagatcaatcacggcctccgacggtcggcacaagcgcgtcccctttggcgtcaccacgatcggacggttgatgagaatgggatgggcgaccatctgatcgatcagctcgtcatcggtccatttgggatcgtcgaggccaagctcgcgaaagggcgtgcctttctctcgcagcagcgcgcgaggggagatccccatcgcctggatgagctcgaccagcctgtcgcgggacggcggggtcttcagatactcgacgacgacaggctcgacaccgctctgccggatcatggccaaggtgttgcgtgaagtgccgcaagccgggttgtgatagatcgtgacgctcatcgacgtatctctcggtaactggcagaccggcatgccgctctgccgccggcgaatgatgatttattggtgggcctcggcagccgccgggactttacccgctcccgcttcgtaccacccccgcgtagccttgacgatgcggacgacggacagcatcaccggcacctcgacaaggacgccaaccacggttgccagcgccgcgccggactccaaaccgaacaggctgatcgcggcggcgactgccagctcgaagaagttgctggcgccgatgagcgccgctggggccgccacgcaccaggccacgccgaaccgccggctcagccaataggccaggcccgcattgagatagacttgcacgagaatagggacggcaaggatcgcgatgacgccgggctgcctgacgatctgctctccctggaagccgaagagcaggaccagggtcgcaaggagtgcgacaagcgatagtggctgcagcattcgcatgacgcggttgaagccatcggggccttctcgcagcagcatcttgcgccacagctgagcgacgaccacgggaaccacgatgtaaagcacgacggacagtagcagtgtgtcccaggggacgctgatcgaggcgactccgagcagcaaccccaccagcggcgcaaacaggaagaccatgatcacgtcgttgagtgcgacctggctcagcgtgtagtggggctctccctcgcaaagattggaccacacgaacaccatcgcggtgcacggtgcagccgcaagcaggatcaggccggcgatgtaggatgggatctgagcggacggcagccacggtgcgaagaggtgaccgatgaagaaggagccgagcagcgccatcgagaacggctttacggcccagttgatgaagagggtcacgccgacgccccgccagtgctcccggacctggcccagcgagccgaagtcgatcttcagcaacatcggcacgatcatgagccagatcagcatcgcgaccggcaggttgaccttggcgacctcggcagccgcaacggcgccgaagaagccgggcatcacgtggcccagcgccacgccgaccacgatgcaaagcgcgacccacagcgtgaggtatcgttcgaagatgctcatcgctaagccacgtcgctcttgccggaggtcgctccctcggatcggccgatttcccgaagcttggtcccgagggaaagccggtcaatgccgctgaggggcaggttcacgaaggcgccaatacggttcttcaagtaacggaacgcgcgcgagaaggccgcaagtctttcgatctcggtgccttcgacggccgcaggatcttcgatgccccaatgcgcagtcatcggttggccgggccagacgggacatgcttcgccggcggcgttgtcgcagacggtaaagacgaaatccatcaccggtgcgtcggcggctgcgaattccagccagctcttggagcgcatcccgtcgatcgggtagtccatgctctgcagcgtgcgcagcgccagcggatgcacggcgcccttcggcgtgctccctgcggagaaggagcgaaagcgcccggcaccgtccttgcgaaggatcgattctgcgagcacggaacgggctgaattgcccgtgcaaaggaacagcacgttgtatacgcgatcaggcacgggccttctcctttcgattgggagcgcagcacgattgcaggctctcgacgacgggttcgcaaacttccggccgtccgccgcagcaatcgcgcagcatgaagagcgcgatgtcacgaaattcgccgaggttggcgcgatagatgatcgagcggctgtgccgctcggaagacacgaggcgcgcgcggctcataatcgacagatgcgccgagagcgtgttttgggggacttccagcaggcgcgcgaggtcgccggccgcaagaccgtcaggctcgtgtctgaccagcgtccggaacgcctccagacgtgtcggttgagacagcgcggcgagcgccaggacagcttgctccgtttccatatatccagatttatggatttatgcgggcggcgtcaacccggaatccgcatctcgcggcgcaatgtttcgaatattctagaaatatcgtttgacaatcggtccgcaccggcgcatcgtgtggctcatgaagatcgacgacgcagcagcacgcctggaagccctgggaaatcggacccgcctgcagatctatcgggcgctggttcgggccgggcacgcgggcatgccggtcggccgcttgcaggacaagctgaagatccccgcatcgacgctgtcgcaccacatcaaggcgctcgtcttggtcggactggtcagtcagagcagggaatcgacgaccctgatctgccgcgccaatttcgacgccgtgcgcgggctggtcgacttcctggttgcggagtgctgtgccgaagaaaccggatgcagggatgcccagacggcagcctgattcatttggcttcttgttccataattctagaaggatggagagttcgacatggataagaagacggtagctatcatcggagcgggcccggtcggtctcgcagccgccgcgcatgtgctcgagcgcggcatttcccccatcgtgctcgaagccgggcccgaggccgggcatgcggtgcgtcaatggcagcacgtccagctcttctcgccgtgggaatacaacgtcgacaaggcttcgacgcggctgcttgcgccgaccggatggaactcgccgaacccgagctcctatccgaccggcggcgagctgatcgagcgctatctcgcgccgctcgcaacgcgaacgccgctgcgcgacaccatccggacctcgagccgtgtcacggccatcagccgcgtcggcttcgacaaggcgaagacgaaggggcgggagcaagcgcctttcgaaatccgctatcagaacggcaagggccctgaggtgctgcgcgccgatgccgtcatcgacgtctcaggtacgtggttctcgcccaatcccgccggcagcaacggcttgcctgcgatcggcgaatccgagtgcggcgaccgcatcgcgtacggcatgccggacgtgcggggcgctgcgcgcggcagatatgccggcaagaccgttgccgtgctcggcgccggccattccgcgctgggcacgctgatcgatctcgcgcagctcgccgaggaggtgcccggcaccaagcccgtttggctgttgcgcggcggcgatcctgccaaggccttcggcggcggcagcaacgacaagctcgccgcccgcggcgaacttggctccaccttcgccgcgctcgtagctgctggaaaaatcaaggtcgagaccggcttcggtgtcacccacctctcggacttcgaggggcgtctcaggatttcagcaggtgcctgctgcggtgcgcggagtgtggttgcggatgagctggtggtgtcgaccggcttccgtcccgatctctcgtttctatccgagctgcggctgcggctcgatccggcaatcgaggcgcccgtcgcgctcgcgccgctcatcgatcccaatgagcatagctgcggaacggtgcggcctcatggtgcgcgggaactgacgcatgatgagcccggcttctatctcgccggcatgaaatcctacggccgggcgccgaccttcctgatgatgaccggatacgagcaggtccgctcgatcgtcgccgacatcgccggcgacaaggaggctgcggcacgggtcgaactcgtgctgccggagaccggcgtctgcacgcgtggcgacgtcgagtccgtcggcgcagcgggatgctgcggcggtcctgccaaaaccgagccttcggcctgctgcgccgccgacgagtcggccaagaaggcaggcggcgcgggatgcggttgctcatgagacgaggcgctgcgggatcgctcgccgtcgtcatcgcgctcggtaccgcgcagaccatcgcgtgggcgtcgagttactatctccctgcgatcctggccgcgccgattgcaagcgatctcggccttgcgccgacctacgtgttcggcgcgctgtcgggagcgctcgtcatctccggtctgctcggcccacgcgtcgggcattccatcgatacgttcggagggcgcagcctgcttgcggtctcgaaccttgtcttcgtcgcgggtctgctcctgttgtccgcggcttatgatgtggcggtgctggtagcagcctggatcctgctggggatcggcatgggcatgggcctctatgaagcggcgttcgcgacgcttgcgcgcatctacggcgccaatgcgcgaggaacgatcaccggcatcaccctgatcgccggttttgccagcactctcggctggccgctcacgacatggctcgcttcggagtacggctggcgcgcggcctgccaggtatgggcggcgatccatatttgcgttgccttgccgctcaattgttcgttgccccgtgccgttccattggccgaggactcccgatcgaccacgagcgcgagccgacagtccagcggccagagcgagaccttcgcaatgctgctgctggcatacatgtttgcggccgcgagcttcgtgagctcgggagtctcggccattctgccgaccatgctggttgcgttcggcgcgacgccggcacaggcgttgttcgcaggcgccttggtcggacctgcgcaagtcggcgcccgcctgctcgaagcaggatggctcagccggtttcatccgctgctgtcggcaaggctcgcgatgctcatgaatccgatcggcgtgcttgcgctggtcgcgggcggcccttggctcgcgccggccttcacggtgctgtatggcgcgggcaacggcatcatcaccattgcccgtggtacgctgccattggcgctgttcgggccggtgggattcggccggcgtgtcggcgtgatctcgctgccctccagggcaacaggcgctttcgcgccgcttgcgctgggactgctggtggagcatgtcggcagcagcgcgctctggatcagcgcactggcctcggtcaccgccttgttcgcgcttctgctgcttcgtgcggatcagaacgcccaagcgacggcaggcgagcattcgtagcttgcgcgatggcattcgtcggagcctcgctcacgaatgcttgacccggatcaaagaatgctttcggcggcggattatgctagaagaacctgctgcggttccaagaagtatcgaaaaggttaagcacatcctgatgcggatcgtccgtaccatcctggcattcgccatcgccgtatccttggcgatgctgccggctggcgtgtccgcttcaagcctcgccatatcgtcggatcagatgcatgcgaccatgcagatgggcggcggcggcgatatgtcggtggacgattgctgtcccgacatgaaaggaacgggttccgacaccggcggctacatgtgcggcatgggcttctgctgcgtcggcagcaccatcgcactcgcagacatccaccccctggcgcttgcgttacttgccatagcggcgggaaaaaccgccattcccgccgaccaggtcgtctccttccgcggcggcagccctcccttccggcctcctcgaatctgacctcccaagccagcgacgcgtgcggcacgcctgcgcgcgacgatgactgacgtgcgcgcttccagcgtcacggcggaagatcaattcatgaggacaggacaatgctctccagattcagcaccgcggctcttgccgccaccctttcgctcgccgcatcaggtgccatggccggcgcgggtgactacgctttcgagccggtcaatcccgagatgaagaagggcgacgacgtcacgctggcccttcgcttgaccaacaagcggaccggcaagccggtgccggacgccgtcattttccgaacgcgcgtggacatggcgcccgacggcatggccgagatggagtcggacgtcacgccgctgccgtcaaacgagccgggcatctacgtcttcaagacggatttgtcgatggcaggccgctaccaggtcacgctttccgcgaaggtgcagggcgagcccgacaccgtcaacggcaaggtcatcatcaaggccaccaagtgagccttcgggcgtcggacgacgcccgagcttctcttcctcattcacatggacgcgcgcccgcggcgcgcggtatctggcgatgaacacgcaacgtcttctcacagcactcgcgctcaccggcagcctggccctgggcgcctccttgttcttgatcgatggaccttggtccgtccacgccgaggtcgcctcggcgaccgcagacggcgctactccgctctattaccgcgatccgagcggtgcgccgctttggtcggccgggcccaggaaggacgaggacgggcgggactatctgccggtctacgacgacgatcaggctgccccggcggagccgaagccgcaacagccggcaggatcgcgcaagatcctttactaccgcaatcccatggggttgcccgacacctcgccggtgccgaagaaggatccgatggggatgaattatgtccccgtttacgaaggcgacgatgtcgacgatgggacggtgaagctttcgcccggcaagatccagcgcagcggcgtgaagtccgaggccgtcgagcggcggtcgatccgggtcctggtgaaggcgcccggcacgatccagctcgacgaacgccgcgtctcggtgatcgcgatgcgcgcagaaagcttcgtgcagaaggtcgcggacgtcaccaccggcacccgcgtgaaggcgggccagcccttgatggaaatctacagttctgcggtcgcctctgccgccgccgaatatctctcgacgatcaattccaaaacaaccggcggggtcgaggcctacggccgcggctcgcggcaacggctggtcaatctcgacgttcccgatcaggtcattgccggaatggagagaacgcgcgtcgcgcccgtcaccatccagtggtcggcgccgcgcgacggggtcgtgcttgagcgcaacgcgatcgaaggcatgcgcgccaatcccggcgacgtgctgttccgcatcgccgatacctcgctggtgtgggctctggtcgacgttgccgagcgcgatctcggcaatatcgcggtggggcagtccgttgcggtgcgcgcgcggagctttcccggccgggcattcaccggcaggatcgcggtgatctatccgcaggtgaaccgcgaaacgcggacggttcgcgtccggatcgagctcgccaatcccgacgcggcgctgctgccggacatgtatgtcgatgccgagatcgacacggccgatacgacgccggtcctggcgatcgaggacagctcggtgctcgacaccggcacgcgccaggccgtgctcgtcgacaaggggagcgggcgtttcgagccgcgcgaggtgaagctcggccggcgcggcggcggctacatcgaggtgcgggacggacttgccgacggcgaggccgtcgtcacctccgccaacttcctgatcgatgcggaaagcaatctgaaggccgcgctcaagggctttgccgaggctgctcctcaagcttccgacgcgggccatgcgaccggagagcacaaatgatcgcccgtatcatcgcctggtcggcgcgcaacctgctgctggtgctgttcggcaccggctttgcggccgcggccggcctctatgcgctggttcacttgccgctggatgcgatcccggatctctcggacacgcaggtgatcgtctacaccgaatatcccggccaggcgccgcaggtgatcgaggaccaggtcacctatcccttgacgacggcgatgctgaccgtgccgaaatcgaaggtggtgcgcggcttctccttcttcggcgtgtcgttcgtctatgtgatcttcgaagacggcacggacatctactgggcgcgctcgcgcgtcatggaattcctgaacggcgcggcgtcgcggcttccggccggcgtcactccgaccatcggaccggatgcgaccggcgtcggctgggtctatcaatacgccgtcctgtcgaaggaactgaatctggcggacacgcgcacgatccaggnnnnnnnnnnagttcgcgctggcaaaggccgaaggcgtcgccgaggtcgccagcatcggcggcttcgtcaagcaatacaacgtggtgctcgatccgcagcggatgcgcgatcgcggcatcagcatgcagaagatccgggaggcgatccgcgccagcaattccgatgtcggcgggcgcacggtcgagctgtcggagttcgaatacgtcattcgcggcaagggctacgtcaggagcatcaacgatctcggcaacatcgtcctgaagacgagcaatggcacgccggtgctgctgcgggacgtcgccaatgtcgagcttggtcccgacgagcggcgcggcatcgccgaactgaacggcgagggcgaggtcgcaagcggcatcgtgctgcagcgcttcggcgtcaacgccctcgacgtcatcgaaaacgtcaagaagcgcttcaaggagatcgcgagcagcctgccgaagtcggtcgagatcgtcccggtctacgatcgctccaacctgatctacgcggccatcgataccctcaagcacacgctggtcgaggaaagcatcgttgtcgcgctggtctgcatcgtgttcctgctccatgtccgcagtgcgctggtcgcgatcctgatgctgccggtcggcgtgctgatggcgttcggcgccatgaagctgctgggcctgggatcgaacatcatgagcctcgggggcatcgcgattgcgatcggtgccatggtcgatgccgcgatcgtcatgatcgagaacgcgcacaagcacctcgaacgcgccgggccaggtcagtcgcgcgttcagactttgatcgatgcggcgtccgaggtcggcccggctctgttcttcagcctgctgatcatcaccgtctccttcatgccgatcttcacgctggaatcgcagnnnnnnnnnngcgtgctgcgcgccaagacgccggtgatcctggcatcgctcgtcgtgctcgccgtcacgatatggccggcgcggcagctcggcaccgagttcatgccgacgctggacgagggcacgctgctctacatgccgacgacgctgcccggcatctcggtcaccaaggccgccgagctgatgcagacgcaggaccgcatcatcaagtcgtttccggaggtcgcgtccgtctacggcaaggcgggtcgggcggcgaccgcgaccgatccggcgccgaccgagatgttcgagaccgtcgtgaacctgaagccgaaggagcagtggcgccccggcgtcactgtcgacagcctcatcgcggagatggacaaggcgctgcagtttccgggcgtctccaacgcctggaccatgccgatcaaggcgcgcatcgacatgctgtccaccggcatccgcacgcctgtcggcgtcaaggtcatgggaaccgatctcgtcgaaatcgaccggctggcgcggcaggtcgaacaggtgatcaagaccgtccccggaacgtcctcggcctatgccgagcgcggcatcggcgggtactatctcgagatcgtcccggaccgcgaggcgctcgcccgctatggcatcctgatccaggacgttcaggacaccatcgcggccgcgctcggcggtcagacggtgacgacgacagtggagggccggcagcgcttcacggtgaacatgcgctatccgcgcgatctgcgcgacaatccgaaggccatcgccagcgacatcctggtgccgatgccggccggtggcgcggtgccgctcggcgaggtcgcgaaggtcgagccggcgcgggggccgacgtcgatccggaccgagaacggccagctcgcgacctatgtctacgtcgacatccgcgatcgcgacatcggcagctacgttaaagacgcgcaggctgccgtgagcgacagcatccagtttcctgccggcacctatgtcgtctggagcggtcagtacgagtatctgcagcgcgcggcagcgcgcctgaagatcgtggtcccggtcacgctgacgatcatcttcctgctgctgtacctgaacttcagggccatgaccgagacgctcatcgtcatgctgtcgctgcccttcgcgctggtcggcggcatctggatgatgtggtggctcggattcaacctgtcggtcgccgtcgccgtcggattcattgcgctcgccggtgtcgccgccgaaactggcgtcgtgatgctgatgtacctcgagcacgcgctgaccgagctgaaggccaggcgcagcgccgaggggagcgtcttcacccggcgggatctcaacgaggccatcatggtgggcgccgtcgagcgtgtccgtcccaagatgatgaccgtggttgccatcatggcgggcctgctgccgatcatgtggagcaccggaaccgggtcggagatcatgcagcggatcgcagtgccgatgattggtggcatgatctcttcgacgctgctcacgctgatcgtgatcccggcgatcttcgggctggtgaaaggcttcggcttgcctcccagggccgaggacagcggacaaccgaccgaaatgtcaaagtcgattggtccgggattgcggctgctggagcctgccgaatgaggcgagccatggcgcacgacatcatgtcggcgatgttcgggatcatggaattgatcgccacatcggtcgttttcgttccaatattggggcggcgccggcaagatgggcgatcgtgcggaggggatctttgccgcacctgaacagatcagcaagaccattgagcggcgatgccaggagatgcgcgcatgggcttctacaacgacttcattcttccacggctttgcgaccttgcgatgcgcaacgaagagcttgcgccctatcggcaacgcgcgacccgtgcggctcacggccgggtactcgagatcggcatcgggtccggccgcaacctgccgttctacggagctactgtgacgcagctcgtggggcttgaacccgctgcaaagcttctcgagatggcgcgagccgctccacagccggaaactccagtcgatctcgttgaagcttcggccgaggcaattccgatcgacgaccgcagcatcgatacggttctgacgacctggaccatgtgcagcattccgaacgtcgatcgcgcgatgacagaggcgcggcgcgtgctgaaaccgggagggaagctggtcttcgtcgagcatggccgcgcgcccgaaccgcgcgtgcgctggtggcaggatcgactgacccccgcatggatgcgcatctccggcggttgtcatctcaatcgggacattgccgacgtcttgacccggaacggctttcgcatcgacgagatgcgcaccgggtacatgaatgggctgaagccaatgacgtttatgtacgagggccaggcgggccctcgttgatgcccgcgaccctccgaccttgcggtccaacgatgagagaaaggaagtctaagatgaaggaacgcgcacatgtgatgacccgccggtcgttcgcagggctgatggcggcggcattccttgccgggcctgccgacgcggcgcaggccgacgaaactgtcgtcagggtccataaggatccgaactgcggctgctgcgatggctgggtgcggcatctccgcgatagaggattcaccgtccaggtggaggagaccgccgacctcgacgcgattcggagccgtctcggtatccccccggacttggccgcgtgtcacacagcggaggtcgccggttatgtcgtcgaggggcatgtgccggcgacggccgtacggcgcctcctgttggagcgtcccaatgcgcggggcatcgccgtgccgggcatgccgatcggatcgcccgggatggaaggcggcaggccgcagcgttacgaggtcgtgctgtttggtgccgaggggcaaaggccatacatgcgctttgtcggctcgcaggcgatcgattgagccttgatggcggagcacggcgcgacgagattgggatgaattgccatcgcgatctgggttattgttcgaagcatgatcgtggttgatgtcccgcaacatgggtggaaagtcatgaagcttctcgttttgatcatcgctttgctcgtgccggccgccgtttcggcacagacatcgtatgccggcatgcagtcccggcacatcaaggcgctctcggagcagcagattgatgatctgcaggcgggacgcggcatggggctggcgctggcggccgagctcaacggatatcccgggccctcccacgtgcttgagctcgcagacaagctcgggttgaatcaggagcagcggagcaaggtccaggagatgttctccgagatgaaggccgagaccacgcccatcggtagtaaattgatcgagaaggaagcggacctggatcggcaattcgccagccgcacgatcaccgccgagactctggctcttgccatcgcggccatcgcgacgacgcagggcgagctgcggcaagcccatctcaaataccacctgcgcactgcggtgcttctcgaccaggcgcaactggcaagatacgccgagctgcgcgggtacacgtccagcgacgctgcgcgacggcaccaccaccatcgctgagctgacgcacgacttgagggttgccggtctctggatgaaagagccggatgttccttccgccgctaaggctgtggaggatagcggtcgaacgccggcaattcgtgcgcatgctccatccagcgaagacgctcggcgacctggatctgcatcgtcgccggcacggcttcgggatcgtcgtaggtcgcgctctggacgtcgatgatccccggcagcatgctggcattgaagtagaacaggccggtgccgcagtcgccgcagaactgccgtcggccgtgttccgaggagtggtagaccttcggttcgcccttgatcaccttgacggcattgtccgggtacatcgtccagccgacgaccggggcgccggcgtggagccggcaatcgcggcagtggcacagcgcatgcacaatcgcgtcgccctcgacttcgtagcggattgcgccgcagtgacagccgccggtgatggtgctcatgcgttcctccgattcagacgatttcttgaaccgatagccatcgagacgcgtggcttcaacagcgcaggcgatctgaggttgcgtcctactgtcgcgtgacagctgctgccacgcgcgctgatccgagctcggctccggaggaggtcagcggccggttcagcggcagagcgacaaagtcacgactgcgatcagcgctgcttggcggccgtgctgaaccacaatgtcgcattgtagaggtcggcccttgcctgatcgggcgtgactgacggcgccgcacggtgatcgatcaccagcagatggggacccggcttgacgatggtgacagccgccacgccttccgcgtccgtcttgaattttggaatgtccttctccgcagccgcggtcttgccgtcgccacgttcgacctccgctccggcgagaggcttgccgcgaaacagcaccttgaccttgagcgcctcaccaggcctcgccttggctggatcggtgagtggcacgagctcgaggtcgtgtccaagcacctcctgccagggtgcgtcagcccccgtgatcgcttttgcaaacttgccggaccagaagctctcggcggcgtcaggcacgagccgccgggttgcgttgcgatagaggccgtctgtcgtcctgacccagaaaccgttgtcgtaacgcgccgcgagcagcgtatgcccggcatcgtcgaacggtttcgttcgtgcgatctggatgcccttgtcggatgcgatcgcaagcccgtcgagcagcgagctgcggcctttcggcgtgatcatgaagaggtccacgaccttgtccgcgaaagcgggcgggcggtcgtccggatgaccgtaattgacgatggcgcaacgtgcgctggctggccccgagaacgtgagccagacatcatgtgccgaggcggatgctgtcgatccgagaacaagcccggttgcgagcagcgtgtgcgcgagacgagggaaggtacggctcatttggtcaccagccttggagttgcccccgctattacggtcgggaaacgatacgaaacgcccgcaagcacggcgattgtcggctgcgcgctgacgaagatgtcggatgtccttgcgtcgactggatcgccaaaattgatggcgatttcgctgaggcgatcgccgggataccaggtcgcctgcgtgaacgcggtccacccctcgggccaggaataggcgagcttgccggtcacgcgggagtagggtgaggtggtgatgagaccgtcctgcgtgaggttcttcttgccgacgaaggtcacatagaccgagccggacaggacttgcgcattgaccgtcgcgacgttgaaatcaacgccgacattggcgacgtagctcggcacgttcgggacgaagtaggagggcgcagcgtcgacgaggcgagccgagacgccgccatagttggcgaacaacgagacgttgttgacgggatccttgatcacgaaccagcgggcatcgacgtcgtatccgttgcgccgggctttgcccaggaacgtcacgggcagaccgggcgccgcctggaacgcttcgttggccgagtccgtcgtccaatagctcgccagcagcctgaagcgatcgaacgtgaactggacgccgccctcgcggctgacgatcctgaatggctgaatgccgggattgccgatcagctctgcgggtacgtcgatgctgcggaaaccctcgccgtaattggcgaacagctccagccatttgaacggcgcgatggcgactccggcctttgggcttgcaatgccgttcgaatgattcggcgtgccgccaggcgtggtgcggtcgttgatgtcgtagtagtactggtcgtaacgcccaccggccgtgaacttgagccagggcaacggcttgacctggacctgaccgaagccggcgatgttcgtctcggtcaacccgacattgaccgcggccgggccggacacggcgcgggcgagggtcggcgcctggaacgcctcgatgaagtcggtgcgccaattgctgccgagcaggacctgcacggggatgtcgtcgccgatggctccgctccaggtcttgctgacgcggccgccaaccatcgtgcgatcctcgtgctgcacgcgctggccgccgccgaaatccgcgaaccggttcgagaattggtggctgacgaacagggtgcctttcagctcctggtcctgtgcaccggagctgtaattggtgacgaggttttcgagctgcttgttgccgccgtcggtcggattggtcgccgagcgttcggagatcgttcctgcggcaatggcgtcgcgactggcatagcccggcgagccgtattcggtgccgtaggcctgcgcacggaacgacacggtggcgccgtccggaagcgtcgtcgtgaccttgttgaacgagttgtagcgattgatgaagctgttatcgcggtagccgtcggtgtgatagccctcgaacgcgagatagggcagccacgcgccctgcgtcgtgctgtaggtcgcgacgccccgggccgtgccttgcgtgcctccggagatgccgaggctcgcaaagagttcggcctgcttggtcgtgatgttgaccgagccgcccatattggagtcgccgtactcgaccgaaaacggcccgcgcacgatctcgatgctcttgaccgtctccggaaacagcacgttgaggtcggcatagttcggcgtatgcagcgaggaaacctcgttgagcgggacgccgtcgatgtaataggcgatgtcgcggccgtgttcggattcggtatagccgcgcagcgaaagcccgtagccgattccgccctggccatagttggacacattgaagcctggcagcgagcggaacaggtcgccataggttgcaaccgccagccggctgatcgccggtgcgtccatcaccgttacggccgccggcagcgcggtcaccgcgctcgacacgtcgccccgtcccggcgtcgcaccagcggagaagcccgtgcccgcttgctgcggcgatgcgcgctgcgtgacgggcgatcgctgcgcctgacgcgcggcgtttgtccttgccgagagctctgggcgccgcacgcgtctgagcgccgtctcgggcgccgcgacagtgaccggcggcaacgcccccgccgcagatccgccaggtcccgtctgcgcgtgaactggatttgcggcagaagcgcctgataacgccatgccggccagaaccacgcgccaggaaattctacgcaacttgccccccgctaccgcaccgacggccgatcgacggcctcacgcggtatgatgtttggtgtaagtcgtcatacatgagtatgacgacttgagtcgatcatcatactcgcatgagcaagttgcgggccaatcgcagcggcgcggatgactgcggcgggggaagttgaccggattcagagtgttgcgcgtttggaggtcgctcctgcgcagcgcatcgcgccccaccgtagccgtgtccgtgaaaagccgctgtccacccctggaaaccgccggtgaccccgtgtctgcagaagtccgcgctgctccagattcccgatcagtcggcgcagtcggcagcggaagtgacggcgcattggctgtttccgcgactggacggtggcttcacgcaacggacgttcgacggccccggcccgccacgcggcgacttcgagtctatcgccgcgtggcatctggtccggtcagaagttgacgctgagccgcgcgttgaacgagcggcctggtcccttcacgttgtagccgtaggcggccgaggaccccatcatcgagtcgaccttgtagtcgaccaggtcggcgccacccaatggcaggtggtaattctggttgaacagattatcgatgccgaggtcgagtcggacgtgctgccactggtaacccgtacgcaaattgagcagcgcatacgccggtgtcgtgagctcattgtgaacctggctgacctgatccttcgagccgacgagttgcagttcgatgctattggtccagccgccaaggagatggtcgagcgcgaattttgcgttgatcggcatcatgtgatagaggtcaacgccatcggttcgttgacctcgaacatagccgatcaggccgcgcacctgcccctgaccatagattggattgtcccatacggtcagccgcccctcgacattgatgccatagagcgtcgcgtcgtgattggcgaactgcaggtatacaaagccggtgttcgccgtcaggttcgcgggattgctcgcgaggcagctcgcagtcgagcagcgatcgacatcgatgtaatcgtgcacatagctggcatagggcgtgagcttcacgccccagacccgttgcgcaggatcgtgccagcccgcagtgaagctgacggtgtgagctttctcaggcttgaggtccagattcccgacatagccgttgccgtcgccgaaccagccgatcatcttcatcgccatcgcattggtggaccaggcgtagcgttcgtagagattgggcgagcgcgtcttgcgggcgaagccgaattcgtattggctgatgtcgttcggctcgtagcggaggagggcggagccgtcgacatgaacgtcggcgcgggcacggtcgagcgcgttgaaggcagccgcatccgcgccgtagctcatcgcattgtagccctgcacgttgccggtgttcatccacacgacgtcgttgcgcaaaccgaggatcgatgtccactgccgatcccagtggcgttcccactcgacgaacgtgccgaggcgatcgcgcgtgccgccgttgatgttgatgaacgcgttcgggctcatcatcatcgatccggccacggggctccaccaatcgtcgagccggttgacggccagctcgttgccgatgcgaagcaggtcatgaccggagagggccactgtcgccttcatcgaatagccggcgtcgagagccttcgtgtccatcggcatctcgccgatcttgtcgggcgcaatgaatcccatggtgtgccggatctggtgcacgaaggcgctggcttcgaacttgccccagtcgaacacgccctcgtaacggccgtttgcatagaggccgcggttatagaccatgtccatgtactggttgacatagccctggtacggaatgaactgaccgccaatctggaaagcaaagagattgccgagcgcctgcttcgagatgctgatggcatggttctgcgtctcgtagagcgttgacttgaccgtcgttccgtcgccggccttgtagttgcccgagcggacccagccacccgtgtaggtgacgctcgtgtcgtggttggccagggttgcagttgcatcgacgccataggcgttgccgttgctgcggaagaagctcgaaagccgggtgctggcaacccagccggcctgtgccggcgtgaaagccggcggcgcagtggtgacgtcgatacggctgccgatatagtcgcctccgaccgatacaggtccgacgccgagataggcccgcatcttcgcaatcatcgccggattgacgaacgacaggggcggattcatttcgttcggacaggcggggctgatcagcatcgagttgatcgcgacctgcagccggtcggccccaaatccgttgatggcgggcaggctcgagacgccgccggcaccccatgccgcaccgccgggcagggcagtgacgagagaggcggagtcgctcgacgaaaggccgcgatcgaaacccgccctcggcggcaggctggcggatgcgggcactgaactcggactctgatctggcgcagagatgtcgccgctttgtgctgccgcgggtggggcggccgcgacgacgccgcgcggctttcgtttgcgttgttgcggagaattgaccgtcacgggtggcagccgctccgccgattgcgcggaggccgttgtgacgaaaggcggaagcagcgaagtcgcacaaggcagggcaggtgagatgagcgccgtcgtcgcggccaggatggaccggcgcaggctggttgatgtgttggacatgagcgtttctatgtgaggccagcgatcacgccggcgcatgacggaagcggggcgcgcgctggcggccctgccgatgatgtcggaaatgagcgatggccaagcccgctcgagctctgcgcgcacgtcccgccgctggggcaggcatgcggatcagagccgggagcgcgaatattcgcgcccgcctgagggcaacatcaggtcagtgcgggtggtccacgcgacaaatggtcgaaagatcgcgcataggcgacgatccgctgccgaaaccaataggcagcacttgccgtgagcggaatgcgatcggtcaacgtgggttgaggcggcggcagagcgccggatacgtggtgtcccacgcagagcgggcagtgtacgttcgtcttcttgccgtgcttgtccgcatcatcggtccgagcggcatctccgttgtcgccgctgatgcagagctcttgagccgccgcgccggccagaggggagatgcttgcgaccagcatgccggacaggatgacattcaagaccaacgcataggctgcaacaatagcagtgccccggccgatccgtcgcttgtaagcgaaccccgtcattcacctgccccccgcgcacaggtatcacagcggaagaccgagtcaaacgcgcagaggccggatcgggcccagcatctcgttatgttgctcggctaccatgtcgagtggtggtgatatcttgccgctgtgtggtctcaggaaagcgacagatgcgggtcagctttcgcacgcttgctggatcgacgtacgagatcgcagtttcagccgctggggtccgccggcactcgagcatgaagaaacccgcggcggattgctccgcgcgggtgtgacgaactttcgatgctgccagtatgccggtgttttgcccgacgagtcaaaggagcgcgcgcgtcgcccggcagcttcgtcgtcgctgaccgaagagcacattgatctcaatgctccggctactgtgcatggggttgttttcgcagttttcgttttgcgttgccgccatggccgcgctcaccgccggcggcgcggcgcctcggccttggccggcggctcggtctgcggggtgcaggttgcagcctgaagcgagctttgcgcctgcgccatcaggccgggctcgggggcgagcgccttcatcaggatcaggccggtcgtggtcggggaatcgatgatcaggcggtcggccgcggtgacttcttcgtcctcgggcagctcgctgtgttgcgcttccgtcatcaggtcgagctcgatgaccttgcggcccgccgagcggtcattgatggcgtaataggcgatctcgttgcgggtgtagaacgacagcgaggtataggcctgactcaccggcaccgtgagcttgatcggtccgctcgacagatcgtagcggcagatcgccagcgcaaaggcaggatccatgaacggcatcggtgacgtgctggggtcggcgaggggaagctgggtgaccgcgttcaccttcgtcatcggcgtcagccgcgaataggcatcctgcgtcgcgatccgcggcagcgccagcacgctgacgagatggaccacgaggcccagcaccacgcccgcgacgatcgtgaatgcgagtcgtatcatgagcagcccaccgtcgtgatgctgggcatcggcgcatcgcgctgggtgcgcgtcgcaaccccgaccggcgtgtcgtagagccggagcatcaaggcgtagcgctcgatgccgccggtcggcagccaattgccggcgcgcgatcgcgaggcaatgcggatctcgaacgagccgtcggactggcgcacgatctcctggctggtgaagccgtagcgctgcagcgaattggcgacgagatggcccttgcggtcatacagcgtcagcgtccagaaccgcgccggcggcgtcacgccggagacgatcacgtcgcagcggccgtcgagcgccttcctcttgtcgtcggtcgtggcggtgaaggcgacaccgtcgccggtgccgatcggcaactcgccattgcgcacaatggtggcgcgcgaatagggatcgacgtcggcggtgccggtgcgcgggcgggcggtccaggggccgatggtcagcgcgccgatctcggtgccgcgcgtcgtcgtcatccaggtcgcacccaggccgaccaccgtcgcgagaagaagcgccgtcaatgtgatcaggatcagccgcacgggtttcgatcagttcttgcgcggggcggaagtgttggcgttctcttccgcatagttctgcgggaaggcgagcgcgctcgtcgacgaggacggcttggccggattgctgtcggcatccgtcgatttgttcgcagtcctggccgcattgtcgagcagcctctcgacgcgcaccagaatgtcggcgccacgcttggtcagcaccggcggaggacccggcttggtctccagcaccttcggcgccgcattggcgtgcgcgttgctcacatgatgcggcggcagcttctggcccatgccgacgccggggatctccctgacctcgacgccctgatgcgccgcaagcatgatgtcgtgccaggtctgcgccggcagcgagccgccggtcatgcggttggtcggcgaatagtcgtcgttgccataccacaccgcgcaggtgaaattgccggtgtagccgacgaaccaggcgtcgcgatacgcattggtggtgccggtcttgcccgcggtcggaatgccgtccagcgcagcacggcgcgccgtgccctcgctgacgacgtggctcatcatgcccgccatgtcggcggcgacggaggcgggaatcgcctgccgcggcttcgggccgtcgcggtcccagcgccagacgagatcgcctgcgccggtgcgcacctccagcaccgcatgcggcgtcaccgccttgccgcggttcgggaaggtggcgtaggcgaccgcatgctcgagcacggtgacttcgtccgagccgatcggcagcgacggcgtgtcgggcagcggcgccttgagaccgaaccggcgggcgacctcgacgatcttggcgcggccgaccttggccgggttcggcgccttcggctgttcccgccggccaatctcgatcgacagcttcaccggcacgacgttgatcgagcgcgtgatcgcctgcgtcagcgtcaccgagccggaataggaatggccataattctgcgggcaccaattgccgatgcagacgggaccgtcgacaacgaccgagttcggcgtgtagccgttcagcagcgcggtggtgtagacgtaaggcttgaacgaggagccgggctggcgataggcgtcggtggcgcgattgaactggctggcgccgtagtcgcggccgccgaccatggcgcggatgccgccgtcgagatcggcaacgaccgtcgcggcctgcgtcgcgtgatagtcgcggccgaactggcgcagctggttctcgactgcgtcctcggccgctttctgcacgttggaatccatcgcggtgcgcaccacgaagacgcgctcggtgtaggacttcgggaaggtgtcgaccagcttgcgcatctcgtcgaaggcgtagtcgagataatagttcggcgaggcctcgtcgcggcggtcgacggcgaacgccggattgcggcgggcgccgaacacctggccctcggtcatgaagccggcatcgacgagattgtcgagaacgacgttggcgcgggcgcgggcggcgggcaggttgatgtggggggcgtatttggtcggcgccttgaacaggccggcgagcatcgcggcttccgccagcgtcacgtcgcgcgcggacttgttgaagtagaagtgcgccgcgccgtcgactccgaaggtgccgccgcccatataggcgcggtcgagatacagcttgaggatctcgttcttggtcaggcgccattccagccagatcgcgaggaatgcttcgttgaccttgcgctcgatggtgcgctcgttgctcaggaacaggttcttggcgagctgctgggtgatggaggagccgccctggcggacgccgccggcctgggcgttggtgacgagcgcgcgggcggtgccggcgatgtcgatgccgaaatgctcgtagaaccggcggtcctcggtggccagcgtcgccttgatcagcacgtcgggaaaatcttccagcgggatcgagtcgttgtgcttgatgccgcggctgccgatcggattgccgtagcggtcgaggaagctcacggcgaggtcggacttcttcagccagtcctcgtccgcggtttcgcggaacgcggggatggcgagggcgagcatcacgacgaggccgccgagcccgagcgtcgcagcttcggagagcggctcgatgaacacccagcgcttccatcgtccgacatagaaccggtccatgaaggtcgagtaacgctcgtagagctcgcggatgcccttggccgaggagaacagcgaggagtcgatgcgcgcatcgaggtcgaggaagaaattccggaccctctgcttccaatgcggtggtatgatctggcgcccctagaacccttgaggcttgcttcgaaagcgttcaagcacccggccggggcggcatcgagacgtcttgagggaatgttgcggcaaacccaaggcgcccggccagcatccgagggacttgctgtttcttctagccgagcggggcccataaaccaatggtcacgctcgcgattttgaacaacaggcataaatgcccccgggcaattacgggcttcgacaaggccttgcttgcacctttgcggccgcgcgccctagatggcgtcgccgtagctcttttcgaattttatcgaggcgcatgaccgcagctcccaaacgaccttccggacaggaaggattcttctggaaaaccaagacgttggaagagatgtcggggcccgaatgggaaagcctgtgcgacggctgcgggcgctgctgcctgaacaagctggaagacgaggacaccggtcagatttatttcacccatgtcggctgcaagctgctcgatggagccagctgcgcctgcaaggactacccgaatcgttccgacaaggttccggattgcgttcgcctgaccccggccaatgtccgcaccctgaactggctgccgccgagctgcggctacaagctcgtcgccgaagggcgcgacctctattggtggcatccgctggtctcaggcgatcccaacacggtgcatgaggccggcgtctccgtgcgcggccgggtcgaaggcagcgaggagcagatcccggacgaggagctggaggatcatatcgtgcaatggccggcgaccttgccgaagcgggctcgcctgaagcgacgtccgaaggactgaaccgccgcgtgatgcgggtcacgcgttcgggatgacccggtggcgggatgcacccatgcgccgcggtgcctgcctggggaaagctttgctgtctacattggactgcatagaacgaattccttcgcggcgttgcgccgcctcacgacgcccgatcgagatgaacaagttcgaacggcagagcgctgccgacgtccagacgttgcctgacgatatcgccgaagagctgtcccggcttcccagcgaggtcatcagcgtcgatgacgccccgtccatcgcgccgccggtaccgctgtcgcaggacgaggtccgcaccatcgtcatcagcctgatgctgacgatgttcctggccgcactcgaccagaccatcgtggcgactgcgctgccgaccatcgggcgccagttccaggacgtctcgaacctgtcttgggtgatcaccgcctatctgctcgcctcgaccgcggtcgcgccggtgttcggtacgctcagcgacatctacggccgcaaggccatgataatcacctcgctcagcctgttcgtcgcgggctcggtgctgtgcgcggtcgcgccgaacatgcccatgctgattctggcgcgcggcctccagggcctcggcggcggcggcatcatgccggtggtgcagaccgtgatttccgacgtggtgagcccaagggagcgcgggcaataccaggcctatttctctagcgtctggatggtcggcggcattctcggcccggtcatcggcggcgtcttcgccgagcatctgcactggtcgatgatcttctggatcaatctgccgctttcggccgctgcgatcgcgctcttgctgccgaagatgaagaagatcccggtgttccaccgcaagcgcaaggtcgactggctcggcggcgtgttgctgatggcctccgcggtcgtcttcatgttggtgctgacctggggcggcacgcgttttccgtggctgtcgccgaccgtgctcgcgatggtgggcggcgcggtcgcgctcgccgtcaccttcgtctggcacgcccggcgcgcggacgagcccttcctgccgctgccgctgctgggtggaagcgtcgtgccgttcgggctgatggcggggggctgtgcgctcggcgccatcacgggcctcacggtccagctcccgctctattacgaatcggtctaccgcctcagcgccagcgaggcgggcctagcgctgatcccgcttgcggctgtctcgacctgcggtgcggcgatcgccggacgtacgatggcgcgggccaagcactacaagcgtgtcgccatcatcgggacgtcctgggccgcgctgtgcggccttggtctcacgctcacgacgctgccgctgtggggcctgttgacgctgatggccgcgtttgcgctcggcctcggcacaacctttccggtctgcgtggtctcggtgcagaattctgtcgcacgtccgcaggttggcacaatcaccggcgcgttgaacttcttccgctcgctgatgtcgtcgttcacggttgcggcgttcgcggccatcctgctgatcgcgctcggtgcagacattccgctcggcgagcatcacgccgcaggtagcgtcgctattcccgccgaggacatgcggcacgcgttccgctacgtgttcggcgcggccactgcgctgatgaccgctgctgctctctgcctgatcgcgatggaggagcggccgctggccggtccttcggcgaagcaatccgccgagatggtggagtagcggctagccccgtccgcccgcaaagctgctcttccgcggcagcagaatcgtgaactcggtgaattcgcccggcacggtcgcgacgtcgatcgttccgccatgctgtttcaccacgatgtcgtggctcatcgacaacccgaggccggtgccttcgccggccggcttggtggtaaagaacggatcgaacatcttctctttgacctcgtccgcaatcccggtgccgttgtcgcgaatgcggatctcgatgctgtcgccgcggtcgcgcgttgcggcggtcacctccggctcgtaaccggccacgccgtcggccttgcgtctggtgaccgcgtggaatccgttcgagatcaggttcagcagcatccgggtgatctcctgcggaaacacttcggcttgcccggccgccggatcgagctcgcgcttcagcctcacatcgaaccccggcttctcggcgcgggcaccgtgataggcgaggttgaggctctcctcgaccagtgcgttgatgtcgctcagcccgtgctcgccgccgccctcgcgtgaatgcagcagcatgttcttgacgatggaatcggcgcgccgtccgtgctgcacgaccttttgcagattgtccttcaggagtcccgtcagctcatcgacttcgctgcggacgtcgtctgcgagcgtgaccggcgcgagcaactcgttcagctcgtccgtcagctctgcggagagcgatgcgaagttattgacgaagttgagcgggttcttgatctcatgggcgatgccggcggtgagctggccgagcgaagccagcttctcggtctggatcagccggtcttgcgccgcgcgcagatcgtccagcgatttggccagctcgctggtgcgggtcgcgacctcgttgaacaggctgacgttcttgatcgcgatcacggcttgatcggcaaaggtctggagtagccgcacatgatgatcggcgaagctgcccgttgcgcgccgcgttgcgatgatgatgccgatcgcttcgccctcgctcattagcggcgtgaacagcatgctgcgatagccgcgggcgcgcgcgatgtcgcgcgcggcgggctcgagttcggtgtcgggcaattgcgccgcgtgaccatgggccacgagctggtggggcgggaatcgtgcgaactgtactgggaacgaggcctggagcacgcgatcgccggcgggatcggtcgaggtgaatgccgcaagatgcacggcgccgtcgatatagcgcaacaccgcggtggagaagccatcgatcagccggttggcattggcagcgatggcgtcgaagaccggctgcatatcggacggcgaggcggccatcaccttcaagatgtcagctgtcgcggtctgccgctccagggcctcgcgtgtctcattgaacagccgcgcattctcgatcgcgatcaccgcttggtcggcaaaggtctggagcagctggacgacatcaggcgcgaacgcaccgggttcggcgcgcgtgacgctgatcatgccgaccggcgtgccccggttcatcagcggcatgaacaggacgctgcggaagccgcgaagccgtgccagctcccggttcagctcgggaacctcggccgcctcgctgtcgggaaactggatcgtctttccgtcgcgcacgagggcaaaggtcgggaagtcggagatcttgcgcgggaacgacgcttcgagccccttgtccgcctccgggctggtcggcgtgaatgccacgaggtgcagctcgtcgccgatgaactggagcacggtcgccgagaagccgccgagcaggcgcttggagctggaggcgatcgccgcgaagaccggccgcgcatcggaaggagaggccgcgatggtgcggaggatctcggcgctggcgctctgtcgatcccgcgcaatcgcaagctcgctgcgcagccgcgcgctctcggcggcgagctcatcggcgctgttcgtcggagggttaatcattcgcaatccggccctatgccgcacctcccacctcaccgggccggattatcacatcctccgctgctggaaccagtgtcggaagacttgctgaaatccgcctcgctcatgtgcccggccgcgacacctcggtctccttgctggtaatgaactccagcagcaccggaacgccttcctgcgtcttctgaatgccgcgcttgatcgcgggtatgatgtcctccgggctcgtcacccgctcgccatagccgccgaaggcgcgcgccatcgcggcataatcgccggaaatgtcggtcgagcgatatttctcggtcgagatcggcatcaccttcaactcgatcgccatcgagaaattgttgagcaggatcgacatgatcgggatgcgctcccgcaccgcggtctcgaaatccatgcccgtgaagccgatggctgcgtcgccccagatattgatgcagagtttgtcgggctttgccagcttggcgcccatcgcgagcccaaggccatagccgagctgggtcgtcttgccccagccgagataggtgaggggctcgacggatttccagaacggcgagagctggtcacgggggctgccggcatcgtgcgtgatgatcgtgttgcggatgtcgacggtgtgctgcaagtcccagagcacgcgataagggctgaggggcgcgtcgttgctggtaagcttcggcatccatttcgccagccactccttgtgcgaggccgcgatctcggcggcgaccgcggaggcgtcacgatcggatgtgacggtcctgccgatctcctccagcagcgcgtccagcacgaggccggcgtcgccgaccaggccgatcttggcttccacgtccttgttgagatgattgggatcgagcgtggaatggatgatggtcttgcccttcggcatcgcaatgccgaagttggtttcggtgaaggagcagccgatgccgaagatgacatcggcttcagtcagaaatttcggcaccgcgcgcggcacggcgagcccgccggagccgagcgagagcggatgcgtttctggaaaggaggatttcccgcccaagctggtggtgactgggatcgccagccgctccgcaagccgtttcagctgtggccacgcctgcgcgtaatgcacgccctggccggcatagatcaccggccgctttgcattcacgagcaggctggctgcttccttgacgtgaacagggtcggcgccatagcgggtgcgcagcaccggcgtatagtcgagcggctccggcacctcctcattccacatgtccgcgggaatttccacgatgacgggcccgccgcggccgttcttcagcctggtgaaggcgcggcggaagatgttggcgacttcagtggcgagaatgatcggctccgacgatttcgaaaacggcttcatcgcctcgctggaattgaagttcggctcgatatgcgcaagccggcgctgatagcccatcggcagcaccaggacgggcacggattcgccgaaacactgcgcgacgccgcccatcgcgttctccgcgcccggcccatgctgcatgcagaacgcgccgatgctgcgccccgacgtcacccgcgagatcgcatccgccatgtggatcccgacgcgctcctgccgcaccatcacggggcggatctcggctttggccgcatgctcgatcagatggttgacgggatagccgcagaggatctcgattccctcgcgcctcatgatttccgcaatggcggtgccgagcttcatggcgtctctctccttgggctaggccggttggtccggctgattaaaggtgagaggatcaggaattcgttgaggcgtaaagcgggagcggccaacagcccggtaggtcagctatgcaacgagctgcagcgaagcatccaaagcccctcggcggaaagattctggatcgcttcgcagcaagggctccttgctatgacgaatgttgggagtaacgctgagagctatctcggccatcagcgttgctctacgcgttttcctccaacgcgcggcgcagccttcggatgatgaccccgcggacgcggtcgtcggcggcggcggcaatacgatcgttgatatcgagcatgagctcggacatctcgttgtgccagtcgagacgggtcacggcctccggcgagagccgccggcgatgatctgggtcgagcacgcgcggttccggtgcggagagctcataaatgtcgtccagcatcggctggtagaccttggctgccggtatgatgcgtccggccacgcgctcggccagcccggcaatcgcctcttcctcgccgtgcaccaaaaacagcccgcgggagatgggccggcgcgccgcgatccagctggccatgccggcaccgtcggcatggcccgaatattcgtcgatcatgcggatgcgggcggcgaccttgatctcctcgccctggatccgcacggccttggagccgttctggaggaagcggccgagcgtgccgttggcctggaagccggcgagcagcacggtcgcacgctcgttccacagccagcgcttcaggtggtggcgtatgcggccggcatcgcacatgccgctcgcggcgatgatgatgtggaacccggacaggcgcatgatggccttgctctcgtccgccgtctcggtgaatttgagatgcggcgagttgagcaggcgggtgacgtcgacggacgggtcgaggctctcggcatgtcgccggaatacctcggtcgcgcggatcgcgagcggagaatcgaggaagatcggtgccgtcggtatctcgccgtgctccatcaggtcgacgaggtcgacgatcagctcctgggtgcgctcgaccgcgaaggcgggcagcagcagcgcgccgcccgccgccgcagcatcgcgcacctcggcggcgaggtgcttgcggcggagcgcaggtgtcgtggcctcacgtacccggtcgccataggtcgcttccgagatgacgtaatcgaagtcggtcggcgcttcgggatcgggctggagcagcttggcctcgggtccgacgtcgccggagagcagcacgcgcagcggacgcgtcgaggctcgctcggcgatctcgagctcgatcgaggcggagccgagcagatggccggcgttccagtagcgcgcgcggacgcccgggatcacgtcggtccagcgttcgtaatcgaccggacgaaacgactggagcgatgcgatcgcatcggcctgtgtgtagatgggcgctacctgcttgcgcccgcgcgaggcgttgcgccggttgagctgcgtgacttccgattcctggatgctgccggcgtcggggagcatgtaggagcaaaggtcgatcgtgccacgcgtcgccaggatcggcccctcgaatcccgcgcgcacgagttttggcaagagaccgctatgatcgatgtgggcgtgcgtgagcagaacggcatcgatatcggcggggcgggacggaaaggggccgtagttgagctccttcagcgtcttctggccctggaacaggccgcaatcgaccaggaaacggccggccgccgtctggaacaggtagctcgagccggttacggtgcgggcggcaccgcagaatcgaacggtgatgctcatgtcgtccttcccggaagatgtgtcgtcgtcagttcggaccgcaaagcggcggcgagaatttcgtcgagcgcaatcgcattggtcggatgcggtacgctgtcggtcgagcgaacagaccgtatgccggcctcagcgaacgcagccaccatcgcggctggaaacagggcatgcgtcacgactgcatcgacggagatggcgcccattgctgtcagcgcctttgccgcggcgatcagggtcgtgccggaggagacgatgtcgtcgaccaagagcgtcggtcgtcccaagagcagagcgggatcggcaaagctgagcgccacggaacggtcaccgtgccgggtctttcgcgccactgtgtgctgcaatcgcaatcgcctcgcgacatcgctcacccatggctcggactccacgtcggggccgattacgacggtcgacggaccgacgctgtcctttgccagtgcattcgcgacggccggcatggctgacagattctccgcttcgatgccgggaaaaacagacctgatgtcgggagtgcgatgcaggtgcgcatccacggtgacgacgcgatccattgtcgttgcaagcaaacggcccatggcgcgctggctgatggcctcgccggcatgaaatgctgcgtcctgccgcatgtagcagagatagggcgcgaccaggaccagccgcctcgtgccgttacgtcgcagggcttcggccgcgaacagcagggtgatcagcttgtcgttgggttgatcgagcggggcgtagagaatcgtcgtgtcggtcgccggcgcgacggcgacgcgcagttctccgtcgggaaaacgatgcaccgcgatctcgccgcaggcgagcccaagccgcgctgcgagccgcttcgccgcatcggcgccgcacgacaatgtctggagcgcgatcgtgctcacggcgtcgtcttgcccgggggcgtctcatgaccgttgatcaggtagccggtctcctctgcggtggccgctgcggccagatcatgctcggggctatcgaaggtgtagacgcgatagagcggctcgccctgctcgacgcggtcgccgatcttcttgaacaagcggatgcccgcgcccttgtcgagcggcgcgccggcggtgcgggcaaggcgattcatgcgcaggcagtcgattgcggatacgacgccatcatgcgttgccttgacgtcgaagctgagcggtcccagctcggtgctgcaggtggagggaccctgggcctcgatgatcttctgcatctgcttcagcgccgcgccgctgtcgagcagctcccgcgcgcgcgcatagccggccccgccgcgcagcttcggatcgtactccaacagatgggcggcgagccgcagcgacttctcgcgcaggtcgcgcggcgcgtccttctcgttgccgagaacagccacgacgtcgttggcctcgagcaccgggccgatgccgttgccgatgggctggctgccgtcggtcgtgatcacctcgacggcgcggccgaagcggtcgccgacgaattcgaacagcttgcgcagacgcatggcctcgacgccgccggtgaccttggcggtcggcccgaccggaatgtcgatcaacagatgggtcgagcctgccgcgatcttcttggacatgatggaggcgaccatctgctcgcgggtgtcgagactcagcgggcgttcgacagagatcaggacgtcgtcggccggcgacaggttcacgtgcccgccccagatcaggcagccgttgcagtccgaaacgatcgccttcatctcctcgacgccgatgttcacccgggccagcacctccatcgtgtcggcggtgccggcaggcgggtgatggcgcgcgaggaggtcttcgggatcggcaggccatgggcggcgacgatcggcaccacgaccatcgaggtgcgattgccgggaatgcccccgatgcaatgcttgtcgacgacgacaggggtcggccagaccagttgcgtccctgcctgcgccattgccccggtgagggcgagaagctcgtcgctggtgatgaagctcgccgaaccgatcaggaacgcggcgatctccatgtcggagtagcgataatgcgcgaggtcgctgatgatcgcgccgatctcggcctggctcaaggttcgtccccggatctttgcgcgcacggcttccaggctctccggaggcgaggcgggcctgaccgtgacaagtgtgccgatgggctccgcaaagcgccggaacgcaggctcggagagaccgatctcgtccggaccggccagcatctcgtcgtccgtgatcagcaacgttgccagcagaaccttgccgccctgacgaagctcgacacggctgaagccgcggaagatctccgcgcgcagcgccttcgaatgcctggagacgacgacgacgttctcgcggccggtatcgaggcggacacggcggattttcagtcgggagtgcggaaggtctggatgcatgggcgggccggcagcagggagttggatctccatgcttagacgtcgccgtcctgatgctgttgactcagatcatggcctgcgacagtggcagactcgcgtactgtcgcgacatcctcgagctcaggaggcgccataggtcggggggccgcctacttcgtcgctgcgctgatcgagttgaacttgttgttcaggagggcgccgcccgtgctgttcacgacggtgacgatagcgagcgtaatgccggcggcgatcaagccatattcgattgcggttgcgccattctcatcggcaaggaaacacctgatcagacgcattgccacctcctgttcatccgatccaacgtatggccgcgtctcatcggaagcatcaatcaatcgaacaagtcttatccgccaatagaattaagtcagggcgagcccgccaccgctcatacgacggcatccattaaatttgggttccatcgattcgttcaaatggactcaaatcgggtgccctcggggctctgagggcgggatgcgctgcagggccgtggttcgcgcggcttcttaaccgtttgttgagcttgccggcagggacgtctctgccgctcatccgcgccggcccgttgcattcagcgcccgcaatgtcgcgatgcgggcgaacatcacccagccgccgcccgtctcggccgcattgatcaaggtttcgatcgcggtctgccagtgcgcctcgtgctgaacgtcgtcgggcagctgcatgatgtagtcagccgcatcttgaagcgtgagcagcttgattttgttgctcacgcgaacgggatcgtcgaacgcggtcgaccacggcatgtcaggccggccgatcggcgaagagagacatcacggcgcgaccgcgagccggttgctgtcagccggctttcttcgcgcgcgccggtgcccgtaccggcttgtcggccttcctcgccggcgttttcgccgcagcatccttgccgcccttgccggcgatcggcagcagcatctcgcgctgaccctcgacgcgcttcttcggtttcttggtcttggcagtttccttgccagtttccttggcggctttcgcggttggcgcagcgtccttctcgttcgcgatgctcttcttcagcgcgtccatcaggttgatgacgttgccgccggtcttcggcgcagccttcgcgctgatcggcatgccgctgcgcttcttgttgatgagatcgatcagggcagtctcgtaatgatcctcgaacagctcaggctcgaaggtgccggatttcttctcgacgatatgcctggcgagatcgagcatgtccttggtcagcttcacgtcctggatgtcgtcgaaatactccttctcgctgcggacctcgtaaggatagcgcagcagcgtgcccatcagcccgctgtcgagcggctccagcgcgatgatgtgctcgcggttggtcagcaccacgcggccgatcgcgaccttgtccatgctgcggatggtctcgcggatcaccgcataggcgtcgtggccgaccttgccgtcgggcacgagataatagggacggatcagatagcggctgtcgatgtcggccttcggaacgaactcgtcgatctcgatcgtgtgggtggagtcgagcgcaatgtcgtcgagttcgtcctttgtgatctcgatgtaggtgtcggtgtccaccttgtagcccttgacgatgtcctcggaggtcacctcgtcgccggtctcggcgtcgaccttgagatacttgatgcggtggccggtcttgcgattgatctggttgaacgagaccttctccgtatccgaagtggccggatagagcgcgaccgggcaggtcacgagcgacagacgcagaaaacccttccaattggcgcggggggccatgggctactccagacgcaacagaggacaagtgttgaggataacattgccgaggtgcgaatcatagcaaccgccggcgcggaatcttgcaacggcgttaatcgccgcctgcgccgagttgcccggcggctccatggttcggaacatcgcccgcgatcacgcgttgccccgccaataagacgccgcgaggaagtcgcggccacctgacgcgacagccacagattgaggacaccatggcaaccacacgagagcagaagcgcatcgtggaaactccgaccgaggcgcgccagggcgagcccgggccgtccgtggcagcgttgctcgccatctcgaccggccttgcaatcctgattctcgccgtcgtctggttcgtcttcttccggacctgacggccggatccggacagccgggatctttccggctcgcggttcgaagtatcacttgcgcccgccatgccgccggctcgtcccgcggcatggcgggcgcaatagcatttgctggttgcaggtcgtatatgaccaaaaagtaacgcaggcggttcccttcgttcatatccagttcacgccggaattgctcatctcgggtggtgttcatgcagccagttcttgcggctatctttggagagacgtgtgcgcctgctcgttgttgaggacgaccccgatctcaatcgccagctcaccaaggcgctgaccgacgccggctatgtcgtcgatcgagccttcgacggggaggaggggcattatctcggcgacaacgagccctatgatgccgttgtgctcgacatcggcctgccgaagaaggatggcatctcggtgctggaggcctggcgccgcaatggccgtaccatgccggtcctgatcctcaccgcgcgcgaccgctggagcgacaaggtgcagggcttcgatgccggggccgatgactatgtcgcaaagccgttccacctagaggaggtgctcgcgcgcatccgcgccctgctgcgccgctcgaccggacacgcccagagcgagctcagctgcggtcctgtcacgctcgacaccaggaccggccgcgtcagcgtttcaggcaatcccatcaagatgacctcgcacgaatatcggcttctggcctacctgatgcaccattccgggcgggtggtctcgcgcaccgagctggtcgagcatctctacgaccaggattttgaccgcgactccaacaccatcgaggtcttcgtcggccgcatccgcaagaagctcgacgtcgacatcatccagaccgtccgcggcctcggctatctcctgacgccgccgcctgcgcccggcgcgtaagggcgggacgtcgagcggtccgggcttgacggccgcgctgacacgggccttgttcggcccatgacgtccgacaacctgacttccagcccctgccgggaccgttccgatggccgctagctcgcttgcgaaccgactgttcttgtcggcgacagcctggctcgtggtgatcctcgccatcacgggcgtcgtgctgtcgtcggtctacaaggatgccacggagcgcgccttcgaccgccggctcaatctctatcttcggacgctgatcgccgaggtcgcgaccccggacgagccgccggaccgccagttccagtccctcggcgagcccttgttcgagctgccgctgtccggctggtattggcagatcacgcgcatcgacaccgagaagccggaggtgcgctcctcgcgttcgctctgggacaagaagctgccgaagctggaggaccagggagccgagctcaccgccgccggcatccggctcgcttacgtcgatgggccggaagggcagaacctgcgcatggtggagcggccggtcgatctcggcgccgacggcaagtttctcgtcagcgtcgccggcgacgacaccgagatcttcgacgagacgcggagcttcgattattatctcggcggcacgttcaccgcgctcggcatcgtattgctgctgacgaccgtgttccaggtccgcttcggccttgcaccgctcaagcgcatctcggaagcgatcgccgacatccgctccgggcgggcggaacggctcgagggtgaattcccggtcgagatcgcgccgttggcgcgcgagaccaacgcgctgatcgacgccaatcgcgagattgtcgagcgcgcgcgcacccatgtcggcaatctcgcgcacgcgatcaagacgccgctctccgtcatcgtcaacgaggctggcgctcacgccgccgatccgttcgcggccaaggtgctggagcaggcggacgtgatgcgggaccaggtcacccaccatctggagcgcgcgcgcattgcggcgcgggtctcggtggtcgcgacggtgacggaggtcgcgccagccatcgaggcgctgcggcggaccatggagaagatccatcgcgaccgcggcatcacggtggaggccaaggccgatccatccgcgaagttccggggcgagcggcaggatctcgaggagatggtcggcaatctcgtcgacaatgcctgcaaatgggcggcatcgcgcgtcttcatcgaagtcgtggtccagaccccgcaccaggccggcgccagcccgcatttgcggatcatcgtcgacgacgacggccgcggcctgtcggaagccgagcgcgcgcaggtctcccggcgcggccagcggctcgacgagtccaagccgggatcgggactggggctgtccatcgtggtcgaactcgccgcgctctatggcggcagcctttcgctcggcgctgctccgaccggcggcctgcgggccgaattggtcctgccgggactgtagccccttgtttggacgcggctttttgtcctcgctgctcaccgtctggagggggccttggccattcgaccgcacttcctaaacggcttcttaagtggggtctcctatgatcgcgcccggacgcatcccatgtccgccattttaccgtgcattacccgggcgcatgagccagacatcgatcgagcggctgagggaatatctcgcgcagctcccgccgcagtcgcaggcgctgctgatgcgggagttcgagcgtgcgctggaacgcggccaggatacggcggttgcgaccctcgtccttgagcaattgcgcaagatcgtccgcaagagcgaagccgatgaagcgcccgcgccgcgcacggacgatctgtcgcggctgctgttccaggtcctggaaccgttcctggtcgaggcaggcaccccgatccgggccggccagatccgccgctcctcgctgcagccgatctggcaatggctcggccgtgacggagcgccggccaaggtgaacgaattcgaggcggcgctggcgcgcatgcctgccgatgctgcaggccaggtcgaggccttggcgcagaagctccaggcggtagccgcggacgcgattttcgagctgaccggacctggcggcggcgacaagacgcgcgcgctggcccgggtcggcccgcccaatgtcatcgaggatctctattcgatcggtgcggtgcttcaggtccgggaggccatcgccagcctgaacgagaggctcccgcgcttcctgcgcgcattcggcgattcccagatcgcctcggtgacgtcggcgctcaacattccggtgctgcaaacgccgcagatgctgcccttcgcgctctcgatggtcgtgcagcggatgaccgcgccctggcagatcatccgcctcgcgatcaagattgccgcgtccgacgacgagatccgcgtcgcggcgacgccttatggcgttgcggtcacgatcgcgctgcatgatctgtcctgcgttgccgcgatccttcgcatggacatcaagcgcggccatttcgacaacgtcgccggcaatctcaagacgctgcacgatggcgtgcgcggcctgcgcaccgagctcgatctgcgcaacgattctgcctggggcaagcagttgacctcgatccgggccgacatctccaatgccctgcaatccgagatcgacagcgttcccggccgcgtccgccgcatccttcgccagcgcccggagaaggacattccgccgggcgcgcggatcgacagtaccgaggtcgaggaagcggtcgcgctgatcgacttcgtcgcgacgtgccgcaattatgcaagcgagcttgccatcaacgaggtgacgctgcgcacctattccgatctccagcaatatgtggaacggtcgaccgagcagctggtgcagtctctgcgcgccgccgatcacaaggtccgcacctatcggcagcagcaggtgcaggccgctatccgcttctgccaggttctgttcggcgacgattatgcctccctgatgagtcgcgcggcagagaatgcgctcacgggcgagcgcaaatcgtcacgcgcaagctgattgagcgcatgttttcgtgatcacaatttctggttgacggtgccggtggcgggccgtacggtccccgtgaaaatccggggaatttccgtttgtgggcgcatgaaacccgtcatcagctctatcgaaatcgagaaccgagtcatcgtagccaagtaccgcaggctgatggttggcgccaaagtggtgctggtcgagaaggcaagcgatcggcaactgcctgagacgatcacgcgggttgcatctcgggttccggtcggcgcggtgcgcatcagattgccggatgcgatcaagccgggaacatacttcctgagggccttcaacgggcacggcgaggacgcggcgcaaagcgcggatttcgagatcggctaagccgttggagtatcacattttcgagcctgaaatggggtcgcgtggaattgacaattgtcaattgccgcattgtccggccgtggtgtaaaggcacctataggcgcggttcgcgcgccgccggaagcttgccagatgacgctatggttcgtgttcgcgctgatgacggtcgcggcgattttcgccgtgctctggccgcttggccgcggtagccgcgcgccggaccagggcagcgaggtcgcggtctacaaagaccagttggccgagatcgagcgtgatctcgccgcggggttgatcccagccccggaagccgaggccgcgcgcgtcgagatcagccgcaggctgcttgcggcggcggccagcgagcctgcaatggcgccgaagtcgaacctcaaatggcgccgtgcggcggctgtgctggcgctcggcggcctgccgctcgtcgccatcggcgtctacatgccgctcggttcacccaggcttcaggattttccattggcgcagcgggagcgtgggacggggtccggcatggcccagtcgctcgagaccctcgtcgcccaggtcgagcaacatctggagaaaaatccgaccgacgggcgcggctggaatgtgctcgcgccggtcctggagcggctcggtcgcttcgatgacgcggtgcgcgcctatcgcaactcgctcacctataatggcgaaagcgcggagcgccggtccgatctcggcgaagcgatctcggctgcagcgggcggcgtggtgacggccgaggccaagactgaattcgagcgtgcgcacgccctgaatgcggatgaccccaaggcgaactacttcctcggtctcgccgccgagcaggatggccgcaaggacgaagcagccaggatttggcgcgccttgcttgcaaaggcgcccgcggatgcgccgtggcgcgctttggtgcagtcctcgctggcgcgggtcggtggaggcgatacgatgcctgcgctgtccgacgagacgattgccgcttccaaggatttggccgaaggcgatcgcaacgcgatggtgcgcggcatggtcgatcgtctggccacgcggctgaagcagaacggcgatgacgtcgacggctggctgcgcctggtgcgcgcctatctcgtgatgggcgagcgggacaaggcgaagggggcctccgccgacgcccggcaggcggtcgccagcgacgccgaacggctgcgccagctcgacgaaggacttaagactctcgggctcggcggatgacgatgtcgggacgagacgagcggagaacggatacgccatgacgcgcaagcagcgacgtatgaccatcatcggcggctcgctcgccgtgctcgcgctcgcagccgcgctggtgctcaacgcacttcgcgactccatcgtgttcttctcgacgccaaccatggtcgccgagaagcacgtcgagccgggcaagcggtttcgcctcggcgggctggtacagccgggctcgctgcagcgcggcgacaatctcgcggtgaccttcgaggtcgccgacggcaatgccaagctgccggttgcctacaagggcatcctgcccgacctgttccgcgaagggcagggggtcgttgccgaaggcgcactcgacggcaacggcgtgttcaaggccgataccgtccttgccaagcacgacgagacctacatgcccaaggaggttgccgacgccctgaagaagcaggggcactggaaggacgattacgatgccaaggcctcggacaccaaggcctcgggcgagagcaaacctgcggccacgaccgcacaaggcaatccgcagggagcgatgcggtgatcgcagaatccggacattacgcgctggtgctggcgctggcgctcgcactcatccagtccatcgtgccgctggtcggcgcgcggctgcaagatgccgccttgatgaacgtggcgcgctcgacggcgctggcgcagctgctgttcgtgggcgcctctttcaccgcgctcgtgatgctgcacgtgaactcggatttctccgtcgccaacgtctacgagaactcccactcgatgaagccgctgctctacaagatcacgggagtctggggaaaccatgaaggctcgatgctgctgtgggtggcgatccttgcgttattcggcggactggttgcagccttcggcaacaatctgccgttgtcgctgcgtgcgcacgtgctcgcggtgcaggcctgggtcgccagcgccttctacctcttcatcctcgtgacatcgaacccattcctgcgcatcgccactccgccgatcgagggacgcgatctcaatccggtgctccaggacatcgggctcgccgtgcatccgccgatgctctatctcggctatgtcggtttctcgatctcgttctccttcgcaatcgcggcgctgttggaagggcggatcgatgcggcctgggcccgctgggtgcggccgtggacgctggtggcctggatattcctcacgctcggcatcgccatgggctcgtactgggcctattacgagctcggctggggcggctggtggttctgggacccggtcgagaacgcctcgctgatgccgtggctcgccggcaccgcgctgctgcattcggccctggtgatggagaagcgcaatgcgctgaaggtctggaccatcctcctgtcgattctgaccttctcgctgtcgctgctcggcactttcctggtgcgctccggtgtcatcacctcggtgcatgccttcgccaccgatcccacccgcggcgtgttcattctgctgatcctctgcctgttcatcggcggaagcctgttgttgttcgcagggcgcgccacctcgctgaagcagggcggcctgttcgcgccgatctcgcgcgagggtgcgctggttctcaacaatctgctgcttacggtcgcatgcgcggtcgtgctgttcggcaccctctatccgcttgcgatggagatgctcgccgacttcaagatgtcggtcggcgcccccttctacaatctcaccttctctccgctgtttgccctgttgctgcttgcggtgccgttcggaccgatgctggcgtggaagcgcggcgatctgcttggcgtggcgcagcgcctgctcgcggcgggcgtggccgggctcgtggtggttgccatcgtctggggctgggcgcgcggcggcagcgcgctggcgccgctcgcgatcgggctgggcgtcttcgtcatcgccggcgccgtgaccgacatcgtcgagcggaccggcctggtccgcttgccgttcgcaagtgtgctgcaccgtgcgcgcggcctgccccggtcggcctggggcaccgcctttgctcatgcgggcctcggcgtcgctctgatcgggatcgtctgcgagaccacctggaacagcgaatacatcgcgaccatgaagcagaacgacgtcgcccatgtcgccggctacgatctgaagctggacgggctgtttcaacgccagggcccgaactatcgcgagatgatcgcggagttcaaggtcagccgcgatggcgagccactcacggtgatggcgccctcgaagcgcagcttcacgacgcgcggctcctcgacgaccgaggccgcgctgctgaccagcggcgcgagccagctctacgtctcgctcggcgacgccaccgccgaaggcgccattgccgtgcgcatctatcacaagccgctggtgctcctgatctggtgggggccggtgctgatggcgttcggcggtgtgctgtcgctctccgaccgccgcctgcgggtcggtgcgccgaagcccgcgcgggccaggcagcgcctccagccggcggagtgatccgatgcgcaggatgatggccgccttcgtcgcgttgctgctgctggccctacctgcggcccacgccgtccagcccgacgagatcatggcggaccccgccaaggaatcgcgcgcgcgagagctgtcgcgcgagctgcgctgcatggtctgccagaaccagtccatcgacgattccgatgcgccgctggcgcgtgacctgcggcttctggtgcgcgagcgcattgcggccggcgacagcaactcgcaagtgctcgacttcctggtcgcgcgctacggcgagttcgtgctgctgaagccgcgcttcgagcggcagaccatcctgctgtggctccttggacctctgctgctgattgggggtggtctggcactctggctgcaaatccgacggcgctcgcggaatggtgttgatgtaccggcggcgcccctcacgcccgaggaagaggcgcggctcgcggccttgatgtcggacgacgccaagtcctcctgaagccgagccacgtagtgctacgtgggccaccggcccgcggcgcgtgcttcatgctatgttgacctttgtctggaaacttgtccgggatttcaatccagaccctgagtgcctccccaatgttcgcgaacagcaatctgacgatccgattcctggtcggcgcggtcgtcgctgcactattgttcctgttgggcatcggcggcggcaccggcttcatcgcggtgctctatctcaacaacgagatcaccagcctgtcctcgcagttcgcggccctgagcggtcccgcgcgcgaccatgcgatgcagatctatcagcaggcgcagaccgcgttctcctatttcctgatggcctgcggcgtgatcgccgtcctcgccgtcgcgatctgcatcaccacctggtttgccgtgcgtaacggcatcctcaatcccctggcggcgatcgtgcatgccatgcgcgaggtcgccgaccagaaattcgagacgtccgttcccgggctcggccgcaccaacgagatcggcctgcttgccggtgcgctggaggtgttcaagacgaacggcctcgagcgacgccgcctctccgagcagcagctgcacgaggctcagcatcaggccgagcggtcgagattcctggacgatcggatcaagcgcttcaacgatctcgtcgccagcgtcgtcgacagcgtggcgtcctcggccgtgcatctgaagaccaatgccgagacgctgtcgcggacagccaacgacaccagctccaaggccaatgcggtcgcgagcgcagcgagccaggccagcgccagcgtccagacggtcgcaggctcggccgaggagatgacgaattcgatcgtgacgatcagccgccgcgtcacggatgcgacccagcgcgccgaaggcgcagcgtcccaggcggaaaagagccgtgacaccatccacacgctgtccgatgccgccgacaagatcggcgaggtcgtccagctggtgcaggcaatcgcatcccagaccaatctgctggcgctcaatgccaccatcgaggcgnnnnnnnnnnacgggcaggggaggccggcaagggatttgcggtggtcgcctccgaggtgaagaatctggcccatcagaccagcaaggcgacggaggaaatcacctcccatgtcgccagcattcaggggatcaccgcggagacgcgcggcgcgatcgacggaatttcaaagacgctttcagagatttcgtcgatcatgtctggcattgaggtcgatactgacctgcaacgcaatgccacgcaggagatcacgcgcagcgcccaggacgccgcgcacggcactctcgatgtctccaaccatatcgtccagatcacctcgacctcggccgagacgggccgcatggcggccgaggcgcgagattccgcggtcgacctgtcgcagcaggccgagaccttgaagcgcgaagtcgacgagttcatcgccagtgtcagggcgagctgagagctcaatatctcgattttccccgctcggcggaagctcgcgtaagttcctgtaatatcggaactttcggtctgcgataaaccgccgcatccgcgcggcccttcattacgaaagtttaaccccgccgccagcgcgcggtaaggcgggagtccccatcttcaggtccgcaaggtgctggcatccggcaccaaaaggaattcaaggcctggagatttctgcatgaccgaccgtatcgacctctcgaaccttccgtcgtaccggcagccgcgccggtcggtgttctccgcgcgcaggctcgcgctgatggcttcggtcgtcgcggggctcggcgcggccgtctatggcttcagtccgtcgacgtcaccggccgacctgttctccagtccggcgcatgcgcaggtcaacaacgaggttcgcaaggtcgaacgcccgatcggcttcgccgatatcgtcgagcgcgtgaagccgtcggtgatctcggtgaaggtcaacatgaaggagaagaccgcgagcaatgatgacggcgacgattcatcctcgccgttccagccgggctcgccgatggagcgcttcttccgccgcttcggcggaccggatggcttcccgggaccgggcatgaggggcggtcggggccgcgtcgtgcagggccagggctccggcttcttcatctcggctgacggctatgccgtgaccaacaaccacgtggtcgacggtgccgacaaggtcgagatcaccaccgatgacggcaagacctataccgccaaggtgatcggcaccgaccagcgcaccgacctcgccctgatcaaggtcgagggcggctcgaacttcccgtttgccaagctcgccgacggcaagccgcggatcggcgactgggtccttgcggtcggcaatcccttcggcctcggcggcaccgtgaccgcgggtatcgtttcggccagcggccgcgatatcggcaacggtccgtacgacgacttcatccagatcgacgcgcccgtgaacaagggcaattccggcggtccggccttcgacaccaacggcgaggtgatgggcgtcaacacggcgatctactcgccctcgggcggcagtgtcggcatcgcgttctcgatcccggccaacaccgtgaagagcgtggtcgcgcaactgaaggacaagggttcggtcagccgcggctggatcggcgtgcagattcagcctgtgacgtcggacatcgctgacagcctcggcatgaagaaggccgagggcgctctggtggcggagccgcaggccaacggtccggcagcgaaggccggcatcgaatccggtgacgtgatcacctccgtcaacggcgaacccgtcaaggatgcccgcgagcttgcccgcaccatcggcggcatggcgcccggtgcgaccgtgaagctcaacgtgctgcacaagggccaggacaaggtcgtgaacctcaccctcggccagttgccgaatacggtcgaggccaaggccgacaccgacaaggatagcggcaagggtgccagccgcggcaccgacgtgcccaagctgggcatgacggttgcgcccgccaattccgtggccggcgccggcaaggaaggcgtcgtggtcaccgaagtcgacccgaagagtgccgcggctgaacgcggcttcaaggaaggcgacgtgattctcgaagtcggcggcaagagcgtgagcacggccagtgaagtccgcgaggccatcagcacggcgcggaccgagaacaagaacagcgtcctgatgcgcgtgaagagcggcggccagtcgcgcttcgtcgcggtgcccctcgccaagggctgagcgcttcaggaggccacgagatgaagggtgtcgcaggcatcagtcgcccccgccgcggcgcccttcggggaagcagcgcaacgtttgcttcccctatctaccttccggtggaatacgcccccctccgtcggaaggcctagggcggtgaagtccccccagcttcaccgcccgcctttttctcaatgccggcgtctctcgctcggcttgcatgcgattgccgcccgcgccatgtttagagaaggttgacctccttgaccgccgccgaacgcacgatgcgcctcctcatcatcgaagacgaccgcgaatccgccgactatctcgccaaggcgtttcgcgaagtcggacacattgccgaccacgccgccgacggcgaggaagggctcgccatggccgagaacggcgattacgacgtgctcgtggtcgaccgcatgctgcccaagcgcgacggcctgtcgctgatcggcgcactgcgcgacaagggcaacacgacgccggtgctgattctctcggcactggggcaggtcgatgaccgcatcaagggcctgcgtgccggcggcgacgactatctgccgaagccttattcgttcgccgagctcctcgcccgggtcgaggtgctctcccgccgccgcggcggtcctgccgaggatacgctgtatcgtgtcggcgatctcgagctcgatcggctgtcacatcgcgttgcccgcggcaaggacgagctgacgcttcagcctcgtgaattccgcctgctcgagtacctgatgaagcacgccggccaggtggtgacgcgcaccatgctgctcgagaacgtctgggactatcatttcgatccgcagacgaacgtcatcgacgtgcacatctcgcggctgcgctccaagatcgacaagggcttcgatcgaccgctgctgcacacgatccgcggcgccggatacatgatccgtgacggcattcggtaaactcgtccgcaccacggcgttccggctgacgctggtctacctgctgctgttcgcgatgttcgcggcttcgctgctcggctatttcgcctggaatacgcggcggctcatcaccgaagagatcacgcagacggtcaacgccgagacctcggagatcaacgagatctacggtcgccgcggcttgcgcggactcgtgctcgcgatcgagtatcgggcgctgcggccgggcgccaacctctatctggtgacgacgccgacggggcaggcgatcgccggcaatgtcggttcgctcgcgcccggcgtgatggcgacgcgcggctggtccgagaccgcctaccggcggctcgaggacgccgatgaccgcgatcatcgtgcgctggtgcgcgtcaccgaactcgagaacggcttccggcttctgatcggccgcgacctcgccgagcggcgtcgtttgttcggcatcgtcgccaaggcagcgcaatggtcggtcctgatcgtcgtcgtgctcggcctcggcggcggcatcttcgtggcgcggcgtgtcttgcgccgcatcgacgccatgaccggcaccacgcagcggatcatgagcggcgacctcagcgagcgcttgccagtggggcgcagcggcgacgagctcgatcggctcgccgagaacctcaacgccatgctggagcggatcgaagcgctgatggcggggctgaaggaagtctccgacaacatcgcgcacgacctcaagacgccgctgacgcgcttgcgcaaccgtgccgaggaggctctggccaagtccggctgcgaggcggactaccgcgccgcgctggagcggaccatcgaggaatccgacgggctgatccgcaccttcaatgcgctgctgatgatcgcgcgtgccgagtcgggccaggcgcgcggcaacatggatgatttcgacgctgccgaagtcgcgggtggcatccacgagctctacgagccgctggccgaagaggacggcatgaccctgaaggtcaaagccgagccgacgccggttcacgccaatcgcgagctggtcagccaggcgctcgccaatctcgtcgagaacgcgatcaaatatggcaagccggcggcacaggcagcgggaaccgtggtcagcatggacgccaggcagatcacgattgaggcgaggcgggaaggcgagcaggtgctgctcagcgtcaccgaccgcggcccggggattcccgaagccgatcgcaagcacgtcgtcgagcgattcgttcggctggaggccagccgcacgctgccgggctccggcctcggcctgagcctcgcctcggcggttgcgaccctgcacggtggcgaactacgcttgggcgccgcccaccctggtctcgtcgccacgctcgtcctgccggcgcgtacgggcgcgggcgacagggttgctccgccgctgcaggatgtgccacagaaggtggcatgaaccactccgcgccgggaaacgcggacaagcatggtgagagactggccgcgcgctttgcggaagctccccatattgccgcttccgcaaccgacgaaagacgccttgagaattggctggccgaactcgagccggctcaatcggctcgtctcgaatccctgctggctcatcctttcgcgcgggatatcttgaccggcatcgcggaattctcgccctacctgttcgatctcgtgcgggccgatcccctgcgcctgatccgtctgctcgactgcgatccggatgtgcatctggcggggctgatggcggaggcgagggacgccgtgctcgcagcccccgacgaagccgaggtaatgcgcctgcttcgtcgcatgaaggcggaagcagcgctgctgatcgcgctatgcgacatcggcggcgtctggccggtgatgcgggtgacggcggcgctgacagacgttgcagtgttctcggtgcaggcggcgcttcggtacctgctgcggcaggaagccgcacgcggcaagctctctccgtccgatcccgaggctcccgaagagggctgcgggctgatcgtgctcgcgatgggcaagatgggcgcgggcgagctgaactattccagcgacatcgatctcatcgtgttcttcgaccccgaggcgaccacgctcgcgcccgatatcgaaccgcagccgttcttcgttcgtgtgacccaggggatggcgcgcatcctccagcagcgcacctatgacggctacgtctttcgcgtcgacctgcggcttcggcccgatccgtcctcgacacaggtggcgatctcgcgggacgccgcgctgaactattacgagcgggaggggcgcacctgggagcgcgccgccatgatcaaggcgcgtgcctgtgccggcgatgccagggcgggcgaggcgcttctgtcagagatcgcgcccttcgtctggcgcaagcatctcgactttgccgcactcgccgacgtgcacgacatgaagcggcagatgcagacctatcgcggccagagcgaggtcgcagtcgaaggccacaacgtcaaggtcgggcgcggcggcatccgcgagatcgagttttttgcgcagacccagcaattgatagcgggcggccgccatccggaattgcgggtgcggccgacgctgaaggcgctggatgtgctcgcctccagcaactggatcacccacgcggcgcgcgacgagctgaccacggcctacgagttcctgcgccgcgtcgagcatcgcctccaaatgatcgctgacgagcagacccacacgttgcctgaggacaggcaagcagtcgagcgcttcgcgtggttcttcggctatccggatcgcgaggcctttgcgcgcgacctcttgcaccagctgcagatcgtgcaggggcactatgaaaagctgttcgagggcgatgatccgaccgggacggccaagctgccggcgctcgactatagtgccggccccgaggacccgcgcctgcttcagcacctggcgacgctcggcttcaagaagccggccgccgtcgcgcagacggtgcgcgactggatcaccggcgactatcgggtgttccgggttgaggcgacccggaatgctttcgtcgagttcgtgccggctcttatcgacggacttgcccatgccgaggaaccggaccgcgcggtcgtggcattcgatgatttcctcgcggcgctccagcgcggcggccggctgatcacgttgctcggccagaaccgcgatctcgtcgcgctggtggcgctggtgctgggcgcggcgccccggctgggcgaaatgctggcgcggcagccgcagttgatggacggtctgatcgatccgcgcttcttcggcgccatgcccgaccgggaggaattgtcgggccggttggctgcgaccgtgcaggacgccggctcatacgaagagttcctcgatcggctgcgcctgttcgggcaggagagcctgttcctgatcggcacgcgcatcctgtccggcaccgtctctgcgcaacaggccagcacggcatttgccgacgtcgccgaaggcatcgtccacaccgtgcatggcctcgtcgccgatcgcttcgccgcccagcacggccgcatcaaggggcaggagaccgcgatcatcgcgatgggccggctcggcagccgcgagatgacggcctcgtccgatctcgacctgatcctgttgtacgatttcgacggcgagcatccggactcggacggacccaaatcgctgcacggcgcgcattatttcgcgcgcttcacgcagcgcctgatcagcgcgttcacgacgcgcaccaattacggcgtgctctacgagatcgacatgcggctgcgtccgtcggggcgcgccggcccggtggcctcgagtctcgtttcattcgcggactaccaggccaacgaggcctggacctgggagcatatggcgttgacgcgcgcccgcgtggtgtcggcgtcggacgccttccgggagcggatcgagcgcgtcatccgggacgtcctgacccgccgccgcgatcccgccatcaccgccaacgacgtcgccgacatgcggcgcgcgatcgcccaggaaaagggcgaggccgattgctgggatctcaagcatgctgccggcggcatggtcgacatcgacttcatcgcgcaatatctccagctcgtgcacgctcacgacaagccggacatcctcgatgtcagcaccgtgcaggtgctggagaacgcatgcaggatcggcgtgctcccgcaatcggagaccgagatcttgcgtgcagcagcccggctctatcacgacctgacgcagatcctgcggctctgcgtcagcgaccggttcaagccggaaacggcgggcactgatctccagcgcgtgatggcgcgcgccggcgatgcgccggatttctcgtcgctggaggcgcgcgtgaaggaaacccagagcgaagtgcggcgcgtgttcagggcgctgctggaagggacgtagtctgcttcagcgatggaatggcctcgcggacttcaggtgcgaggcccgcgccgcctgcatccaccgctcaggcggctggtttttccgtgttggaagggagcaggcgtgctagcctgcgcgtcaccgcattgatccgagggacgaccggttgatcgacaagctcgaactattgctggcgctggcgaaggagcggcatttcggacgcgctgcagaggcctgcggcgtgacgcagccgacgatgtcgacggggctcaagcagctcgaggagattctcggcgtgatgctggtccagcgcgggtcgcggtttcagggctttacccctgaaggcgagcgggcgctcgactgggcgcggcgcatcgtgggcgatgcccgcgcgatgcgcgacgagatcaacggtctgaagcatcagctctccggcgagatccgcatcgcggcgatcccgaccgtgctcggcatggtcgccgcgctgacgacgccgttccgcgccaggcatcccgaggtgcggttccgcatccagtccaccacctcgtccgaggtgctcgggctgctcgaaaacctcgaggtcgatgcggggctgacctacatcgagaacgagccgatcggcaaggtgcgcaccattccgctctataatgagagctaccgcctgctgaccgcgccggacgcgatgttcggtgatcgcgagacggtgacctggaaggaagtcgggcaggtgccgctctgcctgctgacgcccgacatgcagaaccgccgcatcatcgaccgcgcgctgcgctcggtcggcgcggaggcaaccccgacgctgacctcgaactcgctgctggtgctgttcacgcatgtgaagacaggacgctgggcgagcgtgatgcccgccaagctcgccgagacgctcggcctgtccgacacggtacgctcaatcccgatcgtcgaacccgacgtcaactacagtatcggcatggtgatcccgcaacgcgatccgatgacgccgctgatcgcggcgctggtcaacgtcgcgcgagaggtcgcgccttcgctgcaattgtagattcgagcaggcgcctcgtccttcgaggcgcgcgaggggcgcgctcctcaggatgaggctccgtcccatcgcgctctgctgccgcgcactcatcctcgtcctgagggcccgccgcaggcgggcgtctcgaaggatggcgcaagcacgtaactggcgccacctcaagccgcggccgagatcccggccgctgccttgatcgcgtcgcgcggcagggtcacgcgcacgacggtgccgacctcgagcttggagcgcagccgcatcgagccgccgtggagctgcgccagcgagcgtgcgatcgcgaggccaaggcccgagccgtgataggtcttggtgagctggctctccacctgctcgaacgggcggcccagccgcgccagcgaatgcggcgcgatgccgatgccggtgtcggcgatcatcagcacgatcctgtcgtcgagctgccggctgcgcaccacgacacgcccgccgtcgggcgtgaacttcacggcgttggagagcaggttgacgatgatctgcttggtggcgcggcggtcggcgacgaccgagatcgattttgcgatgtcggcgtcgagcgtcaggtgcttgtcctgggcacggccggtgacgacccgcaaggattccgcaagtgtcttggagaggtccagctcctccatgtcgagtttcatccggccagcctcgatcttggacatgtcgagtatgtcgttgatgacctcgagcagataatggccgctggtcaggatgtcctgacagtattcctgatatttctccgagccgagctccccgaacatgcccgagcccatgatctcggagaagccgatgatggcattgagcggcgtgcgcagctcgtggctcatattggcgaggaacttcgacttggtctggttggcttcctcggcgcgggtcttctcgcgctggtacttctcggcgaggtcggcgagctcgaccgcctggcgctcgagcgcggcttgcgagcgcttgaggtcgatgaccgtggcgcgcaggcgcagatcgttgtcgaccagcttctgctcgtgctccttgatacgggtgatgtcggtaccgaccgagacgtagccgccgtccttggtgcggcgctcgctgatgtgcagccagctgccgtcgtcgagttgcgcctcgaaggtgcgtgcgcccgggccctggactccggtctcgttgtggcgggtgcgcacctcgggcatgcggccgacttcgagcaccgtctcgtaggaggtgccgggaatgacggccgtgtcgggcagcttgtgcaggcgctggaaatgcgagttgcagagcaccaggcggtcgctcgcgtcccagagcacgaaggcttccggaatggtctcgatcgcgtcgcgcaggcgtagatcggcttccaccgtcttttccgcaaggctcttctgctcggtgatgtcgacggcgatcccgatcaggtgaacgcttgaatcggtcgccccgcgcgtcttctcgcagcgaacgcgcagccagatccagtgcccgtcgacatgctgcatccggaaggtctggtcgatatggtcgatcttctcggagatgagctggtcggcgatctcgaacaggtcgatgtcgtcggacttcaccagcgcgttgacttcgccgaaagtgaggagctcgtggcggccgtcgaggccgagcatcgagaacatcgattgcgaccagaagatccggccgcgcgacaagtcccagtcccacagcccgcagcggccgcgattgagcgcggtgtcgatgcgcccgcgcacggcatcgttgatgaggtcgccctcgcgggcgcgggtcgactgccagtggaaggcgaagccgaggatcagcacgacgaagccggtggttgccgacagcgtcaccgagagcgcggcgtccgagccccagatcggctcgttgcgctcctggatcacggtgacgaagcccggcagcgacttgatctgccgcgaggtcgccatcgccgcattgccgttcggcaatgtcatgtcggagatgttgccgtcgcgcgtcggcgccgcgagcaattgggcggtcgtgatcgcatcgagcagccggtcgttgccggagggatcgctgtcgatcgggatgcgggcgaggacgcggcggtcgatgccagccgaggtgacgatgacgtggcggcccgaggccatgccccaggacggaatgagatccggcaacatcgccggcaggctgtcgatggtctttggtcggtcgtggcgcaccgaggtgaggcggtcgatgcgctcggcgagcaggtcggcgagcgcgctgatatcctggcggatcaccagccgcttctggcgcgtttgatcgaccacctgcacaaaggcaccgaggcagatcgtgatcaggaaggcgatgatgagcgtcggaacggcgcggcgcagcgccggctctgcgaccagcagccgatgataggcaggtttcgcgatcgattgcgccaatcccttgatcgaatcggattggacgcacgcgttcgcggcgtctgcgcgcgccatgccttcggccccctgaaaacgagcttcgaaagcagccccacgtcgctttcgaatcacactgatttgaatccagttttcgcgggctgtcgagagtcaacgaatcgttaacgcgaaattattcttatccaacacgcagtttgtgcatcgggcgtccgcaaacccacggacgcgaggagtccgaaacgggaacgtgtgtctcaccatgcgtccttcatcacgcgcgcggcggttccgcgtgactgatgacgcgcttcacgctcgggaatgcacgccgcaacgcgcgctcgatcgcgtcgacatgctcgtgcaccttgatcacgctcatcgacggcgctgcgcggcaatggaagttgacgatctcgccggcgtccgtgttgcggacccgcacgttatggatgtcgtggatctcgctgccggcggcgtattccgtcagagcagccgcgatggtctgcaccctgtcaggtgcggcatcgaccccgaacggcagttccggttccatgggctcgatgtggacgtcgacctcgacgtcctcgccgaactcttccttgatcttgcgctccagcgtgttggcgatgtcgtgggcggcctcgagctgcattgcggcgtcgacctcgagatcgatgctgacgatcagcttggcgccgaggtcgtgcacggtgacgtggtggaccgcgaggccggaattatgcgcgatcaccatgatgcggtcgtggacggtctcgttgtcgcgagcgacaggcaccgcagcgaacgtgaggtcggcgtctccgaatgccttggtcactgcggcctgtgcgttgcgcttgatctcctcgacgcggtcgatcggataggttcgcgggacctttgcgatggtgtcgatgaacgtggtcgctccgaccatgcgcacgcgcagccggtcgacgtcgatcacgcccggcacgccgcggatcgcggcggtggccttctcctgcgcgccttccggcgcgcggtcgaccagtgtctgcacggttgagccggccaggcgcaggccgagagctgcgatcatgaccgcgaccgcggccgcggccgccgcgtcgccccaccagaagccgagcgcggcgaggatcaggcccgcgattaccgcgaatgagcccatgacgtcggaggcgaaatgcagcgcatccgccgccagcgcctggctcctggtctctcgcgcggcgcgctgcagggcgcgggcgcgccagagattgacgacgatgtcgatcaccagcacgacgaagggcacggccgagatggtcggcggcggggttccctcgctcagccggctataggcctcgaccagaatgccgccggcaagcacgtagagcagggcggtgacgccaagggcagagatgctctccagcttgccgtggccgtaatgatgctcctcgtccgccggcttgtcggacacccgcaccaccgcccaggtgatgatggtggcgaccaggtcgatcgaggaatgcagggcttcggagatcagcgccagcgagccgattgcgatcccgaccgcgaacttcgccgccgccatgccgccgctggcgaagatcgaaatcgccgcgaccgaggttttgctgtgctgggaggtcatggcggggatttagcagcccagcgtgggacatcaagcaatgatccacagaagtagtcgcgagtgacttgcaggagcgaagctatcgcggttgctcttgtatggaaagctcacccgtgcctcttcctcggtcatggccggggcgagccggccatgacgccgtggagggaggcgggccatgtcgttccgtccgccgctcctacaacgcgaccacaatcttccccaggtgcttgttcgcctccatgtggtcgaatgccttttcaatgtcgtcgaacgaaaacaccttgtcgatcggcagctgcagttttcgcgattccacagcgccccagatgtccttgcgcacctcctcgaagatctcacggacctcctcgatggtgcggctgcggaaggtgacgccgacatagtcgatgcgccgggccgcatgaaggtcgaagttgaaatcggcatgggtaccgccgagccggccgacattgacgatgcggcccttgatcttcgtcgcggctagattctggctcgcgaccttgcccgagacctggtcgacgatgagatcgacgccttctccgttcgtcgccctcagcacctcgtcgacccatttgggatcggagctgtcgacggcgagatcggcgccatattccttcagccggccgcggcgataggcatcggtcgatgtgccgatcacgagctttgcgcccttgagcctggcaatctgcatcgccatcaggccgacgccggagctggcgccctggatcagcgcgctctgacccgcctgcattccgccaacggtaacgaccgcgttgtgcatggtcgcgagtgcgacggggagggtggcggcctcctcgaaattcatgttcgagggggcgtggaacagccggccgtgatcggccagcgtatattcggcgaacgccgcaccgcccgagcccatgatgcggtcgccgaccttgacgcctttggcgtccggcccgagctcggcgacttcgccggcccattccatgccgagcacggtgccgacgccgccggccgccccatgggcgtgtcccttgcgcatgccggtgtccgcccggttcagcccgcaagcgcggaccttcaccagcacctgcgtgcctttgggctttggttgagcgacgtcggaaatccgagcgccgtcaggaccatagacataagctttcatgcaatgctctcgcgacttacagtgattattccgcagcttcgcgttgcggctgaacgatcatgccttccagtcggccgcggatgattgcctccgcttcgcgcacgatgcgggagacgagctcggcgcagctcgggatgtcctgaattaggccctggacctggccggctgaccagatgccttcgtcggaattgccggtggcatagaccatcttgccgcgggcaccggcgacgagctcgcggatgtcctcgaacttggcgccttccttttccatggcgacgaccttggtcgagacggcgttcttggcgacgcgcgaggtgttgcgcatggtgcggaagatcagctcggtctcgcgctcgtcgttggcgacgatcttctccttgatgagctgatggatcgggctctccttggtcgccatgaagcgcgtgcccatgttgatcccttctgcgcccagcgccagcgccgccacgaggccgcgagcgtcggcaaagccgcccgaggcgatcatcgggatcttgaccttgttcgcggcggccgggatcaggatcaggccgggcgtgtcgtcctcaccgggatggccggcgcattcgaatccgtcgatcgagatggcgtcgacgcccatgcgctcggccgacagcgcgtgtcggacgctggtgcatttgtgcacgaccttgacgccatgttttttgaactcctcgacatgctcctgcggcttgttgccggcggtctcgaccaccttgacgccgctctcgatgatggcggcccggtattcggcatagggcggcggcttgatcgcgggcaggatggtgagattgacgccgaacggcttgtcggtgaggtcgcggcagcgcgcgatctccttggtgaggtcctccggcgtgggctgggtcagcgccgtgatgaagccgagcgctccggcattggcaacggcggcaaccagctcggcccggccgacccactgcattccgccctggacgatcgggtgctcgacgccgacgagcttggtgaaccgtgtctgcaacatgatgtgcttcccccgcgccctgcgtggcgctctctgttatcggttgatcgcggcaggatgccgcccgggtcgggaaatgtctatcgcgccggcgcgcggccaaggcagggcgatcatgcggggatgcggatgattccgtgcggcggataattggagtgcatggagcttctccggtgcgacggttgggccgtgccgctccgtccaggggctccagggcttcccttactccgccgacagccgcaccatctggcggccgccgttcatttgcttcaggctgttgacgaagttttccgggcgctgccagcgatggggcaccttcaatcccatgaactccgcgatgtcgccgatgaagccggtgcaattcatggtctcggcattccacaccggagagctggcctgcaactccttgatgtaggcgaacacgcgcttggcgtcggcctcattgagatagacccgatagttcgcggtcagatattccggatcgagatcgccgtagcttgcgccggtctcggatggcacgaaggtgatgtgacccagcacataggcgagcgtgtcgccggcgggcgtgaggcccgcgacctcgaccgctttctcgctggtcttgccgtaccagacgaaggcatggccccagctcgcggcggtccgcgcgcggaagtcgacgtagtaggggcccttctccgcgcgcgcgacggagcgccgcgccgcttgcggctgaggtcgcgaggcggtgtccgccgtcgcaagcgcgttggcatcggcaacgcgcttgtttgcctcgtgggccgaagccgagggcgtcgtgcacgagagcatagccgcaagagcgaagcccgcgaggatgcaggatcccgatcgatcagctttcttcgtcacgctattcccctcgactgccggctgctacgcagatgcgcgtattccgctgcgcgtcagtagcgcgccgcgacgggaccgggcgccttgccgatcggggcctttccaaccgggctcttgccaatcggcatcttgccgatcggcgcctgctcggccggatagaccggcaccggctggcgtcgcggtatatccgcagcgtttgcagccgtcaccagagcaagcgtagcacccagagcgattacgattttcttcacagtcatacccctgaaggtttggtccaacacgacagcgccgtgccccccagacacgccgcagagatgggcgtccgaatgcgtccaagttgcggcgtgcacgggacatgttggcggcatatctctgacgcgcgcagatgtgatgtttgcagggattggtggagatcgcttgcagggcgacgcggcgtgtcgtcctcaggcagagtcctcgccgcgggacgcgggcagcggtgcatcctgatcgttgcttgggccgaaacgcctgaacagccagatgcctgcgatcaggccggccaggccgccgacgggaccgatggcgaagaccgcgcccatggcgatgccgccatcgttgcccggtccggcgagagcaatcaccagcgcggccagcgcggaccagccggcgaccaggccaatcagggcgaacaggatggcgatgaggatgcgcatgcggatgttggtcgcgcggaggcgacccgcggttcgagtccgcaatcatggcctcgatgccgaacagctgagccttgagcaggaccaggtcggcttgcgacttcgacagctctgcccttgaaagcattcagcgctgccgatgcatcttgcaccgcgcctgctcaggctgcttgcggtgtcgagttggtggcttcgtcgagcgcggcggcgatgtcgcgcatgctgatcaccgagacgaggctgtaatcgtcgattacgggcaggtgacggatgtgatgacggttcatcagatggcgcacgtgctcgatcgtatcgctcgaggtgcaggaaacgagttgctgtaccgacaccagctgcgagaccttgacgttgacggcattggcgccgtgctcgacgacggcgcgtaccacgtcgcgttcggtgaacatgccgaccgcggtgttgccctcggagcggacgacgtccttcaccaccagcgcgctgatgttgttggtgcgcatcagcttggtggcgatacccaccgtttcattcatgcgcaccgtgacgacacgcggcgtcttcttgcgcaggatgtctccgaccagcatttcaacctccctgactttgacgttgagaatagtctggtatacataatgccaatcgtcaagcgctggtttggctgatccgaagaatcttgcggcagcggtgctgacgcaaaggcggcttcgctgcgcttgcatgctcggcggtcctgggcggcgaccttgcggccaacgaaaacgcccggccgcgaggccgggcgtcgaactcacgctagctgggcgaaggcgtcagatcgtggatttcgcgaccacgatcttgcgccagggcttgagcacggcgatcgccagcaacgacgccaggatgttggcgccggcggcaatgatgaacacgctgtcccatgtccctgaagactgctgcatgtagttggcgatcggcaccagcagcgcggcggtgcccttcgcggtgtagagcaggccggcattggtggtcgcgaacttggcgccgaacgtgtcggtgcaggtcgaggggaatagcgagtagatctcgccccaggcgaataaaacgaagcccgagagcagcacgaaccagaccggatcgtggccccagaggtagagcatccagatcccgaagccttccatgccgaaggcgatgaacatcgtgttctcgcggccgatcatgtcggagatccagccgaagaacggacgcgtcaggccgttgagcacgcggtcgatcgtggctgcgaaggtcaccgccgtcatcgtcaccgccatcagcgtgaccggcacgttgtcgaccttccagtcggccgcgatcggcttcaggttggccgtcaccatcaacccgccggcgccgacgatcacgaacatgaagtacatcagccagaagatcggctgacgcagcacctcggtcggctggtagttacgccgggtctggagcagattggcgttcgcgaccacgttcggcacctgtcccgccttgggcgcgagcaggaagaaggcgaggatgcagatgacaatgccttgcccgaggccgaaatagaggaatgtggcctggaagccgctgtccttgatcatggcctggatcggcgcgacggtcagcgctgagccggcaccgaagcccgcggcggtgatgcccgcggcgagaccgcgcttgtccggaaaccatttcaacgcattgccgacgcaggtgccatacacgccgccggcgccgatgcctgcgatgatcatgccgagatagtagccgttgagcgaggtggcctgcgcgttgatcgcccagccgacggcgcagagcacgccgccgaccagcaccacgatccgcgggccgtatttgtcgacgaaccatccttcgatcggcaccagccaggtctcgaacaacacgaagagggtgaaagcccactggatcgaggcgcgatcccacccgaatgttttctgaatgtccgggacgaagaacgtccaaccgtattgatagttggcgatcatcaccatcgccgccacgccgatcgacaattgcaaccagcgataggcatcgctcacacgtgttgcactaggggccgcagccgactgcaccatgtccgtcattcaaaaccctcccgaacgcgccgatcatttttatgcctgcgccggcgcgcagcttggtatgcattatgccaagattcaagcgaagggcggcgaggtgcggcgaaatggcgcagccttcttcacatgcgccatgagcgcgggcttgtaaagcccccatcgccgcgatcccgtcggcgggatcgtgaaattcatataagcaattgaatttacgtagttatattctgatgtcggactgctggatctcagcggagggccagtgcgcttgcggatctttgaggctttgcgctggtcgcatgatctgacgcgcggtcatttcctcaccgtgcggcggctggaattctatattccagaagtccggcctgcgacggtttggcactgctcgcggtaccgattggtccggccgcgcctcaggccatcgacgtgcgcaggcggctgtagccttcctggatcgcggaccagaacagggcgacgaggccgagcgccatgatcgtgctgacgagaccgttggagaagaacacgccgagcgagccctgcgatcccagcagcgattgccggaaggactcctccgccttgtcgccgagcacgatggcgagcaccagcggcgcgagcgggtagttgcacttcttcaggagatagccgagcacgccgaacaccagcatcagcatcacgtcgaaggtgctgttgtgcaccgaataggcgccgatcgcgcacagcaccaggatgagcggcgcgatgatgccgaagggcacgcggaggatggcggcaaagatcggcacgcaggtgagcacgacgatgaggccggcgagattgccgagatacatcgacgcgatcaggccccagacgaattccttctgctcgacgaacagcatcggacccggctgcagaccccagatcaacaatccaccgagcaggactgctgcggtgggggaacccggcacgccgagcgagagcatcggcagcagcgcggcagtgccggcggcatgggcagcggtctccggcgcgatcaccccttcgatctcgcccttgccgaaattgttgccgcgtcgcgccaggcgcttggcgataccgtagctcatgaaagatgcgggcgtagcaccggcgggcgtgacgcccctccagcacccgatcaggcaggagcgcagcgaggtcatccaataggcggggagttcccgccaggtatgcagcaccacgcgaaggttgatgctggcgttgccgccgcggaacgccagcccttcctccattgtcagcaggatctcgccgatgccgaacaggccgatcacggcgatcaggaagtcgaagccgttgaggagctcggtgacgccgaaggtcagccgcaactggcccgtgatcgaatcgaggccgaccgccgcgagggcaaagcccatcatcatcgccgcgatcgtcttgaacggcggctccttgctgaggccgacgaaggagcagaaggcgaggaaatacaccgcaaacttctccgccgggccaaaccgcagtgcgaagcccgcgacgagcggggcaaccagcgtgatcatgatgaccgcgaacagcgcgccgacgaaggaggaggtgaaggcggccgtcagggcttcgccgggtttgccctgctgcgccattggataaccatcgaaggtggtcgccacggaccagggttcgccgggtatgttgaagaggatcgatgtgatggcgccgccgaacaaggcgccccaatagatgcaggacagcatgatgatcgccgatgtcggcggcatgctgaaggtgagggggagaaggatcgccaccccgttggcgccgccaagccccggcagcacgccgatgatgacgccgagcgtgatgccgatgatcatcagcatgatgttgtagggctgcagggcgaccgcgaagccgtgaaacagattggccaactcttccatgtcgatatgtcctgcagcggtaacgaaagatgcggcgcagctcttacagaccgagccattcctcgaatgggcccttgggcagcgggaccaggaaccagcgctcgaacacgagataggtcaacaccggcatcccgatcgcgaccgcgacggtcgtcagccagcgatagccgccgagccagcgcatgaaccaggcgataaagaccgtcgaggcgacgtagaggccgatgaacggcatcgagccgacatagatcgcggtcggcacgacgacgctcatgacctggcgcagctgtccccattcggcgaacagtcggccgtcgtcgtcgcgctgcgcatgccagaggttgatggcgcttgcgacgacgatggtggcaccgacatagaaggggaagaagccggcacgcgggccctccgcgccccagctgatgccggccttcacgctgccgaagatcacgacgaggccgaagacaccgatcagcagcgccatcccgatttccagcgttttgtgcgccgggccagattcggatcgttcagtcatgggatctccaggcggaatggcgatggtgcgcggtcacggccgacgggaggacgaccagcgtcttcagccgtcgtcgacgtcgcggctcaatttcccgatgcgaggaagcctgcatccttcatcaggccttcgtggcgcttctcctccgccgcgacccacttggcgtagtcggcgcctgtcaggaaggtcgtgttgaaggcgccgtttttcatgaaatcctgccattccggcgtggcgcggactttcttgaacagttcgacataatattcgacctgatccttcgtcgccttgggcgacatgaagacgccgcgcagcatgagatattccatcgcaaggccctgcgatttgcaggtcggaacatccttccaggccttgccgtcggcgatcggctcgtcataggccattggctgggcgtcgaacacgcagagcggacggagcttgccgccgcgccattgcgcgaccgcctcgatcggattgttgacggtggaatcgacgtgattgcccacgagctggacggcgacttcgccgccgcccttgtaaggaatgtaggtgaacttcgcctcgatcgccttctcgatgccgaccgtgatgatctggtcttcctgcttggagccggtgccgcccatcttgaatgagccgcttggtgcctgcttcgcagcgtcgacgtaatccttcaccgtcttgtacggcttctcggcattcacccagagcacgaattcgtcgagcgccagcatcgccaccggcgtcagatccttccagttgaacggaattcccgtcgccagcggcgtggtgaacaggttcgacagcgtgatgatgatcttgtgaggattgcctgacgacgtcttcacgtcgaggaaaccttcgccgcccgccccgccggccttgttgatgacgaccagcggctgcttcatcagattgtgcttggtgacgatgccctggatggtgcgtgccatctgatcggcgccgccgccggtgcccgcgggcacgatgaactcgaccggacggacgggctcccaggctgcgtggcttgcggtactgccaacgcatgacatcgcgattgccgccaaagcgacattcagaacgaacggcttcatctgtttctctccctgtcgaaccctcgacgcagccgctctttgtcggcttgcgttagcccatctcaagtcacatgcccggagtcaccgtgtggtcgattctcccacggcagtcccgctagaaactctatgggcagggacaacgtgcggcatccacttctttcggacaaggctctgccaaggttgctcggaagacgtgcactctcggccgtcgctgtgccctcgatacctttccccgccttcccgctttgtgagctggcaatccttcttctttgtcgaatggtatgcgagatgccagcaggctcacaatcggatcgccgggcgcattggtgggcaaattgtcgcacttgcggtcggttcagcgggcttcccaaaagaaaatggccccgacttgggggccatgggtcgatccgtgcgcggcgggaatccgccagcccgctccggactggaagtgcctattctacaggccaaagcgcggcaggtcgccgttgcggttcgagatctcggcgctggccatcaggaggccgtcgatcgcggccaccaggcgggcgaaaagcgaggaggagggggcgagcgcagcggaagcggtctttgacatcggaaatccctttctcgagacagtcagccttgccgtctcatctagaggccagtttatgtataccagatgccaatatccacattcttgtttgcatagcagcatgcgacatctcgcattgcagcataatgttgggttggcaggggagtttccgacataaagttgccggcgtggggttggcggtacggttttttctgtgcgcggtctatcggagagcatgggcggaccaacgacgccgcaccggtggcctgtcgagcctcggccgcactgcaacaggcggacttggcatgatcctgcaaagcggctagtggtccgcccccttatccaatccaatcgtcagagtggttcatgtcgagcgcctcgtccgccgtctcgatcggcatcgatttcgggaccagcaatacggtcgtcgcgctcgcggcggacgatcgtcgggtcgaggccatccgtttcgatcatggcggacagcgccacagcgtctatgtgtcggcgctgtgcttctgggaggaccggccgggcgccggggcccaggccgagggcggcccatgggcgatcgagcagtttctggaagggcgccatgtctaccgctttctccagtcgttcaagacgttcgcagcgagcagcagcttcaacaccacccaggtgtttcggcagcgctacaagttcgaggatattctggcggcgttcctgcgcacgctggcgcgccatggcggggagaagttcggcttcgaggccgcgaacatcacggtcggccgtccggtgcgcttcgccggtggcaatcccgacgaggcgcttgcgatgcagcgctacagggccgcgttcgagcgcctgggcgccggccacgcgcgctatgtctacgagccagtgggtgcggcgttctcgttcgcacgaaggctcgagcgcgatgccaccgtgctggttgccgatttcggcggcggcaccagcgatttctccgtgatgcgcttctcgcgcgcgggaggtcggcttcgcgccgagccgctcgggcatgcgggcatcggcatcgccggcgacacgttcgactatcgcatcgtcgaccacatcgtctcgccgcgcctcggcaaaggctcgagcttccgctcgttcgacaaggtgctcccggtccccagtggccattacaccaacctcgcgcgttggcatcagctcgcgatgatgaagagcaacggcgatttgcgcgaactgagggagcttgcgcgcaccgcgttgaagccggagctgctcgaggatttcatcaccatcgtcgatctcgacctcggctttgcgctttaccgttccgtgtccgacgccaaggtcgcgctgtcggcgcaggacgaggtggacttccgcttcaagggcggcggcgtcgagatcggcgcggacatcacgcggaagcagttcgaatcctggattagcgacgacatcgcccggctgggagccaccgtcgacaaggtgctggcggaggccggcatcaccgcgcgcgacgtcgagaaagtgttcctgaccggcggcacgtcctttgtgccggccgtacggcgcttgttcgccgagcgcttcggcaacgagcggctgatgtcgggcgaccagttcgagtcgatcgcctacggcctcgcattgatcgggcatagtcccgacccggaccgctggacggcaagttaggcggcggccgcgcagcaggcgagaagcggtgacgctgttctatcgctacttctgctgaattcggttcaggtaatcgatcaccgcgaggatgcgagtgcgcaccacgacttccgggctctgctgcgggccggccttttgccaataggagggatcgacggcgtgaggcaggctgacgatcgggttgaaccgttcgccccagatcggcatttcgcgcgagccgtgagccggaactgatttcgatccatagatgatctcatagacggcgttggcaggaaacaccccgttgttgttcttggccagcagggtcaagtccgaagccggcgtcttgagctgactgctgaccggtcctttccccttcgcgtcggcgccgtgacaactggcgcacgaagactggaactccgccttgccgatgtcgacttcttcggcctgagcggaagcagcgaaaccgacggcaagaccggtaatgatcaaccattcgacagcagatctcatcatctcgcctccgatgccggctgggaagactcccgcgtccggccactttgttcgttgacagcatatcaagggcgcagccagagccgaagcgcgcacaccttgcgcattcgctcgctggcgtggcgccctcaattctccatggcctcgtagatcagctgcttcacggttttctggatgcgctggcgctccgagggggtctgctggagcaaaatgaagaacatgtcctgcttgcggtcgatcacgaaataacagccgctggcgccgtcccatttcaactcgccgagattgcccggcggcggcggtttggcgttgcccggatcggtgcggacggcgagccccagcccgaagccgaagccgtcgcccggaaaatagaagaagtcccgctcgacgcccgaatccggcccgacataatccgtcgtcaacagcttgaacgccttgggactgagaatggtcttgccctcgtatgtgccgccattgagcagcatctgagcgaagcgagcgtagtcggccatcgtggagaccatgccgccgctggcgtacatcatcttcttcggctttgtcgggtcgttctcccggcccacccggaaattgctgtcgttcggcatcggctcggcgagcaacttccgcttgtcggggtcggtgacgaggaagccggtatccttcatcccgagcggttcgaacagcttgtccttctcgatctcgatcagggacttgccggctgcgatttccatgatccgcgccaggacgtcggtggaatggccatactgccagagcgcgccgggttgattgtgcagcggcaattttgcgatccgctcggcgaactcggcgaggtcgaagtcgccggcataaatatcggccgccctgtaggccttgcgcacgaggctgtcgccgtagaagccgtaggtgatgcccgaagtatggcgcatcaggtcgagcacagtcggcgcacgctccggcggcaccagctcgagcgtcttggtcccgtcgctcgcttgcttctcgacgccgaccttcacgttcgcgaacgatgggatatatttcgcgatgggatcgtcgagggagaattttccctcatccagcatctgcaccgcgaccacgctggtgatggccttggtcatggaaaacaggcggaagatggtgtggtcggtaatcggagccttcgacaccacgtcctgcacgccgaaggcctggtgataaaccggctttccatgctgctggatgagcaggatcgcgccggggattttcccagtcgccacttcgttgcggaaaaactcgtcgatttttgccagcttgtccttgttgaaacgggccccggcgggaatctcgaaagtcccttcggcccaggccggacccgtagccgcaacgagcagcgcgctacaggcaagcatccgcaacgtctggaatggtctcatcaaccccccttggttcgatccgagtttagccgtccgctcgaccggcacaaggggcatcgaattgcggggagcgtctgtcgcaggcgggggcggtccgccgcggaccgccgcacactccttgcccagaggggcccgcctacggcgggcgtccccagggatggtcatggagaaatcgccttcaaacgcgattgtcggcccaggcgggtggctgaacggcccgcgtctcggatcacctattgattgatctcaggctcgacgagcttcgccagatttcgcagcgattcctgccagccgagatagcaggcctccggcggaatgacatccgggatgccggtctgcgtgatgtcgatttcggtgccgaccgagaccttcttcaggaccacggtcacctcgatcaggcccggcagattgggatcgtcgaacttgtctgtgtagcggatgcgttcgccgggcacgagctcgacatattcgcctccaaaggaatggctgttgcccgtggtgaaattccggaacgacatcttgaaggtgcctccgaccttgggctcgaagtggtgcacgctgcaggtgaagccgtttggcggaagccatttcgccatcgcgtcggcctcgaggaacgcgcgatagaccttctccgggctggtggcgaaaacgcggtgcaggcggacagtgctgggcatgtttgttatccttgagtgattgacgggcccgagttggcctctatgtcccattcatgtcaagaggacgacggagaagcggccgatccgacaggtgcgcccgatttttttcgcgccttgtttggcgctcaccaaagcaaagtgggacgcttggtcgctgcaacggcggaggtgtgctccttctcctgtttgctcgcgggagaggtgaacgagccgcggcaaaatgcgtttagatggttgcggcatcctgagacgtcatcgtgaatgccagcctgtagtgaccaattgtggagttgtcgcaagcgccggccgtgtgaagcgatggcggcgagagcccgccggcgatcacgtcctcgattgcgtcggcatcgtacccggacagcagcacgatccagtccgcagcatcatcgttgccacggatctgctgctcggtggtgggcgcactcgtcctgggcgtgtcggtgaggagaaggtgcgcgcccgtcaatcccggcttcgaggggagggcgacgagcgtatcgatgagatgtgcctgtagctctgccgcgagtcccgcgcgcggcgagagcctgatggtggcaagcgagtccgcgatcccaccgccaaagctcgccacgatccggcactggctgcgcaccatgccgagatgatgcggcatcatcttcctcgaccacggtgtcggcgcattgagccggtccagatatcccttcgacgtgagcacttcgtattgctcgagctcgtagagcacgaagaagccttcggcatcggtcgtgctgctccagcgcgatccccgccggaagccgggaatgctcatccgctcggggaagtgttcatgcgaatgccaatcgccgaactcgccgcgctgctcggcgcgaacactccaccacatcgcaacggcggccttgccgagcagtgccatgctgatctccatgttctttcgccggctatcgcatttgatagcgtttccttgcggctatccttcggacgcccgcttcaggcagactcctcaggctgaggaccgagtgcgcggcaacagtttcaacgagcactgacgccgatgagcctcatcctgaggaggcgcgtgagcgccgcctcgaaggacaaggcatgcgcgcaagccgccaccagtcaaatgcgatagcctctgatttctcgtggacactctgcctcaacaccgacagcggaagcaacgtgtgcccttggaggccgaagccacaattccgctgccgggcgatccggccggtggcaaaggcgcgtggcgggataacgttttcgtcgagcggttatggcgcagcgtcaaatacgaggaagtctatctgcgatcctacgaaaccgtcggcgacgcccgaagctcgattggtcggtgtttcgacttctacaacggacaacgacctcacgagtcttgacgaccgtaccccggatcaagcctactttgatcttcctccgctccgcgagggttgagccgggaatcgctgggcacctggcaggttctggatgagaagctctggccggaggggcaggcccggcttcgtgggactgcttttcccgtgtcccggtcggacccgtcgtcgatccttacctcgcaggcgcgtccgaggccgccgggtgccccccaccggccgtggtgcaagaaaaatccgacctcctgtgctagaagaagtgccgccttgtactcccgtgaccgaggtggtttacagggcgcgagccgacacaagtagaaaaaccagtaagaatgaggaggcgttgatggagattgatcgcagagcctatctcggcgggatgggtgctgttctgggtgccggactgcttccggacctcgctgcagcgcagacgaaatcgctgcccgatctaccgccgaccatgatttggagcgtctacgacgttggcgcctccggctacgtggaggcctcggccatagcggatgcactcggcaagacgtatggcacgcgcgtacgcctccagccctccggcacatcgatcggccgcatccagccagtgaaggaccgtcgcgtaacacatggctggctggcgaccgaggtcttcttcgccgccgagggtctttacgagtatgccgcgccgaactgggggccgcaggatctgcgctgtctgctgggtcgcgtgaattcgctgtccatctgcgtgacgaagacgagcggcatcaagacactgaaggatctcaagggcaagcggtacgcgatcgcaaaggcgaatacgtccgtcaacgcgaagatcgagcctattctcgacgctggtggcatctcttacagcgatatgcaggtcgtcgagttcccgagttacggcgcttcgcttaaggcgctcatcgagggtcgtgcggatgccgccggtgcggcgctgacgaccgtgtcgctcaaggaacttgaggcgagttcttacggcatcgattggatcgagcttccagcaaccgacaaggatctgtggagcaagatccagcgcgccattccgctcgcggcgccctacaccgagacgttcggctcgggcgtgtccaaggaaaatccccgggccgtcatgggctacaggtatcccatgattaccgtctacggcgatgccaaggtggacgaggtctacgcggttacgaaggcgatcgtcgacacctatgacacctacaaggccgcctcacccatcatggagcgctgggaagtcaagaactccggcgcctacccgatggacgcgcccttccacgagggtgccatcaagctcctcaaggagaagaacgtctggactcccgatcaccagaagtggcaggacggcatcgtgaagcggcacgcactgctccggcaggcttgggccgacatgatggccaaggagcccgccgcaagggaggccgatgccgccaagctgcgtgagctttggatgccgcgtcgtgccgaggttctcaagtccctctagctccgacacgatgaggcaggcgttgcggtcgattgcgccgacgcgcctgtccttctttttgcagtacgccactcgaagtcctcgtttgtgatcgacggcggatctataggggataaatgcgatgacgaccgaacaggctgaggtcgcgacaccgatagttgaagaccccgaagcccgctcggcgcggctggaggggcgcgcattttgggcaacgttcgtcctgacgttgcttggactagcgctctcggtcaatcaggtctttaatctgggcatcggcggctttcggccgatcagcacggcttactactacctgatcatcggcatttttggtgcgatcggcttccttgcctttcctgcgcgcaagccgtggcacggtcccgtgccctggtacgattggatttgcggtgctgccctgctgggcctgaccatctggattgcctcgcgggcgcaatacgtcatcgacgcgggctggaacacgactgggccactcgaagcgcagatcgtggcgggcgttgtcactgctctggtcctcgaagggctccggcgcacgggcgagaccattctcttcgtcttctgtctcatctttgcgtcgttcccgctctatgcgggccacatgcccggctttctctggggcgtgcaactcgatctcggccagaccctcagcgaacacgtctatggcctcgagagcctgatcggcattccgatgcaggtcgttgcggacacgctgatcggcttcctcgtgttcggtgtggtcctggcgtcgaccggcggcggcgccttcttcatggactttgcgtccgcccttctggggacggcgcgcggcggtcctgccaaagtggcaatcatctcatcgggattcttcgggatgctgtccggcagcccaacgtcgaacgtgctcaccacgggcacgctcactattcccaccatgaagcgctgcggctacccggcggcctatgccggcgccgtcgaagcctgcgcgtcgacgggtggcgcgctgatgccgcctgtcatgggagcggcggccttcatcatggccaacttcctgaacgtgccctacgccgatgtcgtcgtcgccgcattcctgccggcggtgctgtatttcttcgcactgttcatgcaaacggacttctacgcggcgcgcaacgggctgcgtggaaccggtgccgacgacgtgccgcccctcacgcgtactttgatcggcggctggtactacattggcgcgctggttgcgctcaccctgctgttgctcgtctggcgtcttgagggcgaggcgcccttctgggtttcgctcttcctggtgctgatcgcgatctttcgagcacccgcgctgggcttcacgccccgctacttcgccgggcttgtcgtcgatgtcggccagaccgtcgcgcagatcgtcggactgattgccggcataggtttgatcatcggcgcattgtcgatcaccggtgtcgccaactcgttctcgcgcgaactcgtgcagtacgccggcaacaatatcgtgctgctgcttgctaccggcgctctcacgagcttcatcctcggcatgggcatgacggcctccgcctgctacatcttcctcgccatcgtgctcgcgcccgcgctgatcacgaccggcctcgatcctatggccgtacatctctatgtattctactggggacttgtgtctttcatcacgccgccggtagccctggcagcgatcgccgccgcgtcgatcgccaaggctgacgcgatccaggtcggactgcgcgccatccggatcgggtgtctcctgttcctgctgccggtgctcttcgtgttgcagccggcgctcatcctcaagggcgagttgatggagattctccaggtggcgaccacggccgtcgcagccgtcgttctcctcgcagcgtcgttcgagggatacttctactgggccgggcggctgcccgtttggtcgcggataatcgtcggggctggcggattattgatgctggtgcccgagggaatgaccgatctcatcggctttgcgatctgcgtcggggcgctcgtgctaaccaggctcgtttcaggctggcgcacggtgccagggacataggcgcgaccgacacgcctgtcggggtgcagcgaggctccggtctttcttgtgcagccgtcgcctcggcgctcgatgttgagctggcacctgcaaactcgcaatcgacggtgtgcgccgagtcctactgctcccggcgctgcggcggccgtcggccatcagcgcaccgaagcgcttgtccaagttgtcggcgagatccctgatcgccttcgccatctgtacgccttcttaaacctcgtagtacaacggacaacgacctcactcgagtcttgacgaccgtacccccgatcaagaagcctacttttgatcttcctctgctccgcgcggcggcctagccctggctgagacttcacttatcgacgcggaatttttgttcagacaaccgggaccagttcatggttcatcgcgagttcaatgcgacggtggtgaagtgttttcgcgagcaacgggctgcgggagatcgctgaggggctcgattagccggaggccaatccggcgcgtccgcttccgtcgacggtgtgttcggggatccgttccgatgtggcaacagcgagcgctccgctcccggcacaacatccacgatggcacaatacccctgttttgcccgacgggtcaggattttttcgtcgaatcagaaatatcgttgcgtgccaatgggatggctactgtgcatggggttgtttttcggctctttgaattggcgcctgtcatgctcggcgttccctagcaaaaagggccgccccttcgggcggccctttcgtctggctcatggcggcccgcttactccgccgcctgcttctgcggcgggtcgagggcgccggacttgtggatctcggcgacctggtggtcggagaagccgagcacggagcgcaggatctcgtcggtgtgctcgccgagcaggggcgagcgctgcacgtcgctcgggctatccgacagcttgatcgggttgccgaccgagatgtacttgccacgggtgggatggtcgacctcgacgaccgtgccggtcgcgcgcagcgactggtcttcggcgatctccttcatcgacaggatcgggccgcaggggatgtcgtccttgttgaggatctccatcgcctcgaacttggtcttggtcatcgtccactgctcgatgcgggcgaagatctcgttgaggcgcggcagccgcgccgccggcttggcgtagttcggatcggtcttccacgagggctcgccgatcacgtcgcagatcttctcccagaccggagcctgggtgatgaagtagatgtaggcgttgggatcggtttcccagcccttgcacttcaggatgcggccgggctggccgccgccggaatcgttgccggcgcgcggcacggcatcgccgaacggcacgccttcaccgaattggctgtattccttgagcgggccatgggcgagacgctgctggtcgcgcagcttgacgcggcagaggttgagcacgccgtcctgcatcgccgcggtgacgcgctggcccttgccggtgtgggtgcgctggaagagcgcggtgacgatgccgagcgccagatgcaggccggtgccggaatcgccgatctgtgcgccggtgacgagcggcacgccgtcgcggaatcctgtggtcgaggcggcgccgccggtgcactgggcgacgttctcatagaccttgcagtcttcgtacggtccggggccaaagcccttgatcgaggcgacgatcatcttcgggttgatctcctggatcttctcccaggggaagcccatgcggtcgagcacgccggggccgaaattctcgaccagcacgtcgcacttcttgatcagctcggtgaggacctccttgcccttcgggttcttggtgtcgagcgtgatcgaacgcttgttgtggttgagcatggtgaaatacaggctgtccacgttcgggatgtcctgcagttggccgcgcgtgatatcgcccacgccggggcgttccaccttgatcacgtcggcgccgaaccatgcgagcaactgcgtgcaggtcggcccggactggacgtgggtgaagtcgagaatgcgaacgccctcgagcgctttggtcatcgtgttgctccgtactctgtctgcccctgcacccggcagggaaaagggttgcggggtggagttacttcttcttctgcagaacgctctgcgggttgaggttgccgatgcggccgctctccgagccggcggcgggatcgatcaccgcgttgatgagcgtcggcttgccggacttcatggcctcgttcacggcgcgtttcagctcgtccggcgaggtcgcattcacgccgacgccgccgaaagcttccatcatcttgtcgtagcgcgcgcccttgacgaacaccgtcgtcgcggggtcggcgttggcgctgttgacgtcggtgccgcgatagatgccgtcattgttgaagatgacgacgcagatcggcaggttgtagcggcagatggtctcgatctccatgccggagaagccgaaggcggaatcgccttccaccgcgagcacgggatgaccggtctcgagcgcggccgcgatcgcctggcccatgccgatgcccatcacgccccaggtgccgacgtcgaggcgcttgcgcgggcggtacatgtcgatgacgccgcgggcgaggtcgagcgtgttggcgccctcgttgacgaggatcgcttcggggtactccttgatgacgttcttcagcacgccgagcgcgccgtgatagtccatcggcgatttgttgttcatgagcttcggcgccatcttggcgacgttctcttcgcgcttggccgaaatggccttggtccattcggcgggcggcgcagtccaccctgacgcaagcgcctggttgaaggcggagacgaccgagccgatgtcgccgacgacgggcgcgacgatctcgacgttggagtccatctccttcggctcgatgtcgacctggatgaacttcttgggcgcctcgccccagctcttgcccttgccgtgcgagagcagccagttcaaccgcgcgccgatcagcatgacgacgtcggaatccttcagcacggtcgagcgcgcggcgccggcgcattgcggatgggtatcgggcagcaggcccttggccatgctcatgggcaggaacggcacgccgctcttctcgacgaagcttttgatctcttcatccgcctgcgcgtaggccgcgcccttgccgaggatgatgagcggacgcttggcgctcctgagcacgtcgagcgcgcgcttgaccgaagcgggcgaggggatctgcgcgggcgcagcatcgatgaccttgaccagcgatttctggccggcctctgcgttcatgacctggccgaacagctttgccggcaggtcgagatagacgccgcccggacggcccgagaccgcggcgcggatggcgcgggcaaagccgatgccgatgtcctgggcgtgcagcacgcgataggccgccttgcacagcggctttgcgatcgcgagctggtccatttcctcgtagtcaccctgctggaggtcgacgatctcgcgctcggaggagccggagaccaggatcatcgggtagcagttggtggtggcgtgcgcgagcgcggtaaggccgttgaggaagccgggggccgagacggtgagacagacgccgggcttcttggtgagatagccggcgatgcctgctgcgtagccggcgttctgctcgtggcggaaggagatcacgcgaataccggcggcctgcgccatacggcccaaatccgtgatcgggatgcccggcacattataaatggtgttgatgccgttcagcttgagcgcgtcgatgacgagatggaagccatccgtcagttcctgctcggtgcccggtgcctcggacttggtcgcggtattcagcatgggctttgtctccctggtctcaagtcatggggcgagtggttcgcccttctggtgagcgtctgctagcaaaaaaactaagtgaacagttcctggccgtgcgcttcgacgtaagcggcaagcccgagggtgtgatcgcgggcgcgcttctcggcgagctcggtgtcgcgcgcttccagcgcttcgatgatgccgagatgctcgggcagcgacgtcgcggtgcggtccttgcgtccgatggtgagctgccgatagccgcgcacgtgcagcaggaggtcgttggtgagatcgaccagcacgggggattccgacagcgagatcagcgcctggtggaatgcgatgttggcgcgcgaatattcctcgacgtgatcctcgggcaggcggtccttgccgaaatccttgaagaagtcgcgcagcgccgtgatgtccttcttgcgcgcggtggtggtgatcaggcgcgcggccatgctctccagcgccgcccaggcgcggatcatgtcgacgatctcgctcttggtcctgcgcaccaccatgatgccgcggcgcggaaccgtcttcacgaaaccgtcctgctcgagcatcgcgatcgcttcgcggatcggggtgcggctgacgccgagccgttcggacaacgcgcgctcgtcgagcatgaccggctcgggcgtcgaatagatgtccatcttgaggatggcttccttcaacgcgtcgtacgccttgttcttgaagctgctctccggggcaatacgaacgattgcgatgtctgcctcggccatgttcggcaatgccttggttggtttccgtagtgacacgacgaatctcctccagtgggagtcgtcttttacaggaatatctatgggaaagtttttggcataccacatgccagaatgtcaagctggcgattttttgcggcgttccaagagaagcatcgccttgacaagttggcttctggcataccaaatgccatcgccagccatttttgatccaagccggcggagtagtcttgggcttatgccactccgttccgccgcatggaacagagcgcggcaaatggcaagcatcacaggcagccgcaccacgcgcgcgctttgaaaagaacgaactcaggtccagggagacgccacatgtccaattccaaagatgccgtccgcaaggtgcttgaccaggtcaaggcggacaaccgcaccagcctgacggcgccggaaggcaagctggtctgcgacgcctacggcattccggtgccgaaagagggcgtggcgaaatcggccggcgaggctgggaagatggcctcgtcgatgggcttcccggtcgtgatgaagatcgtctcgccggacattctccacaagaccgaggccggtggcgtgatcgtcggcctcaagacaactgaagaagccgagaaggcctacgagaccattctttccaacgccaagaaatacaagtccgacgccaagatcgaaggcgttcaggtgcagcagatgctggccggcggcaccgaagtgatcgtcggctcgatcaccgacgcctcgttcggcaagctggtggcgttcggccttggcggcgtcctggtcgaagtcctcaaggacatcaccttccgcctcgcgccagcaaccagggaagacgcgctctcgatgctcgacggcatccaggcacatgagattctgaagggcgtgcgcggcggcgagccggtgaaccgcaacgccctcgctgacgtcatcgtcaaggtttcgcaactcgtcaccgatttccctgagatcgtagaactcgatctcaaccccgtgttcgcaacgccgaaggatgcgacggccgccgacgtccgtatcgtcgtcgacttcgcctatgtacccaagcccaagccgcgcccgaccgaagagatcgtcgcggccatgaaccgcatcatgcagccgaaagcggtcgccgtggtcggcgcctcggccgaagacggcaagatcggcaactccgtgatgaagaacctgatcaacggcggttacaagggcgacatctatcctattcatccgaaggccgccgagatcctcggctataaggcctacaagagcgtcaaggacgtgccaggtgtgatcgacgtcgcggtgttcgcgattcccgcgaagttcgtcgccgcggcgctcaccgaatgcggagagaagaaaattccgggcgcagtgctgattccgtcgggcttcgccgaagccggtgcgccggagctgcaggccgagatcgtcgaggtcggcaagaagtacgacatccgcctgatggggccgaacatctacggcttctattatacgccggccaatctctgcgcgaccttctgcacggcttacgatgtgaaaggccacgcggcactgtcgtcgcagtcgggcggcatcggcatggccatcatcggcttctcgcgctcggcgaaaatgggcgtctcggcaatcgtcggcctgggcaacaagtccgacatcgacgaggacgatctgctcgcgttcttcgagcaggatccgaacaccaacctgatcgcgcagcactgcgaagacctcaaggacggacgcgcctttgctgaagcggcaaaacgggtatccaagaagaagccagtggtcgtgctgaaggccggccgcacgtctgcgggggcgaaggcggcctcctcgcacaccggggcgcttgctggcaacgaccgcatctatgaagacgtgttcaagcagtccggcgtgatccgcgcgcggagcttgcgtcagctgctcgaattcgcccgcggcgtgccagtgctgccgacgccgaagggggagaacgtgctgatcatcacgggggccggcggctcgggcgtgctgctgtcggactcctgtgtcgacaacggtctgtcgctgatgtcgatgccaccggatctcgatgctgccttccgcaagttcatcccgccgtttggtgcggccggaaatcctgtggacatcaccggcggcgagccgccgatcacctacgtcaatacggtgaagctcggcctgtcggacgagcgcatccacgcgctgatcctcggctattggcacaccatcgtcaccccgccgatggtgttcgcccgcaatatggttgaggtgaagaaggagatggaggccaagggcttcgtgaagccgatggttgcctcgctcgccggcgacgtcgaggtcgaggaagccgccgaatatctctaccagaacggcatcccggcctatgcctattcgaccgagctcccggtcgaggtgttgggcgccaagtacagatgggcgcgcggggcagggctgctctgatcactatctctcccgtcatcccgggccgatgcgaagcatcgacccgggatctctaattccaggtcaggcccgctccgcgttccccagcgcaggtcgcgatgatcaagaacgtgatccctgcgcagaacgattgagccccgatcagaagccggcaggaggcgcaacggccgcattcggccgggtgagtccgaaaccccgttgaacaaaccccgggagttgtcgctggacagcatcggccgttttggctgatatgcgaccaaacgacacaatgcggcaaatgtccgcgtgagcctggagatgcccccatgttccgatttcccacgcgccttctcggcgcagccgtcgcgctgggccttgcggcagccaatccggcctttgcccaacagctcgagctcaagctgatggcgccggcggctccgggcgggggctgggaccagaccgcgcgctcgatgcagcaggctctggtggcttctggcgtcgcgcgcagcgtgcaagtgaccaatgttcccggcgcgggcggcagtgtcggcatcgcgcagttcgtcaacggagccaagggcgacggcaaccagatgatggtcaacggcttcgtcatggtgggcgcgcttgccatgaacaagtcgccggtcacgctggagcaggtgacgccgatcgcccggctcaccgaggagatccaggtcatcgtggtgcccgcgaattcgccgatcaagaatgcgcaggatctggccgccgcggtgaaagctgatatcgccaaggtgactttcgccggcggctcggctggcggcgtcgaccatgtgatggctgcattgttcgccggcgctgtcggcgccgacccgaagaagatcaactacattccgttctccggcggtggcgagtcgctggccgcgattctcggcggcaaggtcaccgctggcatttccgggctgagcgaatacgaagggcagatcaagtccggcaagctgcgcgcgctcggcgtgacatcggagaagcgcattgccggcagcgatattccaacgtttcgggagcaaggcgtggacctcgtgatcgccaactggcgttcggtggtcgcgcctcccggcatcacgccggagcagcgcaagaccttgagtgatgcggtcgagaagatggtgaagtccgacgcctggaaggagatcctcaagcagaagggctgggaggacgcctatctcggcggcgatgctttcgccgatttcctgaagaaggaagccgtgcgcgtcaccgacgtgctgaaatcggtcggcctcgtcaaatcgtgacctcaggcgattccacccaatcgccccggcgcgtcgatcccgccggcctcgtcatcgctgcgctgctagcaggtctcgccgcggtgctggtctgggatgcacgaggcctgcaatctgtcgcgatgtacgggatggggccggaggccatgccgatcgtggtcgccaccgggctcgcgctgctcgcgatcggcaatttcatcaacgcgctgcgcggcaatctgccagcgcgtgagagcgccgatccagttccggtgcttctgatcctcgtcggcctggcgctgctgattgccgtcatcggcttcggcggcggcttcatcctggcgacctcggcactgttcgtcacgacgtcggcagccttcggacgccgagcgatcctggtcgattctattattgccctcgtgatgtcgacgctcatctatctcgttttcgaccggttgttgacgctgagccttccggccggcccgctggagcgcctcctgtgatcgacacttttgccgcgctggcccacggcatggcggtcgccatccagccgatgaatctgctctatgccctgatcggcgtgttcctcggcacggccgtgggcgtgctgcccggcatcggcccggccttgaccgtcgcgctgctgttgccggtcacgtacaagctcgatcccggcggctcgctcatcatgttcgccggcatctattatggcggcatgtatggcggatcgacgaccgcgatcctcatcaatacgcctggcgagagcgcgtcgatggcgaccgcgctcgaaggcaacaagatggcgaaggccggccgcggcggcccggcgctggcgacctctgcgattggctcctttgtcgccgggaccatcgccacgatcgggctggcgttcctcgcgccatggctggtcgatgtcgccgtgcgctttggaccggaggattatttcgcactgatgtgcgttgccttcgtcacagtgtcggcaaccttcggcgattccccggttcgcggtttgaccagcctgttcattggcctgacgctgggcctcgtgggaattgacaagctgacaggtcaggcacggcttgcattcggcgtccccgagttgctcgatggtgtggaggtgaccacgcttgctgtcggcctgttcgcggttggtgaagccctttacgtcgcatcgcgccgccgccacaccgaggagaagctcgagccggtgcgcggctcgctgtggatgacgaaagaagactggaagcggtcatggaagccgtggctgcgcggcacgatgtttggctttccgatcggcgcgctgccggcgggcggtgcggagatcccgaccttcctctcctattcgaccgagaagcgcctgaccaaacatcccgaagaatttggcaagggcgcgatcgaaggtgtggcggggccggaagcggccaacaacgcctccgccgccggcacgctggtgccgctcttgacactggggttgccgacctccgcgaccgccgcgatgatgctggcaggtttccagcaatacggcctcaatccgggaccgctgctgttcgctgagcgtcctgacctggtgtggggcctgatcgcgagtctctttatcgccaattgcatgctgctggtcctcaacttaccgctggttggcctgtgggtgcggctgctcgcagttccgcagccttggctctatgcgggcatcctcgtcttcgcaaccatgggcaccatcgccgcgaagccgtcggcaatcgaattgtcgatgctggcgggctttggcgtgctcggcttcttgatgcgccggttcgattttccgatcgcgcccgtcgtcgtgggtcttatcctcggcccgatcgccgaaagccagttgcgcagagccctcgcaatcagcctcggcgatcccatgacgctggcgcagagcccgatctcggcgacgctgcttgcagtcgcgttgatcgcgctgctggcgcccttcgttttgaaggggctcgggcggttcaaggcgaacgaagattagccgttccgacgcaggcacgatctcacgcggcgttcatcccgtggacaatgccatgcccttcgaacatcgctcgccccttgccgcgcgttgaaattcggggcgaggcacaagatccgcagcttgaactgttccggcgtaacagtctctggactttggcgtaccttggcccctgggaactggaacaatgctttggccccgcggttgaaggcgcatgacaaactggagactcaaggacatgaaaacccgtcttgcgatttcgttggctgccgcctcgctgctggcgtcgagctcagcctttgcccagtcgacgaccgcccagggcgccgcggacggcgcgcgcgcggggggtgacatcggtggaccgatcggtgcgatggtcggtgggaccgttggggcagccgttggcgcaggtctcgaaatcccgaatgcgattctgggcgggatcccgcgcagtgactccgtcgtggtccaggagcgcgtcgtcgtcggcgaaccgcttccttcaacggtcgtgctgcgcccggtgccgaactacaccgagtatcgctatgcggtcgtgaacgatcgccgcgtgatcgtcgagccgcgcacgcgccgcgtggtcaagatcatcgactgatctgcgcttgcctgagtgctgagaaggtgggccctgcggcgagtcactccgcggggccttcgctcgtcagggtcgaatttgggcgaagccgggtcatggcccagtcgacagcggcagcgagggcaaagccgaggcaggccgtggatgcatcgaccagaaagtcctccagccgcgcatgacgcccgggtgcccagaattgcatcagttccagcaagccgatgaggatgaccgatgccgccgcaatcagcaaacgtcgcctccgatatgcgaggccgaaggcaagtcccaccaggatgaaggcgagcgcatgttcgccgtcctggccaagattggaatggggtcgcaggcccggcgggccgagggttgcgaaagtgacggcggctgccagcagccaggcagtggaacgaaccaaaatggacatcgggcccgcttagcacagatatgcaacggcccggtgcagtgccgcgatcagatcgacgtgtagttaatgacgaaacgttaaagtggctcgcgcacgccgaggccgtgcatgaacagttcccggatttgcacggggtcgcggcgggtggtgccgacgcctggcttgtcatcgatccggaccgcgatcaggcggggctccctggcggccaacgcctcttcgaccagccgctcgaaatcctcctcgtccgcggcccaggcgctgttggcgagcccggagccgatggcgatggctacaatgtcggcgacgttcgctgccggcgtcggctgcgcaccggtgatttggtagatgccattgtccatcacgatcatcgtgaggttttccggcttcagggtggcgatcgtcgagagcgcgccgagctgcatcagtagcgaaccgtcgccttcgagcgcaaagacccggcgctcgggctgcgccagcgcgacaccaagggcgatcgggaaagcaagccccatgctgcccagcatgtagaaattctgcggacggtggccggcggcccagaggtcgaaattggtgttgccgataccgccgatcaccgcttcttcgtgcttgagtttcgtgatcagccgcgaggtcacatcgaagcggttcatcaccttggtattgcgcgcgctcacgtctgtattcatgtggccggcctcacttgtcgaacaccttgccgccggtgagcagcgggttgaggatcagcgccaccggcgcctgcgtggtgacggcctgtttgatcgagcggtcggcgatgaattcgagctcgtcgagccgggtgatggtgtggtgctccagcgccagagaatccagaactggacgcatggtgcggcagaccagtgactggccgtagttgaactcgccgagcgtgccgcgctcggagacaaacatgatgagcggaatctggtagggcaccgcgagcgaggccagcacattggcgagcgtggcaaagcccgacgtctgcatcagcaccgcgccgcgccggccgcccatccaggcgcccgacacgatgccgacggcttcctcctcgcgcgcggtggcaaaggtggtgaagaagggatcagcatgcaggttcttgatcagcggcgtcagaacgcgatcgggcacgtaggggatgaggctgatctcgttccgcttcagggtttgcaggacgatggtgtgccagcttcttccgccggattcctgtgtcggttggcgcgaggtctgctgttccgcaaccgccattgcgttctcccttcggccgcgcatgcttcttggcagcgatccttcgaacttgacgcaggcagtgggattgtcaacatgtccgggcctgcaccgtgatctgcgccagatggcctgccgcggccggtaccgccatgtcataggtgcggcaacgaaaaacgggaggcggcagtggagggagcgcatcgcgcgtcgatcttccgaagtccctcgcgagcgagccggaagggtcctgatgtccgtcaacaacaaacgcgtcttctacgtcaaatacctggccaatccgatctatatcgacatcctgaaggcgcggcccgacgtcaggctcgatcggatcgagaacgagagcccggaagatttctacgcgccgatcctgagcgccgcccatgtctaccagatcggcgcggcccgtgacgagctggcgccgcatttccacgtggacgcggccttcctgaagcggacgccgaacctgctgctggtctccagcaacggcgccggcttcgacccggtcgatgtcgaggcttgcacggacgcgggtgtcgtggtcgtcaatcagtccggcggcaacgcccattcggtcgccgagcatgccctggcgatgatgctgaccctctccaagcgcatcatccaatccgaccgtcgcttgcgccgtgagcgcgatgtcaaccgcaacgaactcgtcggaaacgaggtcgagcacaagaccgtcggcatcatcggtctcggcaatgtcggccggcgcattgccgctctgtgcaaggggctgctcggcatgaaggtgctggcctacgatccgtacctttcggccgaggtcatggccgagcggggcggcgaaaaggtcgagctcgacgagctgctgcgccgctccgatttcgtatcgatctcctgtccactcaacaagggtagccgcaacatgatcagcgttcgagaattcgcgctgatgcagccgcatgcctatttcatcaccaccgcgcgcggcttcatccacgacgaggacgcgctgctccaggcgttgcgcgacaagcgcatcgcgggtgccggcctggacgtctggtccaaggaaccgccgccgccggaccatccgctgcttcagttcgacaacgtgctggcgagcccgcacactgcgggcgtcaccatcgaggcccgccagaacatgggtcgcatcgcggccgaacaggtgctggacgtgctcgacggcaaacgtccgcctcgcatcatcaatcccgaagtctggccgcgctatgcggagcgcttcaagcaggccttcggcgtgaccccgggataagcggacccggcgggcgcgaaatcgcgctccaggcttgatccgcgtcaaaatcccctttcccagtcccacctaaatggggctagagtgctgccggggcagcaggaggtcccatgtctctctatgtcgtcaggttcatgaaggacgtgctcggcgagtatggccggcagagcgagatctgccagggtacactcgagatcgaggccgccgacgagaacgaggccagggaacgggccaaggcgaagttctgcaaggaccaggcattgcatcactggtcgctgcatgccgaccgcattcatgtgaaaccggcggactttccgtcctgaggctcaccggcccggcgtcgcacttggcggaggtgtcgtcgtgcctgcgccgagcgatcgctgcaccatcaccgtgtccgaccagcggccgtggcgataggcgacgccgcagagcaggccggcgcgtgtgaaaccgaatttttgatgcagtgccagcgaggcggcgttgtcggcgtcgatgtaaccgatcatttggcgaaagccggctgccgcacagcaatcgatcaattcctggagcaacaaccgtccgactccgcggccgagatgcgcgtggtggacgtagatcgaatgcttggccgtgtagcgataggccggacgcttgcggaacagcacggcataggcatagccgacgatgtcgccgcgataggtcgcgaccaggtgcggcaggcgggtctgcttcaggttcttgcgccggtcgcgcagatcgtccggctccggcgcaccggttccctcgacatcgcgtgggacgccagcgcggacgtgatggcggtagatcgccagcatggcctcgacatcgctttcccgagacgacctgaccagaacgggttcgtcactcgcgcgcacagccgtttcgttcatcggcacctactcggcaacgacgtaagtgtagagcccgatgcgccctttcgcatcgacctccttgtagacaccttggatttcgacatcgaagccggggaacgtgttgaagcaggtctcgaacatcttgagataatcgatcatgggcttggcccgctccgtcagcctctcgccgggcacgatggtggcgatgccgggcgggtagaccacgaacggcgtggtggcgatgcggcccgcgagggcctcgatcggcagataatcgacatcgttgcggaacagatggcgcgcggcatcgcggggcgacattgcgatctcgggcatgtgctcgggcatgaactgccgcgcctggagcgcgctgacatcggcagcgcggaagaagcggtgcatgtcgccgcagagatcgcgcaagcgaacgccgccgtagcgcgcctgccgccgctgatggaattccgggatcgcctcggccagcagcgcattgtcgtcgtgcagacgcttgaacgcgacgaggccggagatcagcgtgccggccttgctcgcctcgacgccgggcgtaagcaggaagagcagggagttgaggtcgttcttctccgggacgatacgattctcgcgcaagtactgcgcgacgacgggggcggggatgccgtgctcggcataagcgccggatgcacgatcaaatccgggcgtgagcaaggtcagcttgttcggatcggtcatggcaaagccttcctctagatcgggaaagccgtgccagttgctgaccggagagagctgccaccgcgcgggattgctcgcgagttcgtcggtggagagcgtctcccaggcgacgttatgggcggcgccggggcggcttacgtcgggaatggcgacacgatcgggaacgaagggctcgaagaaccagcggcgatccgtcttctgctcgttctcctcgaactcccgccgcatcgcgcggattttcttgcgcagctcgatgcccagccggatcgtgtcgtcccacagcacttcaccggagcggcccttcatcatctgtgcgccgacgtcgagcgaggcgaacaaaggatagaagggagacgttgatgcatgctgcatgaagctttcgttgaagcggcggtgctccacccgtcgcttctggccccgaatatgccgatccttgatgtggatctgggaagcctgcgaaaaactcgcgagttgcttgtgggtcgactgggtcgcgatgatgcccggcgcttccggagggagattggcaagacccatggcgaagcggccggcatacagcggatggaacttcatgaagccggcccaggcttcgtcgaacaggatgtagtcgcagagatggccgatgcgcttgatgatcatctcggcgctgtggatcgagccgtcataggtgcactgctcgaccacggccacgcggaacggccgctccttgcgccaggcatcgcggtcattcacgagaggatggctgcggatcgcctcgcgcagggccttctcgtccagcatgtcccaacgcatcggcccgatcaggccccaggcattgcggacggcggggacgtaaaccgggatgccgccattgatcatgagcgcgccgtgatgggcggccttgtggttgttgcggtcgaacagcacgagatcgccgtcggtgaccagggcgccgagcgccaccttgtttgaggtcgaagtgccgttgagcacgaaataggtcttctcagcgccgaagattgccgccgcttccttctgcgccttcagtgccgggccctcatgagtgaggaggtcgccaaggtcgagcacggaattgtcgaggtcgtcgcggaacacggattcgccgagatgctcgacgaagacgcgtccgatcgggctgcggttatagaacacgccgccgttgtggcccggacaggtccagagctggttgccttcctcggcataatcgaccagcgcgccgaagaatggcgtcttcagcgtctcggcatattgcttgaggcggctgatcaggttcttggcgatgaagggcggtgtctcctcggagaggaagacatagccgtcgatgaaatcgagcacctcgaccggcagatcctcgaaccgcttgcggcggatcagcaggatgatggggaagtcgaggccccggcggcgcatcagattgatcagcgccgaggtcttcccttcgagccccttcttgccccaatccaccaccatgcaaccgatcgctgcatcggtctgcaccgccatctcggcatcttccagcttgcgggcacggaccacttcgaagccggagcgctggatttcctcgatgatctggttgaagcggatgccttcgaggtcgtcgctgtcgaacacaggtgcggcgaacaggaaattgaagcgcttgaaatagtccatgtcgggtcccgaatatggcgaagacacagctctccgcacattcgatgacagctggatgacaggcggagtgccgcggagcttcgagcgtctgcggcttcagtccagcagcttgtccagcgtgatggggaagcgccggatgcgcttgccggtggcatgatagacggcgttcgcaatcgctgcaggcacgccgacgatgccgatttcgccgagccccttgataccaagcctgttgatccggtcgtcgggctcgtctacgaaaatgacgtcgatgtcgcggatgtcggcattcacgggaatgtggtactcggcaatgttcgcgttcatgatgcggccgaagcggtgatccatcaccgtctcttcgtgcagcgccatcccgatcccccagaccacgccgcccatgatctggctgcggccggtcttggtgttcaggatgcgtccggccgcaaccgcgctcacgacacgcgtgacgcggatcacgccgagctcctcatcgatcttcacctcggcgaaaaccgccgaatgcgtgttgcgggcgtgtgatttgtcttccgcgaactggttgagcttctccttttcgatccgctcgagcttgctgtggcgcatggcatccggaatcgagacggcagccccgctcttgccgttaccggcgatcatgccatcgaccagggtgacggcggccgcgtcgaggtcggcgagtggcgagcccgggattgccttggcgaggtgtacgagttcccggcgaatttcttccgccgctcccaacacggcgtgcgcgctggaggccgccatccaggagccgccctcgaccggcgcctgcggcagggtcgaatcagcgagccggacgctgatgttctcgatcggcagcccgagggcatcggccgctacctgcgccacgatggtgtaggtgccggtgccgatatcggatgccgcgcacgagacctcggcatggccgttggccgtcagcacgatccggacggcgaccggcatctgcagcgcctcccacacccccgtcgccatgccccagcccacgagttccttgccctcgcgcatggaacgtggcgcagggttacgccgcgcccagccgaacgcttctccgccgcgggcgtagcattggcgcaactgcttgctggtgtagggcaggccctcgctctggtcgcgatccgagtagcacttcagacgcagctcgatcgggtcgagtttgagcgcgacagccaattcgtccatcgcgcattcgagcgcgcagacgcccgaagccgcacccggcgcgcgcatgtcgcaaggtgtcgagacgtcgaggtcgaccagcttgtgggaaaagtggctgttggagcttttgtacagctgctcggcccagccggtgtcattgcgggaaaagtcctcgtagcgtgaggttacggcaatggcttcatggctgatcgcatcgagcgtgccgtcgggcctcgcccccagtgcgacatgctcgatggtcatcggccgatatccaagcccgtacatctgctgccgtgtcagcacgacgcggacggagcgcttgagtgcgagcgcggccagcgtcgccaacaccacctggtattgcggccgcaggccggaaccgaacgcgccgccgacatagggcgaaagcacgcggatctcctcgggcttcttgtcgaacacagcgcagagaaacttttgcacgttctggacgccttgcgtcttgtcgtagacggtgagcttgccgccgccttcccagaccgtcgtcgtcgcataaagctccatcgggttgtgatgctcggtcggaacgaggtagtccgcttcgtgccgcagggctgcggccgcaagcgctgctttggcgtcgccgcggggcttgtgcggcttgtccatttcgcttgccctgccgcgctcggcctcgaggtcggtggcaaacccatcctgctcgtagtcgatccgcacgagcgtggcggcgaacttcgcggtctcccattcttcggcgaccacaagagcaatcggctgcccgttgaacttgatcatgtcgtcatacagcggccggaacggcaagccctccggggccacctcgtccttccaggcctcatccttgtcggcgaggggaggacgatgggcgtgcgtgagcacctcgagcactccggccaccttcagcgcctcggtggcatccagccgcacgatccgaccgcgcggtatggtagcctccaccacaaacccatggacgaggccatcggcggagaattctccggcatatttcgcggcgccagtgactttggcgcggccgtcgattcgcgacgttggtgttccgacataggcgttcatcgggtcctcacgcgatcttcttgtgagcttgtgattgtggtgtggcgcttgccgcctggatcagcgcacgcacgacggctctgcgcgcgagcgcgatcttgaagccgttatgcgcgcgaggagttgctccctgcagcaacaagtcggcggcatgcccaaaatgatccggcgttgccgcctgaccgcgcagggccgcctcggcctccatgcttcgccacggcttgtgagccacgccgccgagcgcgaggcgggcctcgctgatcgcgttgccctccagctcgattgcggccgcgaccgatacgagagcgaaggcgtacgacagccggtcgcggatcttaagatagctgtagttcctcggaaagctgtgcggcggcagctcgatcgcggtgatgatctcgctgcggcccagtatcgtatcgagatttggcttgtcgtcgggaagccggtggaagtccgtcagcgcaacgctacgcgcacccatgggccccgcaatgtgcacgagcgcgccgagtgcggccaaggccacgctcatgtcggatgggttcgtcgcgatgcaggacttgctggtgccgaggatggcatggttgcggttgaggccgtcgagtgccgagcagcccgtgcccggacgtcgcttgttgcaaggcgtcgccgtgtcatagaaataggggcagcgcgttcgctgcatcaggttgccgccgaccgaggccatgttgcgcagctgcgcggaggctccggccaggatggcgctggcgagcaggggatagcgctggttgatcaaaggatggtaggcgaggtccgaattcggcaccaaggcgccgatgcgcaagccgccgtcggccgtctcctcgatgtcgcggagcggcagacgggaaatgtcgatcagccgggagggccgttcgacattctccttcatgagatcgatcaggttggtgccgccggcaatcagcttcgcgcctggatcggcggcgagcaggcgaatggcatctgcgacgtcgcctgcgcgggaatactggaagttgttcatgaccggctcattgcctgctcgatcgcggccacgatgttgggataggcgccgcagcggcagagatttccgctcatcagctcccggatctcgtcggcatcccgcgcgcggccctcggccagcaggcctgcggcggagcagatctgtccgggcgtacaatagccgcactggaaggcatcatggtcgatgaaggcctgttgcaggggatgcagcgcgccatccttgaccaggccttcgattgtcgtgacctcggccccatccttcatgacggcgagggtcaggcaggaattgacccgtcttccctcgaccagcacggtacaggcgccgcattggccgtgatcgcagcccttcttggtgccggtcaggtccagacggtcacgcagggcatccagaagcgtggtccacggcatgacctcgagtgtgcgccttgcgccattgacaacgaggttgatcggaatgcgttcggggatctgatccgtgatgtcggccatggcgtgttccctgcggaaaggccgagccgggcaaatgtggatgtgacgcgaggatgcgttgccgccgctggccgatagcgcctaacggatagcggcgtgcttggttcccgactgatccgtccggtccgatggtcgaggtcagcgcttcgtctcgccgaacaccacggtcggcaccgctcggttgacgatctcgcgcaatgcgaagctcgattgcacgcgcgcgacgcgcggcaggcgggatagctcggtgcggtggatgcgctcgaagtcctggatgtcgcgggccagcacgatcaggatgtagtcgtcggtaccggacatcaggaagcaccgcacgacggaggggcatttcaccacctccgcctcgaacgccttgagtgcgtcatcgctctggctctccagggctattcgaaccagaaccgtcgtggtcaggccgaactgggcgaggtcgagcgcggcctggtagccttggatgtagccgtcgtcctctagcgttttctgccgccgcgccagcgccgtgctcgacaggccgatcttgttcgcaagctcggtatggctggcccgcgcattcgtagtcagttccgccaggatggcgaggtctttccggtcgagggccaaggtttggtttccagcgcgaataggtatttcggcgccggaaaccggcgcgggcccgctcagactagcggatatttgcacgaaaccaaaccaggcctctcgctacgatgaagagcggaatcaaggcgttggcaagggagatcaagatgcgcgtcggtgtgcccaaggagatcaaggtgcaggaatatcgcgtcgggctcaccccgggcgcggtccgcgaatatgttgccgccgggcaccaggtcacggtcgagacaggcgccggcaatggcattggcgcgcccgacgaggtgtatcggcgggcaggggcgtccatcgccgagacggcgcgcgagatctttgccaagtccgagatgatcgtgaaggtcaaggagccgcaaaggagcgaatgggtccagcttcgtgaaagccagatcctcttcacctaccttcatcttgcgccggatcctgagcaggccaagggcctggttgattccggctgcaccgcgatcgcctatgaaacggtcacggacgcgagcggtcacctcccgctgcttgcgccgatgagcgaagtcgccggccgcctcgccatcgaggccgccggcgccgcgctcaggcggtcggccggtggccgcggactgctgttgggcggggtgcccggcgtgcagccggcaagaatcgtcgttctcggcggcggcgtcgtgggcacgcaggccgcgcgcatggccgccggcctcggtgccgaggtcaccgtgatcgaccgctcgatcccgcgcctgcgcgaactcgacgatctgtttgccggacgcatgcgcacgcgtttctcgaccatcgagtcggtcgaggacgaagtgtttgccgccgacgtcgtgatcggcgcggtgctggtgccgggcgcgagtgcgccgaagctggtcacgcgcgcgatgctgaaatcgatgcgacccggggcggtgctggtggacgtcgcgatcgaccagggcggctgctttgagacctcgcatccgaccacgcatgcggatccaacttacgaggtcgacggcgtcgtgcattattgcgttgccaacatgccgggcgcggtgccggtgacatcgagccaggccctcaacaatgcgaccttgcccttcggcctgatgctcgcgaacaaggggtttgcggcggtgctggaaaacccgcatctgcggaacgggctgaacgtgcatcgcggccggatcacgaacaaggcagtcgcggagagcctcgggctggaatttgctcccgtggagagcgggctcgcggcctgaccagccgtccggtccgtcattgcgagcgcagcgaagcaacagagtgtcaccgcgcaaagattccggagtgcatcgctccgctcgcgatgacgatgcggcgcaaggattgctctgaacctaaagccgatccgcgccggcactggagtcacgcttcgtcagcctgtactgccccaggtccggatcgtgagtcatgcgccagtaatccacgaacctccacggcatcgccgagaacacgcggccgctgctgttgcgataataggtgctcatgcccggatgggtccaaatcatcgcctcgtgctcggcgtcgaccttttggacataatcgtccagcacgtcctggcggacatcgatcgccgcgatgtctcgctcgatcatgtcgaccagacacgcggagatgtagcggctctggcattcggactggaagatgacgctgccgccatgcgctggcccggagttgggaccgagcatgcagaagaagttcggaaagcctggtacggtcagcccaaggaatgcggtcggattgtcgttggcccaggcctcacgcaaatccttgccgtgacggccggtgacgttgaggcgcgccgccatctccgtcaccttgaagccggtcgcgacgacaatgatgtcggccccacgctgcttgccgtcggcggtgacgatgccattctcatcgaaatggtcgatcgcatcggtgacgagctcgacattgtctcgcctcaaggtcttgaaccagttgttgtcgagcaggatgcgcttgccgtagggcggataggtcggcacgcatttctcgatcagatccggccggccctgcaattcggagtggatgaagtcggtcagctcctgacggtgccggtcattgcctttgttgacggcgcgctcgggatggggccaggccgggtccttgcgcaggaaaggaaggaggccgtcgccgtagcgccagaacatgttgaagcggtaccactgcgcgtagaatggcagatgcgccagcagccaacgtgcgccctcgctgatcggatcggcatagcccttgaccgggcgagcccattgcgcactgcgctgatagaccgtgaccgacgcggcgcggccggcaatcgagggcacgagctgcatcgaggtggcgccggtgccgatcacggcgatatgcttgccgtcgagtctgatgtcgtcggtccacagcgccgaatgcaggatcgtgcccctgaagctctcctcgcccttgaagtgcgcgcgggagggatcgttgagctggccgatggccgagaccagcgcggtggattcgaaggcttcctcgccatccttcgtactgagcgtcgagatccagcgccgcttgccttcgtcccagcgcgacgaggtcagctcggtgttgacgcgcagatgattgcgaatgccgtattcgtccgcgaccttcagcagatagccgagcagctcctcgcgttggcagaagtagcgcgtccatgcgttgcgcgagccgaatgaataggaataggagtggttcggcgtgtcgacgccgcatccgggatagcggttgatccaccaggtgccgccgagctcttcgttcttctccacgatggtgtaggggatgccgagatggccgagcgccacgcccagcgcaatcgcgcagacgcccgcaccgacgatcagcacatgttggtcggcgagcttgtggtcggaagggcgtgtcgtccagcgcgcctcgcgcggcacgaagcccatctcctcgcgcatcagcggcgcatattccggcgcgacgttctcgccgagacaggctcgcatcatcctcagcaatagctcttcgccgggatcgttgatgacaggattcggcgttccgtctgcgaagagcttgaccacggcggcgcggatttcgtcctggatctcgcggggaacgccggcctccggatcaggaatgaggcggatgtcacgcttgggcagatagagcggtgcgagccatttctcgtcgcccgtcatgtgcacgagcaccatcagcaggcagcggatatcgccctcggctattgcggaggcaagatcaagcggcttgtgttgtgatacgatgttcatggcgtgtcctgatcttccaacgcagtgaagaggccgcgcgtcatcagcttgcgataggcggagatgacgtggtccggtacggcagtgacgccgttttcggaataggaatagcggcgactgagatagccgcgcgagcccatcagcatgtgaacgatcgcctcgaattcctcgtcgctgtagtcctcgatcgcgccggcaagccgggcgcggcgcaggatgcggacataggccgtcgcgatgttgtcgagatgcttctggtagccgatcggtgcgaagaactcggcctcgttgaggatgcgcaggaattccggcacctcgcggatgaagtcgaagaaggcgcagaaccgcgcgatctcctgccgtgccgcatccgccgtgccggtgcgggcgcggatgaactcgaccatgtcgaggccgatcttgggcaggagctggtcgagcaattcctggcggttctcgaaatgattgtagaaggtaccttgcgcgacgccagcttcctcggtgatgcgcgccaccgaagcttccgcatagccatgcttgcccacgaccttcgtggccgcctcaaaaatcctctgcttggtccaggcgttgcgctcgacgcgcttgagctttgttaccttggcggtggcggagctttgcgtcattccgcagcctccaattcagcgcgcagcacgcgcttgaggatcttcccggatggattgcgtggcaggctgtcgcggatgacgatctgcttcggcaccttgaagctcgcaagccgtgcgcggcagtgctcggtaaatgcagcgagctcgaggctcgcgccgtccgccagcacgacgaccgcgaccggccgctcgccccagcgcgcatcgcgcaggccgatgacggcgacttcgcgcacctcgggcaattcgtggatgactcgctcgacttcggacgaggcaatgttctcgccgccggagatgatcatgtccttcttgcgnnnnnnnnnngtcaggtacagaaagccctcttcgtcaaggtaaccgacgtcgccgctgcgaaaccagtcgccgaagaaggccgacgccgtcttctcgggggccttccagtagccgcgcgtgatcttcggcccgcgcaggcagatttcgccgttgacgttcggcggcaacaccttgccgttctcgtcgcggatctcgatctcgacatgggcgatggcgcgcccggtcgagccgatcttgtcgatctcgcggccggcctccatgaaggtgtcgccgcccacggtttcggtgaggccataggcatcgatgtagcgagcgttgcggaaatattcggagaaggcgcggatgcgcacctccggcgtcttttctccgccgccgattgcccatctcaggctggagacgtcgtagccgtgacgggtcgggcaggtgagcatcgccgtggtcatgaccggtgcgaaccaggcagcgtcgagcttgtcctccgcgatcgccgcaagcgccgcctcgggctcgaaattgcgctcgatgcggatgaatccgccatgccagagcacggcgatgccgggcagatcgagtgcgcccacatgatagagcggaccgacgaccagaagccgcgtctcggagctaagcccgagcgcaatcgtctggtcggcggacttccagtagaaattgtcgtaggagagcatcacgccctttggtcgatcggtcgtacccgaggtgtacatcaaccgcatcaggtcggatgactggcgcacatgcatcggggcgggcgcagcgctgctcgcaagacccgtgacgctgagctgggcggcttcatcgagcacgacagtgcgcgcgcccccggcgctcgccgttagctcctcgtcgacgatcagcaggcgcgcgccggcattgcctgcgatgtagccaacctcgtcgcgcgagaggcggaagttgatcggcaagaaaaccgcgcccaaatgactggtcgcgaacaggagctcgaggaacgccgcgctgttcttcatcagaacggctacgacatcgcctgcgccgacgccttccgctgcgagccaccccgccactttccgaatgcgcgcatcgaacaccgcgtaggaaatctgatcgccgcgatatttcagcgcaggccggtctggcgtgcgccgggcatgaaaggcgatgaagctcgacaggttgatcatgcgcagttttcgagccgtccagcggcctgatttgctctcgatgaattctgactcgtaattcatctttggcttgacgtcacccccctacctctgaaatccttgaacacacggagacgagacgatctccgacagggatcaggaaacgccgacccgaaagagggaggggaaaatgacgaaaacccgcaggccgggcatcagccgccgttcaacactggcgctgatgggcgccggtgcgatgagtgttgccgcgccctgggtggcgcgagcgcaagccaagaccatcaagatcggaatgccgacgattttgtcgggacgcgtggcgcagctcggcacgtcctcgcgcaatgcggtgatgctcgaggtcgagaaggtcaacggggccggcggtcttgctggccggcagatcgagatggtgatccgcgactccaagggccaaccgcaggaagccgcgcgggtcgcgcgcgaactcgtcaacaccgatggctgcgaattgctgctcgatggcgaagcgtcgtccggatcgttcgccgtgcatgaggtggcgcgcgatctcggcgtgctctgcatccacacctgctcggaagcttcctcgctgacggccgacccgaagcagcgcatcccgaatgcgttccgctgcgtgcgtcaaggtatccacgattccatcgtcggcggcagctacgccgcttcgatcgccaaggcgaagggcttgaagaaatgggcgacctgctcgcccgactacgcttatggccgcgacactaccggcgagttcacgctctacctcaagcgcttcgcgcccgacatcgagatcatcagcgagtcgtggccgaagctgttccaggccgactacaccgaagtggtgacgaagatcctgcaggccaagccgcaggcgctgtattcctgcctgtggggcggcgatctcacttcctatatcgaccaggcgaacatctacgcgatgttcagccagatggaggtgttcgccgtcaacatggccgactacaccgcgctcaccgtggtgaagaacctgccgaagggcatccactccggcaaccgctacatcaagacgtttccgaccacgccggagaacgcggcgtggggcgatgcctacaaggccaagtacaacgaatacccgaccaattggtcgtggcagaacgcgaccgcggtgatgttcctggccgaagccgccaagaaggcgaactccgccgacggcaagaagatcgccgaggtgttgaagggcctcaccatcaagtgtccgttcggcgccgacggcaccgtcacgatgcgtggcgacgatcacaccctggtcggctacgccatcggctggggcaccacgatcccgcaggagccctatgtgcccgaggtgaaggccggagactggaagaccatcttcgagctcgaagccgagtggaagaagagcaagggctatacctgatctgatgtacggcggagacgggcgaccgtctccgccttcgcttgttttccgcgtcgtatccggcgcgctgcaatgaaagtactcccgtggatcttgacgcgcttgccggctgcctctccagttctgcttgcctggtgacgcagaccaccagcggcctcatcatcggcatgctccttttcctggtcgctgtcgggctgaccctgatcttcggggtgctcaaggtggtcaatttcagccacggcgccttctatatgttcggcgcctatttcgccatgacgacctatcagctcacggagagcttcgcgctggcgatgctcgcgggcgccgctggcaccgccattcttggcctggtcttcgagcgcgtcttcatgagccgcgtctacggcgctgacgtactgatgcagctcctcgtctgctatgccttcgtgctgatcttcgacgatgtcgtgcgcatcatctggggacccgagttcaaggccatgggcatgccggcggcattccaggtgatgccgctgttcatcgccggcggcgtcgtgccgccgtattacttgctgctgatcggggttgcgcttgtcgcggcgatcgtgctcggccttgggctgtcgcgcagccgcatcggcaaggtgatccgtgccgccgcgcacaatccaggcatggtctccgcgctcggcatcaacaccggtttgatctatggcggcgtcttcgcgctcggcggcatgctggcggggcttgccggcgcgctggctgcgccggtgcggtcgctcaccccggggatgggattctccgtgctgatcgaatccttcatcgtcactgtcatcggaggcatgggctcgatcctgggcgcgctgatcggcgcgttgctgctcggcctcatcaggtcgtttggctcgcaaggctttcccctgttcgtggaagggctgatgtatttgttcatggtgatcgtgctggtctccaagcccaccggcctgttcggcaaggaggcggcatgaccgaactcgaggccggacgcgcgcagacgctggtgccggcgcgcagcggcgcggcgcttcagcgctaccgcgacgtgttgattgcgctgattgccttcgcggtgcttgcgagcttgccgctgttcacgggcagcaaggcgctgctcgatttcgtcatccgctgctcggcctatggcctgttcgcgacctcgctcaatctgctggtcggctacaccggcctgacctcttttggtcatggcatgttcttcggcctcggcgcctatagcttcggcctgatcatgcagaagctgggcgttccaattccggtggctttcgtcgcgacattggccatcacggcggtcgttgcggcgatcatcggcgcgatctgcgtgcggctgaaggagatctattttgccttcgtcacgctcgcgttccagatgctgattcattccacgatcctgtcctgggcctcgttcaccggcggcgaccagggtctgcgcggcggcattccgcggccggtctttctcggcatcgatctgtccgatcacgtccatctctatgtcacgagctgcgcgctgctcatccttggcctgctcgcgatgcaccagatcgcgcagtcgccgttcggctatacgctgcgcatgatccgcgacaacgcagcgcgcgcgagcttcctcggcattgacgtctggcgcgccaagctcaccgtgttcgtgctggcagcgctgtttgcctcgatgggcggaatggtgatggcgttgttcgtctcgggcgcttacccggaattcgcctattggacgatctcgggggagggcatcttcatcaacatgctcggcggcgtctcgactttcctggggccgatggtcggcaccgtgctgctgctgctgctcaatgacaccgtgacgcgcttcaccgaatatcacggcatcgtgcttggcgtggtcatcctgttcttcgcgctgggcctgcgcaagggcctgctcgatttcgtcgccgattggcttgcgcagcggcgtgatgcaggcgaggggcgttagccatgctcgagatccgcgacctcgcaaagtccttcggcggcgtgaaggcgaccaacgatgtctcgctcgccttcccggacggctcgctcactgccgtgatcggccccaatggcgccggcaagagcacgttcttcaacctgatcaccggggccttgaagccggattccgggcaggtcctgctggacggcgtcgaccttgccggccgctcgccgccggagatcgtacgctacggcatcgggcgcgcctttcaggtcgcgagcatcttcaaatcgctgacggtgcaggagacgatgctcgctgccgtcagcgccgaccagcgcacgtccgcggtgctgcacaagcgctttccgctgccggagacgcgcgaccgcgcagagcatgtgatggaactcttgggcctcgccggcaaacgacatcgcaccgccgcaacgctgtcccatggcgatcagaaactgctcgatatcgcgctggctttggtgctcgatccaaaggtgctgttgctcgacgaacccaccgccggcatggggccggaagagcgctggcgcatgatcgacaaggtgcgcgagctctgggagacccagaagatcaccgtcgtcttcatcgagcacgacatggacatcgtattcaagatcgccccgaagatcgtcgtgctctgctatggccgtattctcgcgaccggtacgcccgatgagatccgcaagaacagcgccgtgatcgatgcctatctcggcaccgaacatgcgggagctgctgcatgagcgccgtcatcgaagtcgccgatctcgacgtctattacggcaccagccagatcctgttcggcgtcggtctctcggtgcggcagggcgagaccatggcgctgctcggccgcaacggcgccggcaagtcgacgacgatgaaggcgatcatgggacttgcgccgccgcggcggggcagggtcagcctgcgcgggacggtgatttccggccagaagccgcatcgtatcgcgcgtgccggcctcggcttcgtgccggaggatcgccaggtgtttccggagcacacggtcgaggacaatctcgtcatcggcaggaagaaggggccggaaggtcaggacgaatggccgatcaagcggatctacgaggtctttccgctcctcgaaccgctgcgccatcgcatcgccgggcgcctttccggcggcgagcagcagatgctggctatcgcacgtactctgatgggcaatcccgcgctgctgctgctggacgagccaagtgagggcctcgcgccgatcatcgtgcagcggatcggcgaattgttgcggcagcttcgccaactcggttcgaccgtgctgattgccgagcagaacatgcatttctgcctggggctggcgagccatgcgacgatcatcgacaagggccagatcgtctatgcagccgggatcgacgaactgaaggccaacgaggccatccggcggcgttatctggccctgtagccggcacgggcggcctccgagcaggcccgaagaagaaaattgtcgtctcaggtctccgcgacggaaggagttttcctgccgcggggcaaaaaagccaatcgcttccattgctgtttggagccgaaacgacgacatttctgccagaaattggtggatcggcagccatggaacgcactggatttgagcccttcggcgagcaattggtgtccgcaacggacagccagccgaagttgagtgcctcgaagctcctgctgcgaactggcacgacgctgttctggtcgctggtcgccggcatcgtgctcgcgcgtgcggccttcttcgagccgggcgtctatgacggcttcagccgggttgcctcgctcgccaagagcctgatcttctgaggcgcgccccagctgtttattccaggttcgaggacagaacttcgctcggccctgatatgtcgaaaacttatttcccaacggaagcgcgctgcgtataaatccttctcctctgggagagatttgtgtcgcagaatcaagcatccagcccggccgatacgaagccggcatccgccgcgagccgcattgcggcgctgattcccggcatccttctctgcgttttgctcgccggtgtctcggccctgctggagcacgccgagttgggcatgttcgagcatccctatgtcgaggcgctggtgatggcgatcctgctcgggatggcgttgcgcagcttctggaagcccgcgccgcgctggcaagccggcatcgccttcagcgccaaacaactgctcgaagtcgcggtgatgttgctgggcgcctcgatcagcttcgcggcgatagcggcctcaggcatcgcgctgctggcgtcgatcgcggccgtcgtcgtgattaccctcggtgtctctttcggcctcagccgtatgctcgggctgtcgacacgtctgtcgatcctgatcgcctgtggcaactcgatctgcggcaattcggcgatcgccgccgtcgcgccgatcatcggcgccaacaacgacgagatcgcatcttcgatctccttcaccgccatcctcggcgtgatgatggtgctgggcctcccgctgttaattccgctgttgcagttgtctgcgacgcaatacggcatcctcgcaggcctcaccgtctatgccgtgccccaggtgctcgcggcgacggtgccggccggactggtctcgacgcagattggcacgctggtgaagctgatgcgagtgttgatgctggggccagtcgtggtgggcttttctctgattgcctcgcgctggcaaaccgatgccaagaagaccaatgtcggcttcttccgccttgtgccgtggttcatcctcggcttcctcgccctcgcgacgctgcggtcgctcgagatggtgccggcgactgtggtcggccccgtgaccaagatcaccggctttctcacggtggtctcgatggccgccttgggcttgggtgtggacgtccgcgtgctggcgaacgtcgggggcagggtgaccgccgccgtgacgctgtcgctgatgctgctgctcggcatcagcatcgcactggtgcactggttcaagtgatcttgctgcgatcgcagcacttgccccgtccgctttgcaggcgagggtggctcgccgcatagcggcgagacggatgagggtatctccccgcgtgagtctggtgcagtcccacggaagggcagtcagcaagcgtcggctgaacgcctagatcacgtcggccagcgaatggccgtggagttcgatgttgagtccctgcatgcccaggtcgttgatctcgccgcccatagccttcaggctctcctcgcggatcagcgacatcagcccgcggcgcagggccaggaattccgacgacatcatcatggattgctgccgcggtcgctccagcgggatcgggatttccgccttgatcgagccgggccgggcggtcatgcagtagacgcggtccgacaggaaaatcgcctcgtcgatgtcgtgggtgacgaacagcaccgagatcttcagccgttgccacatattggtgaggatctgctgcatgatgacgcgcgtttgcgcgtcgagcgcgccgaacggctcgtcgagcagcagcactttcggccccgtcgcgagcgcgcgtacgatgccgacgcgctgcttcatgccgccggagagcctttccggataatgtttctcgaacgcctcgagcccggcaagcccgagcagcgtgcgcgcggcacgctcgcgttgcgagcggggcatgccgcgcatcttgaggccgaactcaacgttctcgcgcacggttttccaggggaacagcgaatattgctggaacaccatgccgcgttcggcgctcgggccgttgacgcgttcgccatcgacggtgacgatccctgtcgtcggtttgaggaagcctgcgacggcattgagcagcgtcgactttccgcaaccggacgggccgacgatcgacacgaactcgccgggccgcacatggatctgggtgtcggtgacggcctgcaccgctccctcgatggtctcgtaggcgagggagaagttcttgacctcgatgtggccctttgccttggccgcaaggacttcgctcatgtcgatctccatggcatcaccaattgtcccgcgccgcggatcagcaggctcgatccaaggccgagcaccccgattgcgatcatgccgagcgcgatatcggcatattgaaccagcgaatatgcttcccaggtgaaatagccgatgccgtactggcccgagatcatctcggccgcgatcagcgacacccatgcgacgcccatgccgacagtgaggccggtgaagatgtgcggcagcgaggccggaaagtacacttcgcggaagatcgagcgctcgcgcgcgccgagacactgcgcggcacgcaccagcaccggatcgaccagcgacatgccgtggagcgtgttgaccaggatcggaaagaacgagccgaggaacgtgatgtagacgatgctctgctcgttggtcggccacagcatgatcgccatcggcacccaggcgatcgccgggatcggccgcagcacctccgccaccgggaagaccagctcgtgcaccagcttgaagcgtcccatgatcaggccgagcggcaccccgacgatggcggcgagcgagaagccgatgaagatgcggcggcagctgagcagcacatgcatcaggaatttggggtcgtggatcgccttggtgaagctcgcataaaccgcgagcggcgagggcacattggtgaagcgcacgaagaatacgacgcgataggtcgtgagcaggtgccagaccaggaggaacgcgagcagcgagatgacgccgatcgcggtcgcgcgcaaccggccctggttcaggcggtaccagcgtaggacgagcgtgccgaaggagggcggtgcggcggctggcgagacggcgggcacagggcccgcctctgcaatggacgttgccggcatgccgtcctcgggatgtctgacgagggcggggctgctcacgtcttgcctccgccgaccgacgctttcaccgcatcgtcgaagccgagcaccttgccgctgatcttcgccgcgtaggcctcggcatccttcttcagcaggaatggtgcgacttcgccgctgcccacggcgaagaaggcctgatcggcgaacagcttgatcccgcgggtggtatcgaacacgtaggccacgttgatcttcttgcccttggccttgtagtcggcataggcgccgagtgtgcaggtggcggacgagaagggcatgatgccggcgtcatcgacccagacttcgccggccttgcgcggatcggcgatgggcttcttgcagaaggcgtcttcgcccgagatttcatagttcttcgtgctcgcgagctgcgcgtcgtagtcgagcttcatctcggcataggccttgcggatgtagctgtcgtcgacccacttcttcggatcgaactccttcatgcggccgagattctgcagaaccttgacgtcggtcgtcgcggcatcgatcaacgctggcttgaccgtgggatcggtggtcatgttgccgctgggaccgaggaagatgtagacgacttccttattgatgccggtccattcctgaatcttctcggcggcgagcttgggattgtcgcgcagccactgattggcggcgatcagcgccttgaagtaggcgacgacgacctcaggatacttctcggcgaaatcggtgcggacgacgatgccgtggaaggtcggcaagttcgtctcgactccgtcgaagatctttcgcgcgaagccgcggaacggcagcagctcggcgaaggggacgaagtcggcatgcccgtcgatcttcttctcctggagatttgtggatccgacctcgggactctggctgaccagctggaagaagtcagcgggatagccccggtcctgcatcgctttgaggaccatgccatgcgcggcggagccgaaggggacgctgacgagcttgcctttgagatcggcgagatcgtagtagggcgagtccttgtgaacgacgagaccgttgccggagccggagaggctgtaggcggcgatgccgaccagccggctcttgctctcggggttgctctcgaaggtgaagccgttcacgatcagcggatagtcgcccatcatgccgatctgcagcttgttcgccatcatcgcattggtgacgggcgggcctgaggtgaaattctgccactccagctcgaacttgatgttggcatacctgccatctttcggcagatatttctcgaggagacgcaactggcggatgacgacgccggcggtgaccgtgtttgtcgtggtgtcctgcgttccgatgccgagtgtgatcgtttccgccgacaccggctgtgtgacgattagcgccagcgacgtcaccgacatcgcgatcgagagcgtgggaagacggcggaccattctcatcctcattcggttggatgtgctgtggttgccatgattgggtgagggcgcgggcagggcaaatccggagtggccgttgcagtcgattagttgccgggaaactctgattgcatactccttgggcagtcctgcactataaagccgcttgcctgtgcaccggccctggctgcaaattcgtctagtcagctgcgtgaccgcgcatctcttccagcacgtcggtccggcagatcacgatctgcgaccgcttggtcagcacgattcccttctcctgcatgcgcttcaggctgatcgtgacccactgccgggtggcgccgaccatgtgggcaatatcggcatgagtaaaggctgcagcgatcacggtgccgtcggcatcctcgacaccgtagagctcgacgagatgcagcaggaggtgcgcaagacgctgcgtgatcgagcgcgttcccagcatttgtgccagcgcagaatagcacttgcccttgaaagtgaggccttcgatgaggccgatcgcgagattcgggatctccgcggcaagggacctcagctcctttcccggtaggtgcacaacgctgcaattgctggatgccacgccggaccattgatgcatggtgccttcgaacacttcgggcccgccgacgaaattgccggcgtgccagtaagccagcgtgatctcgcgcccaagcggggacgtgtagaacacccggatgcggccgctctcgatcagccagatgccgtcatgcttgccgccctggctgaacagagtctggccgcgattgagcaccttgcgacggccctgcttcagcaccagctcgcgctcacgcggagagagcttgtccatgagcggcggcgggccgccgatccattgctggttctcggtcagcagcagcgacgaactgccggtgggccgcaccgctccgggaacggtcccgcgaaccgcattcgccgcctgcaacatcgtctgcctccggaacgttcaaatcgttctaaagaggagcaatgtccgtgccagatggcctgccgaccccctgcgtcattctgagcgcgccgttcggtgcccggtgagaacgatgccggttatgcggcagtcccggccaagctcagcaaatacggcttcgggtaaatgccccggttgtgcccatccgagaacgagatgttcagcccgtagccgaggtcgccgatctcggtgatggcaatgccgggaaatgcttcagggaagcggccatcgaagcgtgcacgggtgcagtgggcgcatttgcaggagatgcggagtgtttcggcgccgatgctcagcgcaacgtcctgcgtggtgcggacgagcagcgaagcgagatcggtgctggcttcatagccggctacggtcggcgcgaccaatgtcgttgtcatgacggacctctgacttctctctaggcggtcgcggcatgtacgaacagcaactaattgccggcgggcgtgatcgcgtgccttctctccgatgagcgctcacgaaatgtgaaactaatcgaccgggaactccacttccgcgttgccggactatcatctctccgaaaccttctgcgccatcgatggcaaggagagatcatgagcgcatttcagaaggaaacggttctgtctgtcagacactggaccggctccttattcagcttcaccgcgacgcgagatcccggcttccggttccagaacggtcaattcgccatgatcgggctcgagatcgagggcaagccgttgatgcgggcttacagcatggccagcgccaaccatgaggaggcgctcgagttcttctcgatcaaggtgcagaacggcccgctgacctcgcgcctgcagaagatcagggaaggcgacatcatcctggtcggccgcaaggcgaccggcacgttgatcaccggcaatctcattccgggaaaacgcctgctgctgctctcgaccggcacggggcttgcgcccttcgccagcctgatcaaggaccccgacgtctacgagaactacgagaccatcgtgcttgcacatggttgccgccaggtctccgagctcgcctatggcgagcacgtcgtcgacggcttgcgcaaccacgaattcttcggccccctgatccgcgacaagctggtctattacccgaccgtcacccgcgagccgttccggaaccgcggccggatcaccgatctgatcgcctcgaatcaggtttttgacgacatcgggcagtccggcctcgatattgaggccgaccgcatcatgctttgcggcagccccgcaatgctcgaggaactccacgcgatgttctccgcacgcggcttcgtcgagggcaaccacagccagcccggccatttcgtgatcgagaaggctttcgtcgaacgctgaggcgcaaatcgcgttccggcgacaactaattgctatcgccgggaagctccctgaacaaatctgacgcaaaggcgccggctatcggcgaaccaggagcaagtgatggcactagatgagatcgtcgacggactttccgaggtttcctgcgacgtgctggtcatcggcggcggcacggccggcccgatggcggcgctgaaggcgaagctgaagaacccgaaggccaatgtcgtcctgctcgaaaaagccaacgtcaagcgctccggcgcgatctcgatggggatggacgggctgaacaacgccgtcattcccggctatgcgacgccggagcagtacaccaaggaaatcaccatcgccaacgacggtatcgtcgatcagaaggcggtctacaaatacgcgcagaattgctacaagatcatcgaggagctcgatagcttcggcattcgcttcctgaagaacgagaacggcgactatgccgtcaaaaaggtgcaccacatcgggacctacgtgctgccgatgccgaacggcgaaaccgtgaagaaggcgttgtatcgccagctccgccgcgcccgcatcctgatctccaaccgctacatggcgacgcggctcctgaagtctgccgatggccgcatcgcaggggcggtcagtgtcaatacccgcactgccgagatgctcgtcatcaaggccaaggccgtgatcctctgcatgggcgccgccggccgcctgggcctgccgacctccggctacatgttcggcacctatgagaacgcggccaattccggcgatggctacgccatggcctatcatgccggcgccgcgctcgcgaatctcgaatgctttcagatcaatccgctgatcaaggactataacggtccggcctgcgcctatgtcgccggcccgttcggcgcctacacggcgaacaacgagggatcgcgcttcatcgagtgcgactattggtccggtcagatgatgctcgagttctacaacgagctcctgtccggcaagggccccgtgttcctccagctcaagcacctccaccccgacaccatctccgagatcgaatccacgctgcacaaggtggagcgtccgacgcgcgggctgttccagcaggggcgcggagtcgattaccgcagcgaatcgatcgagatgcacatctccgagatcggcttctgctccggccacagcgcctcgggcgtgttcgtcgacgataatgcgcgcaccaccgtgccgggtttatatgccgccggcgacatggccagcgtgccgcacaactacatgctgggcgccttcaccaacggggcggtcgccggcgtcgatgccatggagttcgccgatagccacgatttcgcggagttcgacgcgaccgatgtcgcgatggagcgcgaccgcgtgatggcgccgaccaggcgcgaggacggcattccgcccaatcagatcgagtacaagacccggcgcctcgtcaacgactatctgcagccgccgaaggtcacgcgcaaatacgagctcggcatgcggcgtctggccgaagcacgcgaggacatgcaggagcgcatgatcgcgcgcaacgcgcacgaactgctccgcgccctcgaagttcagtcgatcatggactgcgccgacatggccgcgcacgcctcgctttaccgcgaggagagccgctggggcctctatcactggcgcacggattttccggagaaggacaacgagaactggttctgccacacgctgctgagcaagcgtgacggcaagatgaccagcgagaaacgtgccgtcgagccttatgtcgtccctatcgcggacgacgagaaagacctctacgacaagcagcgcatccgcgcctccgcctgatccgccagaacacagaaacaggagacatcgaaatgcctctcgcgtcctatcagacatctgtcccggtggtcgtcgacgacgcgaaatgcatcgccgacaagggctgcaccgtgtgcgtcgatgtctgtccgctcgacgtgctgcgcatcagcgacatgaccaagaaggcctacatggcctatgacgaatgctggtactgcatgccctgcgaagcagactgcccgaccggcgccgttaccgtcaacattccctatctgttgaggtgatgatgtcgagcccgttcgaatcctatgacgatctcgaagacgccgacgagcggctgcaggccgccgatcccgccgagcgccgcgtcgccatcatcgcgctcggccattccggcgatcctgcggccgtcgcgcatctcgccaacatggtgtctgaccccgatgccggcgtgcgccagcaggtcgcgatggcgctcggcgagttcgatggaccggaggctgcggcggcgctggtgaagttgctggtcgatcctgagaggatcgtcgcagcggctgcggctgacagcatggccgagttcaaggatcctgcctgcgccgagatcatcctgcccctggtcaagcacgcccacgccttcgttcgcatgggcgcgctgcgtgctttgaaggaattgcgctgcaaggacacattgaagccggcgctggaagcactccaggattccgatgccgccgtgcgcgtgcaggcgatcggcgtgatcgggttcctcaagctcgaagaatcgatcccggcgctgaccgcgctgatcaacgatcccgatgcccatgtccgccgcgcggcggtcagcgcgttggcgttctcgcacatgaagcccgcggcggagacgatcacgcgcgcgctgaaggactcggactggatggtgcgcgaaatggccgcggagacgctgggcctcaacgccaacggctcgctggccgcggatcaactcatcggctcgctcggcgacgagttctggcaggtacgattgaaggcgatccgcagtctcggcaagatgaaggtcgagcgtgcggtgcgcccgatcggcaattccgtcaaccacgaacaggcgaacctgcgcaaggaggcggccgccgcactcggcgagatagcccatcccgatggggaagcgttcctggccgtcattgccgatgatccggatcctgatgtgcgcaagaatgcacgttgggcgctgcagcagaccgcggcccgcaaggcgcgggcaggggcatagcggttcttcgcggctggtctggacttcccctgccagacgtttatttgtcttcgccaacgggatcgaccgccgaaaaatggccgatctgagaacagcgaggacgcggccatgacgactttgatggtgaaagacctactccccgaggacggaacgaaggggacgctggttggccgcgtctggctgccgcaggtcaacggtcccgccgtcgtcgccgtgcgcggagatggcgtgttcgacgtcacggcgaagtttccgacggtcagcgcgctctgcgaggaagacaatccggccaaggcgctggcggcagtcaagggcgaacgtatcggcgatcttgaagccatcgttgccaatacccctcccgacggccgcgactccagcaagccgtggctgctcgcgccagtcgacctccagacgctgaaagccgccggcgtcactttcgccatctcgatgctggagcgcgtcatcgaggagcgcgccaagggcaacccggcgtcggccgaggcgatccgcaaagaagtcacccggctgatcggcgacgatctctccaagctcaagccggggtcggaccaggcgatgcacctgaagcaggtactgatcgatcagaacgcctggagccaatatctcgaagtcggcatcggccccgatgccgaggtcttcacgaaggcgccgaccatgtcgtcggtcggcaccggaatggatgccggcctgcatccgaaatcgacttggaacaatcctgaacccgagctcgttctgttcgtctcgagccggggcaagatcgtcggcggcgcgctgggcaatgacgtgaacctgcgcgacttcgagggccgttcggcgctgctgctgtcgaaggccaaggacaacaacgcgtcctgctcgatcggcccgttgctgcgcctgttcgacgacagcttttcactcgacgatgcgcgcaagctggacatcagcctgaatgtgaagggcaccgacggcttcgtcctcgacggccactcgtcgatcagcaagatcagccgcgatccgaccgatctcgtggagcagacgatcggaaaggtgcaccaatatcctgatggcttcgtgttgttcctcggcacgatgttcgcgccggtgaaggatcgcgatgcgccggggcaggggttcacccataagcgcgacgacatcgtcacgatctcggcgccccaacttggcaagctcgtcaaccgcatgcgcacgagcgacgagtgtgagccctggacgttcggcatcggcgcgctgatgaagaacctggcgcagcgaaagctcatatagctctttgtgctggccgtccgaggtccgacgagagagcgcggcttggttttcacgctcaagttgttttggtgtacaattcacgcagagggtgtcgtcagcctgcggcccagccggcatgccaacggtatagtcaaataatatgactagtaaggccgcaattcctatggaatagtgcgatccgagcgcccggaatgggcgaccgtcggtgctttgttaccaaaatgggcgctggccaagattcggggagaaggcgcttcatgacctcgcgcatcgtcgtcatcccgacgcgacgggctcactccaaccatgccgaggtggctcgctcgatcggcgtcgacatcatcgccggccgctacgcggaggggacccgcctgcccggcgatgccgagatgatcgcgatgttcggtgtgtcgcggccggtcctgcgggagagcgtgaagacgctggtcgccaaggggctgctcaccaccaaggcgcgggttggcaccgtcgtgcgcgagcgcggcgcctggaacatgttcgatgccgacgtgctggcctggcacctcgacgccggcatcgacaagcgcttcctcaacgacctcgcggagatccgcctcgccgtcgagccgcgcgcggccatgctcgcggcggcgcggcggtcggaggacgatatgaccgagctccggcgcagcatggagcgcatgcggcgtgaagcctccgattcagcgggctttgccgatgccgatctcgcacttcatgtggccgtggcccgcgcctccggcaatctcttcatgcgctcgatcgggcatgtcattgaagccgcgcttcgcgcctcgtttctgctcagtgccccggtcgagccgaaggatcgcgacaccgtgctgctctggcatcagaagatcgtcgacgccattgccgcgggcgacgcggacgcggcctccgaagcgatggttttcgtcattcacaacggcatgcatcgccacgacggtgccgcgaccgagacggtgccggccgaggtgctgccatcgggggaacctggaggacgatcgtgaccgagcttcgcatcgccattgtcgggttcggcaagatcgcgcgcgatcagcatgtcgacgccatcgccgcggtttccggcgcgacgctgaccgcggtcgccagccgcaacgcttcgctgccggaattgccgcatttcgcaacgatcgaggaattgctggagcaggggccgccgatcgatgcgatctcgctctgcacgccgccgcaggtgcggcggacccaggccgcagccgcactcgccgccggcaagcatctcatgttggagaaaccccccggggcgacccttgtcgaactcgatccgctgatcgcgatggcggcggaggcgaagtgcacgctgtttgcgacttggcattcgcgccatgccccggctgtcgagccggcgcggcaatggctgaaggcgcgccggatcaaatccgtgcacatcagctggaaggaagacgtgcgggtctggcatcccgggcagcgctggatctgggaacccggcggcctcggcgtattcgatcccggcatcaacgccctgtcggtcctgaccaggattctgccgaagcctgtgttcgtcaccgcagccgagctggcctttccagccaattgccaggcgccgatcgcggcgaacctgaccctggcggatatcagtggtctgcctgtgaccgccgagttcgatttccgccagaccgggccgcagagctgggatattgtcgtcgaaaccgatcagggccggatgactctgtccagcggtggcgcgcgcatggccgttgacggcgaggtgctcgccgaagcgccggacgaggaatatcgcggactttaccggcgcttcgtcgaactcgcggcgtccggcgccagtgacgtcgatctgatcccgctgcgtctcgtcgccgacgcattcatgctgggcaggcgcacgatcgtcgaaccgtttgtggattgagcatggccgcgtcgagagtcacgaacgacgtattcgggacgctgccggatggccgcaaggtccggcgcatcgtgttgcgcggggcaggcggcttcgaggcgcggatcattacctatggcgccgtgctacaggcgctgatcgcgccggacgccaaaggcggatacgacgacgtcgtactcggccatgacgcgtttgccggctatctcgccgaacgcaagttcctcggtgccaccgtcggtcgttacgccaaccgcattgccaagggggagttttgcttggacggcgagacgattcagcttgcggtcaacaacggccccaatgcgctgcacggcggcctcgatggcttcgaccgcaagctctgggagatcgcggacatcgacgagggcccacgacccgcgataacgctctcccatgtcagcccccatggcgaggagaactatcccggccagctcgatgtgcgcctgacctatcgggtcacgggcccggccgagctgtcgctgatcatggaggcgcgaaccgaccggcccaccatcgtcaacctgaccaaccacagcttcttcaaccttgagggcgcgacgtcaggtacatccgtcctcgatcatagtttgacggttgctgccgggcatttcctcgccatcgatcccaccgccattccgttgccggagccgccacgcccggtagccggcacgcctttcgacttccgcgagccgcggccggttggcgagcgtatccgcgagagcgatcagcagctgcgaagcggcaggggctacgaccacacctactgcttgaagcgcaacggcgagctcgcgcttgcggcccggctcgaggcgccgcgctcgggacggatcatggagctgctcaccaatcagcccgggcttcaggtctattccggcaattatctcgacggtacgatttcagggaagggcggcaagctcatccgtcaatcggacgccatctgcctggagcctcacatctggccggacgcgccgaaccggccggacttcccgagcccgcggctcgatcccggcgaagtctatcgccatcacacggtctatcgtttttcagcgaggtcgccatgactgagcaggtgcccacgactgtcctctcggaccatccctgccacctcggcgaaggcccgacctacgacgcctccaccgacaccgcctggtggttcgatattcgtgaagggctgctgttcgaggcgcggctcggcggcagtatccgcgttcacgaactcggccggatggcgagcgcgctcggacgcatcgatgccgagcggcaattgatcgtcgccgaggatggtctttacattcgcaagcccgtcgatggtgcgatgacgctgtttctcccgctcgaagcggacaatccggcgacgcgctcgaacgattgccgcgtgcaccaatccggcacgttttggatcggcaccatgggcaagaatgccgagccgaaggcgggcgcgatctacgcgctccatcgcggcaagatctcgacgctgttcgacggcatcagcattcccaactccatctgcttctcgccggacggcgccaccggctatttcaccgacaccccgcgcgcggtgctctatgccgtgccgctcaatcccgcgaccggccttccgcgcggcgagccggaagtgctgttgcgccacagcggcgtcggcgggctcgacggctcggtgtgcgatgccgacgggcagatatggaacgcctgctggggcgcgagccggatcgatgcctattctccgcaaggcgagcgtctgcgctcgttgagcgtgccggcaaggcaggcgagctgtcccgccttcgtcggcgccgatctgtcgcgcctcctcgtcacgtcggcctggcaggatatggacgcggccgcccgcgccgccgatccgcaagccggctgcacgtttctgttggaggcatccgcgcgtggccgcgccgagcccgacgtcaagctcgcataggagaccagaggcagcgcgcgaccacgttctcgacgaaacaaagaagcagtctgatacccaagggagtgaaacatgctgacaatgaagaccacgttcctcgcgttggcgctggccggcgctgcgacaatggtcgcgggcgtctccgcctccgcccagaaggcgaccgtcgggatcgccatgccgacaaaatcttcggcgcgctggatcgacgacggcaacaacatggtcaaggtgctgaaggagcgcggctacaatactgacctgcaatatgccgaggacgacattccgaaccagctctcgcaagtcgagaacatggtgaccaagggtgccaaggcgctggtcatcgccgcgatcgacggcaccacgttgtccgacgtgctcaagcaggcgaaggcgaaaggcatcacggtgatcgcctatgaccgcctgatccgcggcacgccgagcgtcgactattacgcgacgtnnnnnnnnnnagggccttggtctcaaggaaggcaagggtccgttcaacatcgagctgttcggcggttctcccgacgacaacaacgcgtacttcttctacaacggcgcgatgagcgtgctgaagccctatatcgacagcggcaagctcgtcgtcgtctccggccagatgggcatggacaaggttgcgacgttgcgctgggacggcgccacggcgcaggcccgcatggacaatctgctcagcgcctactacggcaacaagaagatcaatgccgtgctgtcgccctatgacggcatctcgatcggcatcatctcgtcgctgaagggtgtcggctatggcagcgccgaccagccgatgccgatcatctcgggccaggacgccgaggtgccctcgatcaaggcgatgctgcggggcgatcagtattccaccatcttcaaggatacccgcgacctcgccaaggtgaccgccgacatggtcgacgctgcactcggcggcaaggaggtcaccgtcaacgacaccaagacctacgagaacggcgtcaagaccgtgccgtcgtatctgctcaagccggtcgtggtctacaaggacaattgggagcaagtgctggtcgacagcggctactacaagaagtcgcaattccagtagacctctggtgccgtcgttcagggcacgcgaggcgtgaaccatggtgcgctcttgcgcacctgagaacctcgagattccgggttcgatgctccgcattgccccggaatgacgccggagcgaatgacgaaggtttccaggaacatgatccaatgaccgccatgctggagatgcgcaacgtcagcaagagctttgccggcgtgcaggcgctgcgcgacgtcaacttctcggtccgcgccgggcagattcacgccctcgtcggcgagaacggcgccggcaagtcgacgctcatgaaggtgctgagcggggtttatccgcacggcagctacgagggcaccatcgttttcgagggcgaggagcgacgcttccgcgacatcaacgattccgaggcgctcggaatcatcatcatccaccaggagttggcgctgatcccgctgatgtcgatcgcggagaacatcttcctgtcgcatccgccgtccaggctcggcgtgatcgatcgcgacgaggtgtatcgacgcacgcgggagctgctggcgcaggtcggcctgaaggaatcgccgaataccctgatcaccgatcttggcgtcggcaagcagcaattggtcgagatcgcaaaggccctctccaagcgggtgcgcttgctcatcctggacgagccgaccgccagcctcaacgaagccgacagcgccgcgctgctcgagcgcctgatggccttccgcgagcaaggcatcgggtcgatcctgatctcgcacaagctcaatgaggtcgccaaggtcgccgaccacatcacggtgctgcgtgacggccgcaccgtcgacagcatcgattgccatgtcgaaccgattcaggaagaccgcatcatccgtagcatggtcaaccgcgatcttgcgcaccgcttcccggagcgcagcgcgaagattggcgaagccgtgctcgagatcgcgaactggtcggtctatcaccccatccatcccgagcggcaggtgatcaagaacgtcagtttcaacgtcaagcgcggcgaagtcgtcggcctcgccggcttgatgggggcaggacgcaccgagttcgccatgagcctgttcggcggatcctggggcaccggtatcggcggaagcctgcgacttgagggcagggaggtggtgttgccgaacgtcgccgccgcgatcgatgccggcctcgcctatgtcaccgaagaccgcaagcagctcggcttgatcctcgccgacgacgtgcgcaagaacatcacgcttgcgagcctcgaccaggtcgcgccgcggcgggtgatcgacgacattgccgagctgaaggtcgccagcgactaccgcaaccgcatgcggatccgctgctccgatgtctatcaggagaccggccagctctccggcgggaaccagcagaaggtggtgctgtcgaaatggctgatgaccgatcccaaggtcctgatcctggacgagccgacgaggggcatcgacgtcggtgccaagtacgagatctattgtatcatcaatgaactggctgaagccggccgcggcgtcgtcgtgatctcctcggagatgcccgagctgctcggcatctgcgaccggatatgcgtgatgaacgacggcgcgttcgtcggagaattcaggggagccgaggcgacgcaggagaagatcatgcgcgccatcatgcgcaacgaacgaagtactgggaacgccgcgcccgcggccgcggagatgggaggatcgcagccatgaccgacaagacggtgtcgctgcccgaggagcgccggcacggcagcttcatcaagaacaatctgcgcaattacggcatgctgatgtcgctgatcgcgatcatgctgttcttccaggtcgtgaccggcggcacgctgctgcagccgctcaatctgaccaacctggtgctccagaacagttacatcgtcatcatggcgctcggtatgctgctggtcatcgtcaccggccatatcgacctctcggtcggctcggtcgcgggcttcatcggcgcggtggccgcggtgctgatggtgacctacaaggtcgactacacgctcgccttcatcgcctgccttctagttggcgccgccatcggcgccgcgcagggctattgggtggcctacttcaagatcccgtccttcatcgtgacgcttgcgggcatgctggtgttcaagggtcttgcacttgccgtgctgcaggggcagtcgctggggccgtttccgccgacctttcagaaactatcgtccggcttcattccggagctgctgcccgaagccggcacgctgcatccgacctccatgctgatcggcaccgtgctcgcgctcggcctcgtctacgccggcgcgaagggcagatcgcgcgaacagtcgcacggtatcgaggtcgagccctacgcattctttctcggcaaaagcatcctgctggcctgtgccgtgctctatttcacctatctgatcgcctcccaccgcggcctgcccaacgtgctggtgatcatgaccgcactgatcgcgctctacggcttcgtcacccgccgcacggtcattgggcggcagatctatgcggtcggcggcaacgccaaggcggcaagcctgtcgggcatcaagaccgagcggctgaccttcctgaccttcgtcaacatgggcgtgctcgccgcgctcgccgggctcgtcttcgccgcgcggctcaataccgcgacgcccaaagcggggctcggcttcgagctcgacgtgatcgccgcctgtttcatcggcggcgcctcggcctatggcggcgtgggacgggtcggcggtgccgtggtcggcgccatgatcatgggcgtgatgaacaacggcatgtccatcctcggcatcggcatcgactatcagcaggtgatcaaggggctggtgctgctgggggcggtctgtatcgacgtgtataaccagcggcgctgacgctacgtagtctcgcgagaagcggtgggcgcgctttggccctgctgacctaacggcacctgctactgcgtcgtgaacagcaccgccgcgatcgcgacggagaggctcactgcggaaacggtcgccaccgtcgaaagcacgcccattcgccggagtgcgatggcaaacgcgatgatgatcggtgtcgcggtcatcagcccgatttgtgcatcgctcatcttatcgttccctgttctgcggaaccgccggatgcgccaccctatggaagtgcggcaaacgagacgttgcgctggcgcaaatgcttctccggccggttgcactatttgtgcggcgacaaagttggaaccgcgccggtgagatatccgttcggcgtccttgatgcggaatgcagatgtcggcgacggattgcgaacagcaagaaaccggctggggaatcctcggagatcttcctggcgatcccatgatctgggtgctgatcttcagcgagctcgccgctttcggcctgtttcttggcgctttcgtcgtggctcgcgcgcttcatccggctgtcttcgcggccggacaggccactctcgatacgcatcttgccggaatcaacactgtcgttctggtgacaagtggctgggccgctgcccgcggtacggccgccgcgcgtgcgcggcgccggccagccgcgcggggctggatgttcgtcgccatggcgctcggcgcgctcttcatagccatcaagctgttcgaatattccggcgagatcgcgttgggtaacggcttggagacgagcccgtttttcacgctgtacttcctcctcaccggattccatctcctgcatgtcggcctcggcatcgtgattctcgccgtagtttcccggagcgccggtgctgcgggcgttgagaccggaaccgctttttggcacatggtcgatctgctctggatcgtgatgttcccgatcatctatctggtgcatcagtgattccggatcgtctcgacatcgcatggatcgcgcttattggctttgccctcgcgaccattctgctctcgtcacttgccgcacgtccattgctcggcaatgccctgttgctgacgctcgcggccctcaagggccgccgcgtcgtgctcgattttctcgatcttcgcgccgcgccggcgctttggcgaggcctcgtcagcgcctgggtcgtcatcgtggtgctgtttgcctggctcgcatccgccgtcgttgccctgatctgacgcgctcattgcgccctgacaaagaacgaacggcccccgtcggcaataaatcgcagcatcgcatctcgcttgaatcaacggaaaggattggcaatggctgaacgcctgaccaagtcggccgctcgaaacgtcttctacggcggatcggccttcttcttcgccattttcatagggctgacggcgcacagccactactacatgaccacgacctccaccgacgccgccacgctgacatcgtcggtcgcccgcggcaagcacgtctgggagaagaactcctgcatcaactgccacaccctgctcggcgaaggtgcctactttgcgcctgaagtcggtaacgtctgggaccgctggggcggcaacgaggatccggccgccgcgcgcgagacgctgaaggcctggatgcagtcgcagccttcgggtgcgcccggccggcggcagatgccgcagttcaacctcaccgaccaggaactcaacgatctcgccgacttcctgcaatggacctctacgatcaagcgccaggagtggccgccgaacaaggccggttgagagcatcgcctcccgaatccctcaagacagagagcctgagatgaaataccagacccagaaagtcgcgatgctgtacttctacggcgcgctgaccctgttcctcgcgcaggtcctgttcggcctcgtcgccggaacgatctacgtcctgcccaacacgctatcgaccctcctgcctttcaacgtcgtcaggatgatccataccaatgcgctgatcgtctggtcgttgatcggcttcatgggcgccacctacttcctgcttcccgaggagaccgagaccgagctgtacagtccgctgctggcgaaggttcagttctggatgttcttcggcgcagccggcgtcgccgtggtcggctatctcttccactatcatgagggccgcgagttcctcgaacagccattcatcatcaaggtcggcatcgtggtcgtctgcctgatgttccttttcaacgtgacgatgacggcactcaagggtcggaagaccacagtcacgaacatcctcttgttcggcctgtggggcgttgcgatcttcttcctcttcgccttctacaatccgatcaatctggcggtcgacaagatgtactggtggtacgttgtccatctctgggtcgaaggcgtctgggagctgatcatggcctccgtgctggcgtacctcatgatcaagctcaacggcatagaccgcgaagtggtcgagaagtggctctacgtcatcatcggccttgcgctgttctcgggcattctcggtaccggtcaccacttctactggatcggcgcgcccggctactggcagtggatcggatcgctgttctccacgctcgaggtagcgccgttcttcaccatggtgatcttcacggtgcagatgacctggaaggccggccgcaagcatccgaaccgcgcagctctgttgtggtcggtcggctgctcggtgatggcgttcctgggcgccggcgtctggggtttcctgcatacgctgtcttccgtgaactattacacccacggcactcaggtcaccgccgcgcacggtcatctcgccttcttcggcgcctatgtaatgctgaacctggcggtgatggcttacgcgatcccgcagatcaaaggacgcgcgccctacaatcaatggctctccatggcgagcttctggatcatgtgcacggccatgatggtgatgaccttcgcattgaccttcgccggcgtggtccaggtccatctccagcgcgtgctcgggcagggctacatggacgtgcaggatcagctcgcgatgttctactgggtccggctcggctcaggcgtgttcgtggcgatctcggctctgatgttcgtctgggccgtgctggtcccgggtcgcgtcaagcagccggtcattaccggcgcgttgcagccggctgagtaagcaaaaatggcggtcgcggtttgtcgcgaccgccttctcaaagggaactccggagaaagatcatgaacgcagcactcctcgccgtggcggcgtccgaacccgagctgccggcctatgtcgcaaccggcaacgaatgcgcgttgttcgagcacgcctggcgaaatcagctgccggtcctcttgaagggcccgaccggctgcggcaagacgcgcttcgtcgcccatatggcggcgcggctcggattgccgctgcacaccgtcgcctgccacgacgatctcaccgcggccgatctcaccggccgctatctgctgcggggcggtgacacggtatggacggatggtccgctgacgcgcgcagtgcgtgggggcggcatctgttatctcgatgaggtcgtggaagcgcgcaaggacgtgaccgtcgtgctgcatcccttgaccgacgatcgccgcatcctgccgctcgagcgcaccggcgaggagctggtggctcccaacagcttcatgcttgtcgtatcctacaatcccggttaccagacgctgctgaaggcgctgaagccgtccacacggcagcgcttcgtcgccatcgaattcggtttcctgccggccgatcaggagatcgccgtcgtgtcgtccgaaagcggactggcgccagagcgcgtgcggccgctggtcgggttggctggccggctgcgcgcgctgaagggccacgatctggaggagggcgtctccacccggctggtcgtctattgcgcgacgctgattgccgccggtacgccgatcgccgacgccgtgctcgccggcatgatcgagcccctgaccgacgatgccgacgtgaaggcggcgctgctcgacgtcgcgcgcgccatgatcgggtgaggcccatgctcgacttcctcgaactggaggagacggtcggccgcgcctggcaccggatggtcggcggcaccgggagctatccggttcacgacgatcacgccgtcgcgctcgcggggatgaagagccggctcgcggtgatgttccgcgcgctcggcggcgagacgggcgtgcagatcgcgagcgccggcgcacgcagggcaggccatcgtctcggctggcgacagcgcatcggcctcggggacgagcgactagagcagccgggccgcgacgccgcgaccatcttcctgcccgatcgcatcgcgctctttccggaccgggccttgaacgcagcgctctatcgctggcttgcggcctggttcgcggtggctccaatcgagaccatcatggaaaccgatccgctgcggcgggatcttctggttttgcgccgggcgagcgcgacgacggtcttcgtgctcacgcaatttccagggctcgccgccgactacgcgcggctcgccgccgccaccgccgaggcccggcctcgccgacctctgccgcgcaccgagcaggacatcgagctggtcgtcctggccctgctcggtgcgagcaaggggccagcgggcaagttgtggccggccatgatggggatggagccgttgccggacaaggcgccgccgggctatcgctcgatcctgccgtgcccgctctggggcgattgctggacgcgtgaactatcgcctacccatgcgggcgaggatgaatgtgccgatggtgcggagcccgccggccaggacgatcgcaagcgcttcgcgactcgcgagcgcgaggacaatgccaaccgccgcgatccgttcgtgctcaaccgcttcgagaagatcctcgcaatggcggagatggtcaatgtcgatcgtcccgctgacgacagcgaggatgaggatgcgcagaaagcggccgacgatctcgaggagatcacgctcagccgacgtaccggcaagccggcgagccggttcaaattcgatctcgacctgccccccgaggcccttgatgcctcaccgctgagtgcggacttcacctatcccgaatgggactaccgcagcggctcctatctgccggatcattgccgcgtgctcgccggcgcggcctccgaaaccggagagagctgggtccccgacgattccatgcgccggcacgtccgccaggtgcgccgccgcttcgagatgttgcggccccgtcacgaactgatgcgggcgcaggccgacggacacgacctcgatctcgatgcgctggtacgtgcgcggtgcgacctccgtgccggcagcggcggcagcggtctcgatcgcatccatgttgccatgcgcccgcaagggcacgatctcgctgtcacgctccttgtcgatgtctcgttgtcgacagacgcctgggtcgacggctaccgcgtgctcgacgtcgagaaggaggcgctgctggtgctcgcccacgggctctcggcctgcggcgatcaccacagcatcctgaccttcacctcgcgccggcgctcctgggtgcgggtcgtaacggtcaaggccttcggcgagccgatgggcggaacggtggagcgccgcatcggcgcactcaagcccggctactatacacggatcggggccgcggcgtggcgcaccgcggccgagctcgcgcaccagccgcaacgcaagaggctgctgctcgtcctcaccgacggcaagccgaacgatgtcgatcattacgaaggccggtttgcactcgaagacacccgcaagtcggtgcaggaggcgcgccggctcgggatcgcggtgttcggtgtgacgatcgacgcggcggcacaatcctactttccgacgctgtttggccgcagcggttacgccatcgtcggcaacataaagcgattgcccgcggcgctgccggcgatctaccggcaggtggcgcattgatgcgaagctgagccagtgcgaatgaggcatcgtcgtgctggtggatggcgacgatacttgctgataggttcgcctcgacggtggtggagcaaccgcaagcgagaatgagagccggaccttgaatgggatgctgattgcctgcggcgatgcgttgatcgattttctgccgacgcggaccccggacggatgtgaggcggcgctgccggcagtcggcggctcctgcctcaacgtcgcgatcggcttggcgcggctcggcgcgccgacgggcttcgtcggcggcatctcgaccgacctgttcggacggatgatcgcagatcacgccgccgcctccaacgtcgatctcggtctcgtcacccgcagcgacgaccagaccacgctcgctttcgtccgcaccgtcgcgggcgactcgcagtacgccttttacgatgccggaaccgcgacgcggaactggacctatcggcgcggctcgatcgcgttcagcaaggtcgaagccgtccatgtcggctccacgaccctggtcaatgaccaaggcgcggcggagacgacagcgctgatcgaggatgcgcgtgcgtcctcgacgatcgccttcgatccgaactgccgaccgaacctcgtcaaggacgagccggcctatcgcgcgcgtatgtccgagttcgcggcacgcgccgatctcatcaagatgtcggacgccgacttcgcctatctcttcggtgaggagtcgtatgagctgcgggcgaacgtgctgctcgggcagggcgcaagccttgtcgtgatcacccgcggcgagaccggcgccgtcgcgtggcacgcaaaggtggggcagatcgaagtctccgcgccgaaggtcgaggtggccgacaccatcggcgcgggcgacagctttcaagctgccttgctctttgctctctacaagcaggggcatctcacccggctgcgaatgaaggacatcggtgcggacgagctgcaccgcgcgctctcttttgccgcccaatgcgccggcctgacctgcacgcgtgcgggcgccgatccgccctggctgcacgagctcggctggacgctctagaaggccgcgcctctgatgcgactctgccccctccgctggcgggagaggtcagcccacatctgaaaacaaccccatgcacagtagccaggcgcaatcatttcaatggcttacattggggcaggacggtcatttcagcgtatagagaaacgccgcgatgtcgcgcgcgtccttttgcggaatgcccattttcggcatcgcattgcccggcagcgccttctgcggatcttcgatccaggccgccatattgtccggcgagttctggatgtagccggcaatgtaggtccgcgtgccgatccgatgcagcggcgggccgacgttaccattggcgcccgcgacgccggggatgtcatggcagccgccgcaacggtaggtcttgaccagatcggcaccgcggcgtgcgtcgccgctgaaattgtcagggcccgccgccgctgcttcgccagcgccgatgaccgccagtcccagcaccgagatcagcaagcgcgccgcacatctgtctcccattcggcctccgatcagggtttcttgccgaagttgaaagccttggtggcggaccagggatcggtggtcgagacctgctcggtcggcacctgttcgacttcaggtgacaacgggttcgccgagaacgtgcggccccattgacggttcggctcgttgctgatcctgccgatataggtgacgagatcccagatcacgctgtctggcagcacgccgccccaggccggcattccgtttggccggccctggtagatcgagagaaagatgttctcgggctgcgagccgtagatgaaggtgttgttgctcaacgcgggtcccatgccgccaccgccattgggtgcgtggcagccgacgcagttgaaattgatgtagtaggtcatcccgcgttgctccgcgttgggatcgccctgcatggggttcttgatctgaggcggatcgggccgcgcgcccggatgcaggtgactgaccggaacctgcatgaagacgccgggactgccgttaccgacgctgccgccgaagttcggccgtggcgccagcgtcggcatttgtgcctcctgcgattgcggcagggtctgctgggcaagtgcgggaccatgcagcgcgaccgccagcagcagggatatggcgctcgcgcgcagcgcttgagctgacatcacttatgtcctccggatgcggtgaccggctgctcgacaagcggcacgccaaaacttcgcagcagtgacgcaatttcggatcgatgcgcgtcgatgaacgcgttcagccggtcgcgcaaggcgtggtcgcccttgcgaacgcccatggcgatggcgaactggaattgctggggtgcgaagccctcgtagtcctgaatcggcgcgaccgtgagcggcacgggcgagcttttcgcgaaatagccgcccatcggcccccaggcggcggcgacatcgatcttgccgctctcgactgcctcgatcaggcgcgccggcggattagcttccctgtagtcgccgtagatcgaatagccgtggacattgtcgacgatgccctgctcgccgagcgcctgcgccggcggcggattgctgccgtcgtctccgatcagatgcacgccgattgccagatcatgcagccgcgggtcgagcagcgacgacagatcgagctgtcggtcttgccgggtgacgaagacgtaggtcgagcggtaatagggcctcgtcgtttccaccagatcataacccgcaggcacacccatcacgacgtcgcacctcccggccttcagtgtgttgcggatgaagccgcgacgctgagcccaccaggtgtaggcgaccttctggccgagatgctcggcgatcatcgcggcgagcctgttctcgaagcccgcccccgcgctgttcgagaacggcagattgttcggatcggcgcagacgcgaaggtcgccatccgatgcggccgctggcgtggccgtgagggcgagcaggaatgcaagggcgatagcgctatttcgcgggcgcacgacttggatcctcgccagttgcgccgcccagcctgaacacgagcagttcgctgccgccggcggtatagaacggcaagtcctgcgtcgcgccggtgaagccgagtgcgccgttgcgcacacgttgatccacctcggcgttggcgacgacgccgggccagccgccgacgcccgacaggatcgcgatatactgttgtccatcggagccgcggtaggaaaccggctggcctacgaagccggagccggcgcggaattgccagagcacacgcccatccttggcatccaccgccttgaacaggcgatccatggtgccatagaacgcgacgtcgccggcggtcaccagcgctccgctccagaccggcagtttctccttgatctcccagaccttcttgcgcgcgacagggtcccacgccatgaactcgccgcgatggccgccgggtccggcatacatgtcgacgtccgcgccgatatagggcgtgcccgcgatgtagccgacctgcgaggccttgaagttcatgcagagatgctgatgcggcacgtagagcagtttcgtgcgcggcgaccatgcgctcggctgccagtccttcgcacccggggcggcagggcagatgttctcgactgtcttgccgaccagcggcgtcttttcctcgttcgggatgatcttgccggtcttgagatcgacaccgttgtagacgttgacgaactcataggcgtcagccgagatgacttcgccggtggcgcggtccatgacgtacatgtagccgttgcgaccgggatgaatcagcaccttgcgcggctggccattgagctcgaggtcaaccagcacgttctcgttgacctcatcatggtcgaacagatcgtgcgggatgaactgatagccccacttcgcacgaccggtgtcggggtccctggcgaagatggatgcgctccagagattgtccccgctgcgctggttggcattccatgggctcggattggcggtgccgtaatagatcaggttcaggtcaggatcataggagatccatccccagaccgtgccgccaccgacctgccagcgatcggcaggccaggtctttaccccgagatcggcgcccttgagatgctcatagaatggcttgaagtcgtctccgatcagcacgtccttgtcgggcccggtggagtaggcgcgccagacgatggcaccggtgttctcgtcgagcgcggtgatccagccgcgcacgcccagctcgccgccgctgttgccgaccagaaccttccctttcacgacgacgggcgccatcgtgatcgtctcgcccttgttgatttcgccgagcttggtgtgccaaagctccttgccggtcttggcatcgatcgccacggtgtggttatcgagcgtattgaggaagactttgccgtcgtcgaaggcgagccctctattgactacgtcgcagcaggcaacgccggcagcggcgggctccggcttcggcgcataggaccatttgagttcgcctgttgtcgcatccagcgcaaacacgcggttgggataggggcctgcatagggaccgaccacatacatcgtgccgtccaccacgagcggtgccgcctcctggccgcgatcggcgccgagcgagaaagtccaagccagctgcaagcgcgccacgttggtcgtgttgatctggtcgagttcactgtaccgggtgttcgcgtagtcgcgtgccgccatcggccattggctggggtccttcatgcggctcgccagatcgctctgtgccaaagcggaggacagcaacgcaacgagggcgcaaggcacgctcagcaatcgcgcgagaacacgcactagcatatgtgaagatctccacggcgatgacgaggccgtgcggctttgcaggccggtttgtgaaggtacaaaccatgcgcttccgcttggttccaaagtgtgattgccgggctacctcaccacattcccggatacgcctgcgccgagatcgacggcgatctggtcctccttgccgttgcatttggggtggccgaagcccgacgcgcttttgccatccgggccaatgtcatagatgatcgcgtctttcatgttcggactgacgccggccgggacacggtcgagcccgagcaggtggcgcacacgccaggccacattgtggtcggcgcaggagctatcgccgctgacgccgagcgcgccggcgatgccgttgccatcgtagagcgccagtccgccgccgaatacgatcacgccgccgacgggcttgcccaccatcggatcatgcgccgtcccgaactcctccggagcgccgccgtacaggacctccggcgacggcgggttgctcagggtcgcgccgaacaggatgccgcccggctgcgcgcccgcgtagagatttgccgtcgccatcgccttgtccttgaggctgaacgcattcgccgtgttggccttctcggctgcgagcgcccggctgccgggccattgatcgtcaaccttgctgccactgtaggcgatcgcgcagacgatgccctgccggttgacgaccgcagcccactcgttgttgtccaggccgccgttactggggccgccgccaggcttcacgctcttcttgaggatgtcgacgagctgatcgtggtcgaccgggcacgacaaggcgggccggggctggtcttgtgctttcacggccaccggcatcgataatgccgccgccaggacggcagccgtccccgtgacgcatcgttggcccatgtgcgatcccttcgatatctcggtcagcaggcgaacgttcaaacggaagctgcagttcctatcgggagcgggcgctcaccctggatattgcgtgggagcgagcggcgcccggctatcgttcaccgtcaaccagcggtgagcaaagaacaacgcagcgccggtgtagaggattcccatcggcacccacatcaggatgccggcgagttgctggtcttcgagcggtgacagaccgaattcgccggcgagcgcgccctgaccggggatccagacacgtggcgagacggtgaggagagcgccgagcacgcccgagtgcaggatcgtgatgaacaggcaggccacggcgatgccgtcgcgcatgcgggtgctgcggcccgcgccgcggccatgcagcagcacccaccagaacaacagcgaggttgcaaagaagctgacgtgctggagccgatgtaccgccgggttcgcgagcgcccatgcatagagtggcggtgcgtgccaggcccagagcgccaggccatgcaccgccgtcgcgctcacgggatgaccgatgaagccccaagcgagtgccacgggtggggcattcagcatacgcccggctgtggggcggaacgatgccggcaggctccacagcagcggaccgttgagacgcgcgtaggccatcagcggcgcggcgaccaccatgaggagctcatgttcggccatatgcgcagtgaacaggcgctcgccgagccagtgcagtggcgatgtcaccgcgagcgccgcgaccagccagccgctccagaacgcgccgacctggaagaaactcgcgccccgaccggctcccgcatgtgcccacaaccgctgcgtaccaacataaaagccgatgccaacgatatagagcggggccatgagccagggatcgaagctccagagcgatcccgaatcgacatccgagagtccatgggcggatgccggctgcgcgagcagcgcaagcagcagtgccgcgagtctcagcgcaggcatgggctgatcaggagcgaggcggccaactgattggcgatgaccagcgcaaacagcgcgcccatgccgacgccgacccaggccatgaatgacctgggtccgccgccttgggcgtcaacccattccgcgccagcgccgcggcgcatcgcgcgggccgatatcgccgttcccgccagggcgacgatggccagcacgacgctgacgatcgtgccgctcacgcgcgtcgtctcgcacgagaaatgtgcgagcacgtagatgccttgcaggttgagcccccaggagacgggtccgagcgccacgccggcccaatagagcagtttgccatttcgatcggcttcggtcataggcgcggcacccaatcgagcaggacgtaaagcggcagccaggcgagcacgacgaagttccagtagaacacgttgtcggtcacgtcgctgaagcggcgcggcttggcgtgacgggtgaacatcagcaccgcaaggacgacggtgtcgccgaggtcggtggcgagatgggccgtatgcagtcccagaatcagccaaacgatggagccgtaggcggaattgtcccaacgcgtgttgagatgcgcgaactcgaagccgcgcagcaccagaagggcgatgccgatcagcgccatcatgatcaggcaaatgcgggtcttcgccagatcctgccggtgcgcgacgcgattggtatattggttcgggatgatgctgagcagatagagcacggtcgcggcggtgccgggccagagatcgggcggcggcgcgccgatcggccaagtcgggttgacggcgtagagatagagataggcgccgatcgcgacggcgaagcccatgccttccagcgccatgaagcccatggctccccaccaggggccgctgcgcggaccgaagccgtaggtcggcaggtccgagacgttgcgtacgatggtctgcctcacgactcgtcctccttgctgccggtgggccagaaccagccgatcagggccacggcgatcggcggcgtgccccagagcaccgcccagggagtgaagatcgacccgatgaagaagatcgccgtcgcgattgccgtgagcagcggccagatgctgggctccggcgaggcttctcggatttgcggctcagcctccgcgagcgaggtcacgagcacctcgcgccggtccgcgctgaggccggcggccactggcaggatttcgctgtcggcccatagcggatcgcgatgcttgaccacgggaatgcgatcgaagttctgcgggggcggcggcgatgacgtggcccattccagcgtcgaggcgttccagggattgtcgcctgcgagctcaccccgtcgcagactgtagatcacgttgaccagaagcagcgcgaagctgagcgcgaacaggaaggagccgacgctggacaccaggttcagatgagcccaatccatgtcggcggtataggtatagacccgccgcggcatgccgatcagcccgaggaagtgcatcggaaagaacgcgacgttgaagctgatgaaggcgagccagaaattccattgcccgagcctctcgctcaacatgcggccggcgatcttgggaacccagtaatagacggcgcccaccagcggaaataccgcaccgccgatcagcacgtaatggaagtgagcgaccacgaaataggtgtcgtgcacctgggtgtcgatcggcaccgaggccaccatgacgccggagagaccgccgagcacgaagatcacgatgaagccgatcacgaacagcaacggggtccggtaaatgggacgcccgtcccacagcgtcgcgagccagcagaagatctgcagcccgctaggcaccgcgatcagcatgctggaggccgtgaacagcccggccccgagttggggcaggcccgtgacgaacatgtggtgaacccagaggccgaacgacagcaatccggtggcgatgagcgacagaatgacgatcggatagccgaccaccggccggcgcgcgaaggttgccaggatcgccgagaccatgccggtgccgggaatgaagatgatgtagacctcgggatgcccgaagaaccagaacaggtgctgccagagcaggggatgcccgcccgaggaagaatcgtagaagcgggtgttgacgaggcggtcgaggatcagcgacgtcgaggcgaccatcaccgagggcatcgcgaacatcaccaggaaggcggtcaccagcattgcccaaacgaacagcgggatgcgatcgagcgtcatgcccggcgcgcgctgcttgaacacggtgacgacgatctcgaccgcgacggcgagcgctgcgacctcggtgaaggtgatcatctgcgcccagacgtcggtgcgcttgctcggcgagaattgcaggttggagagcggaacgtatgagaaccagccgacgtcggggccgacgttgagcaggaacgaaagccagaggaaagcaccgccgaacagaaacatccaatagctgaaggcgttcaggcggggaaaggcgatgttccgcgtgccgaccatcagtggaacgagatagacggcgaatgcttccatgacaggcacggcgaacaggaacatcatcgtcgagccgtgcatcgtgaagatctggttgtacttgtctgcggagagaaacgtcttctccggcccggcaagctgaatgcgcatcagggccgcaaggatgccgccgagaagcagaaagacaaaagcggtgaggatgtagcggcggcccacgaccttatggtcgaccgacatcaaggcaccgaggaagccggacggggtgcgccaaacacgttcgagctgtctcgtcagctgaaatccgttcaggacgtcgtcccgcaagttgcgctcttccgcggccgtgctcacttgagctgctccagataatggatgatcgcgatcagttcgcccgattgcagcggcattttcggcatcaggttgccgggcttgatgtgctggggatcggagatccaggcgccgagcgtcgcaggcgtgttcggcagcgttcccgcggcgatggtcgtgcggcttgctatatgcgtgaggtctgggccaagctggcctccggccagcgtgccgctgatgttgtggcacagagcacacccgcgtgcccggaacagggcctcgccctgcttgccgagcggatcgctggggctgtgggcgctccggttttcatgctcgcgccagcgctcgaactcgtcgggcggcagcgcaatcacggcaaaggccatgtgggcgtgctggagcccgcagaattcggcgcattgtccacgatagacgccggcgtttttcgccgtgaactgcagctcgttcttctgcccggtgacgaggtccatcttgccggtcaggctcggcacccagaagctgtggatcacatcggcggattccagctcgaccctgacgggcttgccggttgggatgcggatttcattggcggtgacgaagctcttatgcgggctgtcggcctcgtagcggacctcccaccaccattggtgaccgatgaccttcagcgtgagggccttctcgtccttggcgaagatggtgcgctgtccggcatagctgacgaaggaaagtccgagcacgatgagtgcggtggccgtcccgagccagagcacgacgcgtccggcgcggtcttcgtacccctggtggagatccagcggccgaccggccgcgcgcttggtacgcagcattccggccgcgagaaccacgacgaccccgatccacacgacagccgagacggcgaggaagatgaacaatgtcgagcggatctgctcggattgcagcccttgtggatcgagcgccgactgacgtccggcgcatgcgctcagcggcaagcacgtgcacagcaccagaactcttcgtacccagactggcatgaacgcttgccgtgctccccttgaacaggcggaaccggcgaattgtacaaaggttcctagcggcggggcagtcgcagcgtctggagcccggttcctgcaatgtggcccgagtggaggcttgatccgacgctctgcaattgacttacgataatttcgccgcctgcgaatgcgacctgcgactagaacggccagcccttggcggcgaccaggatggaaacgcctccggcagccatcagcagcaggaccgcggcaaccgcaacgatggcgccgggctgggcaagcacgcgcagatcctcaagcatggtcagctccgcaggcgacgtccgctgtgcaatgtcccgatggccgcgaggttccttgagagatgtgagggctcgccagtgctgccgcggaagctcccgcggcggcatgggatgctcctgagtcaggccgccctcgactcggcgttgccgatccagtcgcgggcgagcgtcacatcggcttgcgacagttggtggcctgccggcaggaccttgtgggtcacacgcgcgcctgcttccgtgaaaagtgccgcgagtcgcgccgaattggtcgccggcacgatcgggtcaccgtgtccggacagcagcaggatcggcttgctgccgagatcggccttgggcggatccgacagcggcaccatcgcgcgcagcaggatcgcgcctgcgagcagctccggcttcagcaacaacagggccgccgcgatgttggccccgttggagaacccgaccgcgatcggcgcggcgatgccatagcgctgccgcgcctccgcgacgaagtcgccgagctcgcgcgcgcggcggcgcacgtcatcctcgtcgaacacgccctcggcgaggcggcggaagaagcgcggcatgccgcgctcgagcacgcggccgcgcggcgagagcagggcggcgccgggcgcgatcatcctgccgagcccgagcaggtcgttctcgtcgccgccggtgccgtgcagcagcagcagaggaggagagcccgcgctggtcgcgggctcgaaacgatggatgaatgcagtatcggtcatgacacggtctcttcgaggctcggcagcacgtcctcgatctgcttgcgatgctgctcgaggaaaacaggcagcttgaggtcgcgtcccaaggtcgcgacgggctcgtcgacggcgaagccggggatgtcggtcgcgatctcgaacagcacgccgccgggttcgcggaaatagatcgagcggaagtaattgcggtccctctgctcggtcgggtgcaggccgtgattgctcacgagcttctgcgccatctgggcctgctcggcatcgtcagccgcacggaaggcgatgtggtgcaccgatccgccgccctgatgcccgcgcaggaagcccttggcctcgtagatgtcgacaacgctgccttcggcgtcgcccgacgccttgaaacggatcacggagccctcgcgtccagtctcggcgaagccgaacacgtcggtgaggatggaagccgtccttgctgcgctgtcgagcagcagcgttacgccatggaagccgcggatcgcatgctcggccggcacgtcgccattgctccaaccgggctcgttctcggccccggggacgccgaccagcgcgagcgccatgccgtcaggatcagtgaacggcagcacggattcgccgaagcgcttttcgagcgcctcgtgagcgatgcccttctcgatgaagcgttgcgtccaatagccgagcgagcgctgcggcacgcggaaggcggtctgatgcgtctctcccacgccgcggcgccccgagggcacgccggcccaggggaagaaggtcaggatggtgccggggcggccggtctcgtcgccgtaatagaagtgataggtgccgggatcgtcgaaattgacggtcttcttgacgaagcgcaggccgagatcccgcgtgtaaaagccgaaattgcggatggggtcgccggcaatcgcggtgacatgatgcagtccagacattgtcgtcctccaaaggtggggagcggtcttgctctggccggaaatatcgttccgctttggattggagacaatccatgcaaatatgacggctgtgtctatgatttggaaacaatctttcggtgcctgcccttggataagctcggcagcctgcgggctttcgtcaaagtggtcgagagcggcagctttgccgaggccggccgacagctgcggctgtcacgctcggcgatcagcaagtacatcgccgacctcgaggagagccttggcgtccagctcctgaaccggaccacgcgtcacgccagcccgaccgagaacggtcagcgctatttcgagcgcgcggtcgtgatcctgtcggagatcgaggctgccgaccaggcggtcacgcaagcccagtcgtcgccgcgcggattgttgcgcgtcaacgcgccgatgtcgttcggcaccatccggctcggaccggtgctcgccgatttcatggcgcgacatccggagcttcagcttcagctcgtgctcagcgacgatctgcttgatcccgtgcaggacggttttgacgtcacgctgcggatcgcggaactggaatcttccagcctgatcgcgcgcaagatcatgccggtggcgcgcatgatctgtgcttcgcccgattatctcgcgcgccacgagacgccaagacatccgcaggatctgcgcgagcacgccgcgctgacctacggcttcctgctgacaggcaaccagtggaagctcaccggcgcagatggcgaccattggatccagccggcctggtcgctctgcgtcaacaacgccgaggtgctgcgcgacgtcgcgatcaagggcagggggctcgcgctgctgcccgagttcattgccgccgatgccttgcgcaaaggcgaactgcgcgccgtcttgcaagactatgccgcgccgcccctcgcgctctatgcggtctatccgccgacccggcatctgtcgttgaaggtgcggctgttcatcgactttctcgtcgagcggttcgggcgggaagacggggcgagcgcgcaagcgcgctgaggatccaacaccacaggagagaggctggccgccgctgcagcagttcggccggcgaccagcttgctgccctccacaccgccagtgccgttcgcatgggcgaaaacacgcggtctgcctgattcttaggctctgcaagcctgcaaatccatcactcggatgattgctttcaatatgcattcttgcacgaacgattgcacatctcgccattttctttcggggcgctggggccaacacttcgcgtgctcacggcggaaagtgcgcagcgaaccgcagagaccacgaggatgctgatgcaacagatcactgatgcgatctcgagcccgaaagtgaagcgcgccatcgagctggcgacagggccgctgctgctgtttgccctgtggtggctcgccttcaaggggcaactggtcaacaaggatctgctgccgtcgccgatcgacacactgcgcgacaccggggccagcatcgcggccggcaagatgaccggcgatttcgtccacaccatcgcgcgcgtcggctactccaccttgatcgcagtggtcgcaggcgttccgatcgggatcgtgctcggcgccaaggccgcgatttatcgctcggtcgaattcctggtggacttcttccgctcgacgcccgcgaccgcattgtttccgctgttcctgctgctgttcggcctcggcgatttcgccaagatcgcggttgccgctttcgccgcctggctcgtcatcgtcttcaacgtcgcctacggcgtgatgaatgcccgccagacccgcatccttgccgcacgctcgatgggcgcctcgtcgctccgcatcttcaaggacgtcatcttctacgaaaccctgccgcagaccttcgtcggcctgcgtaccgcggtgtcgcttgcgctggtcgtgatcatcgtcgccgagatgttcatcggcgcgaccgacggcatcggtcaccgcatcatcgatgcacagatctcgtactcgctcaccgacatgtacggctccatcctgatcgcgggcgcgatgggatacgggctcaatctcatgctcctggtgatcgagcgctcgttcattcactggtccggcagatagtcagccatctaaacgaagaggccatcatgcacatgaagagattcctcgcggcgttcgcagcttccacgttcctgctcggcgcgaccggcgcggatgctgcctgcgacaagaccgagaaggtgacggcagtctggctgccgatcatgcagaccacggcctattatgtcgcactggaagagaagctattcgaaaaggcgtgcatcgagatcgtttccaccaagatggaggcgccgaaccagatcatcgacgctctgatcgcggagcgcgccgacttcggtcctccgggcgcggccgccggcatcgcgatgatcgcggaagccaagttccccggcaagctgaaggtgttcggcctgcagggcgggggcatcgcggtcgaccgcatcaatgacggcttgatcgtcaagccggacagcccgatcaagggcttcgccgatctgaagggcaagtcgctcggtcacgtcccgggcatccagtggcgcaccatctcgcgccacatggttcgctcggcaggcctcgatcccgatgcggacgtcaagctggtcgacctcgccgtcgccatgcaggtgccggccgtggtcggcgggacggtcgatgcgacgctgtcgctggagccggtcggatcgatcgccgtcgcttcgggcaaggcagcccgcgccatgaccaatccggtcgcgcatgtgatcgccgaccccttctactccggggcctcgctgatgacgacgaagttcctgaaggagcggcccgaggttgcgcgcaaggtcgttgccgtgatcgacgaggcgaccgacctcgtgaactccgacttcaagaagtacaagccgatcctcaccaagtacacgccgatcaaggaagatcagctcgaactcctggcgcagccttatctgcgcgggttcaaggatctcaacgacaccgacatgaagtcgtaccaggcgctggtcgacgtcttcatcaaggaaggcgtggtggcggggccgatcaacgtcaaggacaagctcctcgccaagtccgatctcggaaactgagtggatattccgatggggaaggtgacagcgatccgcagcgtagaccggccagccgccgaaagcccgtcgcctgctgcgtccccgaagtcgcggcaggcctacgtcaccgtgcgtggcctgagcaagagcttccacggcacgacgatctacgacgacttctcgatcgatctgccgatggggaagttcatctcggtgttcggcccgaacggttgcggcaagagcacgttcatcaacatgatctccggcctgatgccgatggatgcgggggatgtgctctacgacggccagaccatccgcgataccaggatatcgtatgtcttccagaactacagggaggcgctgttcccctggatgcgcgcgatcgacaacatccattatcccctgagggtgatcgggatagagcgcaaggagcggcgccggcgcgtcgaaaaactgctcgcggatttcgacgtgccgttcgatctcaacgcctacccctacacgctgtccggaggccagcagcagacggtttcgatcctgcgcgcgctcgtgaccgaaccggaggtgctgtttctcgacgagcccttctccgcgctcgactacgagatgacgctgttcatgcgcgagcggcttcagcacatcttcatgaagcttaagaccacgatgctgctggtgtcgcacgatctcgaggaggccatccagctcgccgaccaggtcgtgctgctgacgcgccggccgacgcgggtcgcggagatcgttccggtggatctgccctggccgcgcgatctcgacgtcacgaccggcgaggggttcatcaacctgaaacgccattgcctcgaccgcttctggcgcgaggtcaagcgcgactgatccaatcaactttcgaatgatggagaccaacatgacgaagcgccgtttccgcgctgccgccgtccagacgcttgcccgtctgggggactttgaccacaacatcgcgctggccacacagtatgtcgaggatgcggttcggcagggagccgagctggtggtgttcccagaatgcatggacaccggctatctcttcgactccgccgaccattgtcgcgaacttgccgagaccatgaaggacggcccgttcgtgacggcattgtccgcgctcgccaagaagcaccgcatttacatcgccagcggcgtcacggaatgggatccggacaaggagaagatattcaataccggcatcatgttcggtcgaaatggcgagaccgtttgccactatcacaagcagtttctcgccactcacgaccagaactggttcgcgttcggcgagcgcggctgtccggtggtggaaaccgacctaggaaagatcggtcttctgatctgcttcgacggccgcattccagaaatcttccgcgccatggcgatgcagggcgcggaggtaatcgtcgacatggcgaacttcttcgccatggatcaggcggacatgtgggggccggctcgcagctacgagaacggtttgtggctagtggctgccaccaaggccggctacgagcgctcgatctattatcccggcggcagcatgatcgtcgatccgaagggacgagtgctctcgaaagtgccgtacgatacgcacggtatggcgattgccgacgtcgatctcgaggccgcgcatgacaagtcgatctactcggccaacgacaagattgccgaccgtcgtcccgagacttacggcctgatggcggtgccgtatgagaagacgtcggtttaccggatcgcggagcagccgctgatcccggcgaaatccgtcgccaaggtcgcggccgtgcagatgcacgtcaccaaggactgcccggccgacgaggtgctcgagatggtcgatcatgcggccaagctcgggatcaaggttctcaccctgccggaatatgcgttctgcccatcggccattccgaacgctgcagaggccgcggcactggccgaccagacggcgtctctgctggccaagacggccgcgatcgcgtcccgctatcaatgcctgattgcgtttcccacggtggagcgggccgcggccgggctgtacgtcacgacgttcctgatcgggcccgacgggaaggaggttggaagatatcgcaagacgcatctcacggccgaggagcggaaatgggcgaaggcgggcgacgagtatcccgtgttcgaaacgccgttcgggcgcatcggcatcatgtccggctatgatgcggtattccctgaggtctcgcgttgcctcggcatcgcggcggccgacatcatcctgtggcccgcctcgttgcgcgagccgttcgaacgggagctgctggcagtcccaagagccgaggacaatcgtgtggcggtggtgctggcgaaccgcgtcgattcgccctatccgggcggcagcctcgtgattccgccgaccggctttccgctctgggacatcaacgtcgtggcgccgcgcgtgttcaagcttggcgccgtgatgcccaagcacatcgatctcgcggtctgccgtcagaagctgatgatcccgaaggtcgacatgttcgccaatcggctggtcgagacttacgcccccatcatcgccgcctgacggttgccgtgcctgccgatatgcccgaaagtagcgagtgttagatgccgaagctcgcgaacgggcatgtcaggacggccgagatggcgaaggctgcgcgaacgctgcgctacaattgggacgacgtcatcttcttcctggaggtcgcgcgtacccgtaatctcgttcgcgccggccagaagctgaaggtcgaccacacaacggtcagccgtcgggtgagggagctcgaacgcagtctcaacacgacgctgttcaagcgcagcaagtcaggtttcgccctgacggaggcggggctgcggctgctccagtttgccgaaggcatggagaacaatgccaatgccatcatcgagaccgtggtcggttccgagaaggcggatgccgccggcgcggtgcgaattgccgccatggaaggcatcggcagcatgtacctgacgacctgcatggccgccttcagcaaggcatggccctcgatccaggttgaactgatcacagatacgcgcctgctcgacatgacgcggcgcgaggccgacgtcttcatcagctttttcaggccaaagggaaggaggctttcgatcaagaagatcggcgagttcaggatctttctctacgcgtccagcgcctacctgcaacgcgcgggacggccgtcggacctgaaagacctcgacaatcacgatttcatcgatttcatcgacgagcacatccagctcaaggagaaccgctggctgtcggatatcctgcgaccggcccatgtcgtgttccgcagcaccagcctggtctcccaatacgtggccgcgtcgaacgggctcggaatcgccatgctgccgtcctacgtggctgcccacaacaatgacctgtgcccggtcctgccaagctatttctccgtgcgcgacatctggctatccgtccacgaggatctgttgcacatcgcccgcatcaaggcggtgatgggcttcctcgaaaagcgcgttgccgccgacgtcgactacctcatgtcggcgacgcatcacgccaagggaaaagcggtgggttgaccgtacccggcgcgcgacctcagcgatcgcggccgcaatgttgaggctcgtcgctgcgcctaccgccgcagcgtgaagtcgtcggcgctgcgccgatgctcccagttcgcctgctccagctccggccggtcgcattccacttccgggtagcccatgcagagataggcgatcaatttccaggatggcggcacttcgagaacggcgtggatgcggtccggattgaggatcgacacccagccgatgccgataccttccgcgcgtgcagcgagccacatcgcggtgatcgcggcgaccacggaatattccgtcgtttcgggcatcgtcgcgcggccgaggccgtggccgatgtcgctggccttgtcggcgaacacggcgaggtggcccggagcccgttcgaggcccgacagtttcagcgtggcatagcgcgccgcgcgttcgccggaataggccttcagcgcgtcggcgttgcacgatttgaaatcgtcgatcacggcgtggcggcgtgcctcgtcctcgacgacgacaaagcgccagggctggctgaggccgactgacggagaaagacaggcagtctcgatcaggcgatcgatggcgccggccggcaatgggtcagttcgaaaacggcgcacgtctcggcgccacacgaacagttcgcgcagatgctggcggaaggtgtcgtcgaactcgaccatgaggtcatcgcaccatctggaaggacgcggcgaccagcaggatcaggatctcccccatctgctcgaacgcgccgaggatatcgccggtctgtccaccgatctgacggacggcgagccgcgccagcagcaggccggcgagagacagcaggaccaggccgacgagcgccttggctggccccaacgccagagcaagcgcgagcgttccaagcacgctggcaatggcgacgctgcggcccggcggcgatcctgcactggccgacagaccatcggcccgcgccggcgggaccagtgacatgaaggccggcacacccgcgcgggccgcagcatgtgccgcgcacagtgccagcatcaccgcccagggatcggcgatggtcgcgagcgcgctccagcgcaggccgaacgacaggatcagtgtgcagacgccataagtcccgatgcggctgtcgcgcatgatctcgagcttgcgctcgcgcgtgcgaccgccgccaagtccgtcggcggtgtcggccagcccgtcctcgtgcagcgcaccggtgatgagcgcggtcgtggccagcgcgagcagggccgcaaggctcggcgtcagtccgaagccaatggcgatcttgtagaccagcgctccgaagaggccgaccagcagtccggcgaccggcagcgcccaggtcgcgcgcgcgaccgcgccgtcacctgcaggcttcgacgatgcgacgggaagaatcgtgacgaaggacgtcgccatcctgagatcggcgaccacatcttccagaagttcggcacgcgatatcatttcaatttcatcggcaagccggcgatgacgaactcgacctcgtcggcagcagccgcaatggcctgattcatgatcccggcggcatcgcgaaagctgcgcgccagcgcgttatcgggcacgatacccagcccgacctcgttgctgacgagcacaacggggctttgcagtcggcgcagggcatcgacaagcgcattcacatcgctctcccagtcgcgattggcatgcatcaggttggagagccacagtgtcaggcagtccaccagccttgcgccgccgccatcggtcgcgaccagcgcggggacgagatcgagcggcacctcgcgttcgagccagtcggttccgcggcgcgcacgatgcctggcgatccgggcccccatctcgctgtcgagcgcctcggccgtcgcgacgtagaccggccggccgggaaaagccttcgcgcgtgcttccgcgcgcgtgctcttgcccgatcgcgctccgcccgtgatcaagatgacggccatcaaagtctcctgtcgggcagcactaatcaccaatcacggccaaagacaaagccgaaatcagccgggcaggggcttgcgcaccgcctacgctttgcgcaacagggtgcggatcaggagaccgatgtgggctttgcgggcgcgatgatggtggcgatggcggtggatgccctgctgggctggccgtcgtggctgttcacgcggatcggccatcccgtgacctggcttggccggctgatcgcggccatcgatcgcagctggaatcgcgcctccgatccgccggcgttgcgccgagttgccggggccgccggcgcactcgtcgtgatcgcgatttccgttgcgctcggctggctcgttcagtcggcgcttccctccggttggatcgagaccgcgctggtcggtgttctggcctggcccttggtcgcgctccgctccctgcatgaccatgtggcggctgtcgccacccccttgcaggacggcgacatcgccgccgcgcgagacgcggtgtcccgcatcgtcgggcgcgatcccacggcgctcgacgaagccggcatcgctcgcgcggcgatcgagagccttgccgaaaatgcctccgacggaatcgtggcgccggtgttctggggcgcgctgttcggcctgccgggcatcctcggctacaaggccatcaacacgctggattccatgatcggccatcgcagcgagcggcacgaggccttcgggtgggctgcggcgcgcatcgacgatgtcgccaatttcgttccggcgcgcgtgacaggatttctcttcgtgctgctggcgccgcaccggtcggaggcgctgtcatgcatgacgcgggatgcgcgccgtcatcgctcgcccaatgccggctggccggaagcggcgatggccggcggactcggtgtgcggctcagcggtccccgcatctaccacggcagcgccaccaacgagccctggctgaacgaaggcgcgcgcgatccgcgcgccgccgatatgatcgaggcgctgacggtctatcgccgcgccatgctgctgctcgcaggcatgcttgcgatcctggctttcacgtgaaagaacgggacatgcgcgagcacggtggaaatctcgatctggcccagcagcaatttggcgggcgtgcggaagattggatcgacctgtccaccgggatcaaccgggtgccttatcccgtcggcgaggtgagcgcacgcgcgtggagcgcgctgccgtcgcgcgccgagatcgaggcgctgcatcaggcggcgcggcacgcctatcggacgcgcgcgcctatcgttgcggtgggcggcgcgcaggccgccatccaattgcttccgcaattggcgccgcgtggttatgcgcggatcctggcgccgacctataatgaatatgccggcgtgctgtcggccgccggctgggacgtggaggaggtcacggagctcagcgagctggtgggagcgagccttgccatcgtcgtcaatccaaacaatcccgacggccgccgttatgccccgaacgatctgctcgatctgttgccgcttgtcgatcgcctcgtcgtcgacgagagtttcgttgatgccgttcccgagctctcgctcgcctcggacgcagagcagcccgggctgctgatcctgcggtcgttcggaaaattttacggtcttgccggcctgcggctcgggttcgtgatcggcaattcgtcggacatcgcgagggtcgtggcggcgtcgggcccgtggccggtgtcgggcgcggccatcgcgatcggctgccgcgcattgcgtgatgacgcttgggccattgcgaccacagcgcgcctcttgcgagactgtgctcgcctcgatgacatggtgcagtcgcaaggctggcagcttctcgggggcacgccgctgtttcgactgtacgaaacgcccgacgcacgtggcgcgcaggagaagcttgcgcgcaatcagatctggtcgcgcgtgtttgcaggagcgccgacacggttgcgcctcgggcttcccggcaatgaagctgaatggatccgcctctccgaggtcctagcgcgctagcgcgagcaaactgtcgacatcgagatgcgtttcgatgtgatcggcgagggcatcgagcgcgctctcgaccctggcgtgatagggctcgtcgcctgcgggaatgtcgagctttgccagatacgccttgcggaacgcgtccgacgtgaacagaccgtgcagataactgccttgcacgcgtccctcgcgggagatcgcaccctccggcttgccgttcagtgtcgcgaagggacgggcgcaatcaggcccatcggtgcggccgatgtggatttcgtaggcctcgatcggctggttcgttgagacatgcacggcagcaacccgcgttagcgtcttcacggggctcatcaccgtcgtcacgtccagaagtccgaggcctggtgtctcgcccgcagggccctcgatgccatcggggtcggcgacgttgcgcccgagcatctgataaccgccgcagaggccgagcacgtggccgcccctgcgatgatgtgcgaggagatcgatgtcccagccctgtgcacgcaggaaggcgaggtcgccgcgcgtggacttcgagccgggaacgatgacgagacgaacgtcgccgggaatcgcttcgcccggccgcaccatgacgagatcgacgcccgcctcgagcttgagcggatcgagatcgtcgaaattggcgatccgcgacagcgccaggcacgcgatcttgcatcggcccggcttgcgcgcgtcggtgaggcccagcgcatcctcggccggcagctcgccggcgcgcgcgaaccagggcagcacgccaaggccgcgccatgtggtccttgcttcgatcagcttgtagccgtcgtcgaacaatgtgggatcgccgcgaaacttgttgatgacaaatccacggatcatcgcggcatcatcggagtcgatcaccgtcttgatgccgacgagctgggcgatgaccccgccgcgatcgatgtcgccgaccagcacgaccggcacgccggccttgcgcgcaaagcccatattggcgatgtcggccttgcgcagattcacctcggccggactgccggcgccttcgaccagcacgagatcggcgcgggccttcagccgctcgaagctctccagcactgcgcccatcagtgacggcttcatcgccgcatagtcgcgtgctcgcgccgtcgcaatgcgcttgccatgcacgaccacctgcgcaccgacatcggtctccggcttgagcagcaccgggttcatgtcggtatgcggctcgacacccgcggcgagcgcctggagcgcctgggcgcggccgatctcgccgccatcgacggtgacggcggcattgttcgacatgttctgcggcttgaacgggagcacgcgcaggccgcggcgcgtgaaggcgcgcgcgaggccggcgacgatgagcgatttgcccacgtccgagccggccccctggatcatcagcgctcgtgccatcgcgaggttgtctcagaactcgacgccggcctgcgccttgatgccggagcggaacgggtgcttgaccagcgtcatttcggtgacgaggtcggcgatctcgatcagctcgtccttggcgttgcgcccggtgagcacgacatgcgtcatctctggcttccgcgtggtcaggaattcgaccacctctgtgatatcgagataatcgtagcgcagcgcgatgttgatctcgtcgagcacgaccatgcgcaggctctcatcgaggatcagttccttggccttctcccagccggcgcgtgcggcggcgatgtcgcgggcgcggtcctgagtctcccaggtgaaaccctcgcccatcgcatggaactggcagagatcgccgaaatgcccggtgagcaggcgccgctcgccggtgtcccaggcgcccttgatgaactgcaccaccgcgcagggcaggccatgcgcgacgcagcgaacgatcatgccgaatgccgaggaggattttcccttacccgcgccggtatggacgatgatcaggcccttttcgccgctcttggtcgccatgatcttgtcgcgggcggccttcttctttgccattttctgggcgtgacgggcctcgctttcctcggtcgtttgggtctccggttcaggcgtcatcggtcccggtccttcggcttgacaagtggctgccaccggcaaatggtggcccggcgttggttcctgtcctatgacaggcgaagagggaatgcgatagggtccgaatccgcaagatccggatccaaaatgcagccgcccccgcgaccgtgaccggagagatgcccgaagccactgactcccgaaagggaatcgggaaggcggggatcgaggggccaaaaccctgctccgcaagccgggagacctgccagcgcggacgattttggaccggcggacggggtgttccgcgacggggaaacggcctctcaagtcagggtccgtgcgcctcttcgcctcccgctgtttattctggaagaggcgatgaccgtcacacttcacgtctgcatcacctgccgcgccggccagacgctcggcgagggcgaggccacgccaggcaaccggttgcacgctgcgatcctcgaggccggcgtgcccgacggcgtcaatgtggttcccgtcgaatgcctctcggcgtgcagccagggctgctcggtcgcgctcagcgcaccgggacgctggtcctatgtctatggccgcttatccgatgtgaatgcgcgcgacgtggtcgctggcgctgcggcctatgcggccgctcccgacgggctcgtgccatggcgcagccgccccgagatcttccgcaagcagtcgcttgcgcccattcccccgattcccgccgtgccggaggccgccgaatgaattcgcttgcaaaagtccccgtcacggtggtcacggggttcctcggctccggcaagaccacgctgatccagcacctgctcagcaatgcaggcggcaagaagctcgccgtgctcgtcaacgaattcggcagcgagggcgtcgatggcgagatcctgaaatcctgcgccgacgccaattgcccggaagagaacatcgtcgagctcgccaatggctgcatctgctgcaccgtggccgacgatttcattccgacgatggagcagctgttggctcgcccggtgcggcccgatcatatcctgatcgaaacgtcgggcctcgcgctgcccaagccgctcttgaaggcgttcgactggccggagatccgctcgcgcatcacggtcgacggcgtcgtcgcgctcgccgacgccgaggccgtcgcggccggccgcttcgcgccggacccggctgcggtcgaagcgcagcgcgccgcggacgacaatctcgatcacgagacgccgctgtccgaagtgttcgaggaccagatcgcctgcgccgacatcgtgctgctgaccaaggccgatcttgcggggaaggccggggtggaagctgccagggccgcgatcaccgccgagatgccgcgccgcgtcccgatgctcgccgtgacggacggcgcgatcgatgcgcgcgtcatcctcggccttggcgccgccgccgagaacgatctcgccgcgcgtccctcgcatcatgacggcgaggaggagcacgagcatgacgacttcgcctctgtcgtgatcgatctgcctgaggtggccgacatcgatgcgctggtcgcctcggttcagaagctggcgcgcgagcagaacgtgctgcgtgccaagggctatatcgcggtcgcgggcaagccgatgcggctgttgttgcaggctgtcggcgagcgcgtgcgccatcaattcgacaagccctgggggccgggagccaggcagtcgaggctagtcgtgatcggcgagcacggcgacatcgacgaggccgcgatcaaggcgggattgggagtctgatgcacgtcgtcttccgcgagagccgcggtctcgaggagaccgcgacgccaagggacatcggtcaggacccggccgatctcgtggtgctctcgtattcggattccgacctcgccgcgttcgcagccggctggcggcgtggccgcaacagcctgccgtcgctgcggctcgccaatctcgcggagctgcgccatccgctgtcgatcgacacttatgtcgagcgcacgctgtcgtacgcgcgcggcatcctggtgcggctgatcggcggtgagtcctattggtcctacgggctcgcggccctccagcaattggcgaaggatcgcgacatcgtgctggcggtgctgccggccgatggccgcgatgacatacggctcgatgcgtactcgaccttgccggtctcgacgctgcggcggctcaaggtgctctgcgacaccggcggtccggtcgcggcgcaagctgcgatcgcgcagctcgcgctggcctctgggctctatgccgggccggtcatcggagagatgaccgtgcccgagatggggttctacgatcccgtgcgcggcgtcattgcggcgccagcaagcgacgggaagccgcgcgcgctggtgaccttctatcgctcctatctcactgccgccgataccggctcggtcgacgctctgatcgcgtcgctgcgcgacaagggatttgacacccatggtgccttcgtcacctcgctgaaggcgccgggcgtcgcggattggctgcgcgcccatcttgcgcaaaatcttccggccgcgatcgtcaatgcgacggcgttctcggcaatgggcgacgatggcacgacgccgttcgatgccgcgacctgtccggtgttccaggttgcgctctccacggcgcggcgcgaggattggacgcagtcgttgcgcggcctgtcgcctggcgatctcgccatgcatgtggtgttgcccgaaatcgacggccgcctgttcgcaggggttgtgagcttcaagtccgctgcgatgcgcgatcccgagctgcaattctcgcatctggcgcacaggccggacgaggagcgtgtgagcgcgatcgccgcacgcgtagctgcttggcggcgccttgcggagaagccggcggccgagaagcggctggcgatcgtgctgtcgaactatcccggccggccgcaccagatcgcgcacgccgtggggctcgatgcgctggcgtcggttgaggccttgatctccgatcttgcggaagtcgggttcgacgtcgcgcgggtcgatcggctcggcgaattgctgctcaagcgcggttcgacctggagcattgccgattatcgcgcggcgctgtcgcgactgccccaagccttgcaggacgatctcgcgcaggcctggggcgcaccggaggatgatccgagctgccgcgacgggtcgtttcgtttcgccgcgatccgatgcggccggtcgatcgtcgcagtccagcccgagcggggagctgcggcctcgcgcgatgccgactatcacgatctcgcccgcacgccgcgccatggctatgtcgcgttctatctctggcttcgcgagcaggcccttgatgcggtcgtgcacatgggcgcgcatggcacgctggaatggctgcccgggaaatccgtagcgctgtcgcaagcgtgctggccggaggcgctgatcggcgatctgcccatcatctatcccttcatcgtcaacgatcccggcgaggccgcgcaggccaagcggcgcatcggtgcggtcacgatcggtcatttgccgccgccgctcgcaacatccgcggtgccggaaggcctgcgccggctcgaacgcctgctcgacgaatattcgaccgccgatggtctcgatcccgcccggcgccagcggctgatcgcggcaatccgcgaggaggcccgcgccgcgggcctcgaagacgatctcggcctcgacgcatcggcagcagcagccgaagccattccgcggattgatcgcttcgtgtgcgatctcaaggagagccagttcggcgacggcctgcacgtgttcgggcgcggcgcatgcggcgaagcggagcgcgatgcgctgcgtgccgcgctcgccggcgagcgcgttgcgcctgggccgtcaggctcgccctatcgcgggcgccaggacgtgctgccgacggggcgcaatctcttcgccgtcgatccgcgcgcggtgccgacgccgtcggcgcatgcccagggcataaagctcgctgaagagctgctgcgccgtcacctgcaggatcatggcgactggccgaagggcctcgtggtcgatctctggggctcggcgaccatgcgcaccgccggtgaggagttcgccatggcgttgcatctggccggccttgccccgcgctgggatcacgtctccggccgcgtcaccggctacgacatcatcgcgccggccgagctcggccgtccgcgcattgacgtgacgctgcgggtatccggcctgttccgcgatgtctttgccggccttgcgcaattgttcgaagccgcttccgaggcgctcgcggcgcgcgaggacgagggcgatgaaaatccctattgcaatcgcgcatcgcgcgtctttgcgccgcggcccggccaatacggcgttggcctgtcagcgatccccgacgccttcacaccggagacgcggggcgctgccggggaagcctggctgtcggcatcgtcctgggcgttctcggctgatggcacgatgcagccggaccgcgccggcatcgcacagcggctcgcctccgcagacgcgttcgttcatgtgcaggacctgcctgaaaccgatcttctgctcgccgctgactatgctgcgcatgaaggcggcgtcgccgctgctgcggcgcatctccgcgtcacgggaccatcgctttatcacctcgacacgacacgccccgatcagcctcatgcacgtacgttgactgaggaaatatcgcgcgtcgtccgcgcccgcgctgccaatccggcctggatcgccggcatgatgcgccacggctttcgcggcgccgccgagatcaccgcgacgctcgagcacatggccgccttcgcgcatctcgccggcgccgtgccgccgcatctgttcgacctctattacgatgcgacgctcggcaacgacgacgtccgcaccttcatggcccatgagaatccgtccgcgctcgccgcgatggagacctgcttcacgcgcctgcacgaagcctcgctctggcgaacccggcgcaattcgatcgccgcggcgctgcgggaggcctcatgagcgcggcctcggtcaagggctggtgtcccggcgcgctgcgcccgatgcaatcgggggatgggctggtcgtgcgcgtccgtccgttcggcgggcggcttgaagcccagcaaatcgtcgggctggccgaactggccgagcgcttcggcaatggtctgatcgacgtcacacgtcgggccaatctccagatcaggggcgtcagcgcagatggccaccggccgttgctcgacggccttgcgcggctccagctgctcgaccccgacgccgacatcgaagctaggcgcaacatcctggtgacgccgttctggggcagcggcgacgagacgcagtcgctcgctgcagagctcgaggaggcgctggccgattccgacctcgcgcttcccaccaagttcggcttcgccgtcgatgacggcaggtcacgggtgctcgccggtgattccgccgatatccgcatcgagcgcgaccgctcgggccgtctcctggttcgggccgacggcgcgaggctcggccactccgtcgcgcgcggacaagccgtgagcacggcgctggcgctggcaagctggttcatcgtctccggcggtgcgaggggtgggcgagggcgcatggcagcccacatcgcatccggcgcggcgctgcctcgatcgctgcgcggcgagactgagcccgcgcccgtggtggccgcatcgcggccaggtcactatcggcaaggcgcgctggtcggcgtcgcgttcgggcagatgctgcacgagaccctgcaccaactcgccggttgcggacatgcgctgcgcatgactccctggcggatggtgctcagcgaaggcaagcgcgagatgccgagcgcggcgggcctcatcaccgagccccacgatcccgcgctgcgcgtgattgcctgcagcggagcgccgcgctgcggcgaagcccatgccgacacgcgtgcgctcgccgcagcgctcgcgccgcgcattagcgcggatacgcgacttcacgtctccggctgcggaaagggctgcgcccattccggtgcggctgcgatcacgctgattgcgacgaacaccggattcgatctcgtccgcgatggctcgatccgtgacgcgccggccctgcgcgggctcgacggcgccgacatcgtcagcgatccctccgtcctggtcggagggaactgatgcctcacacctacgagaccgacggcgcggcgatctaccggcaatcattcgcgaccatccgggccgaggccgatcttgcgcgcttttcgcctgacgaggagccggtggtggttcgcatgatccacgccgccggcatggtcggtctcgaggcgcatatccgcttttcaccgggcatggcagcaaccgcgcgcgccgctctgcaaggaggcgcgccgatcctgtgcgacgcgcgcatggtctcggaaggcattacgcgcgcgagacttcctgcggccaatgccgtcatctgcacgctaggagacgagtccgttcccgcgctggcgcaatccatgcacaacacgcgctcggccgcggcgctggagctgtggcggccgcacttgggtggcgcgatcgtcgcgatcggcaatgcgccgaccgcgctgtttcatctgctcaacatgctggaggatcgcgactgcccgcggcctgcggccatcatcggctgtcccgtcggcttcgtcggtgccgccgaatccaaggccgcgttgatggccgatccgccggtacctgcgatgacggtcgagggacgccttggcggctccgcgatcaccgttgccgccgtgaatgcactggcgagccggagcgaatagtcatgggacgcatcatctgctgcggtctcggtcccggtgatcctgatctgatgagcgtgcgcgcggaccggaccgtgcgcgccgcgcaacacgtcgcctatttccgcaagaaaggcagggcgggccaggcgcgccgcatcgtcgagggcctgctggtggccggcgtcaccgaatatcccatggaatatcctgtgaccaccgagatcgccttcgacagcgcggaatatgttcagctgctcgccggcttctacgacgaatgggccgagcgcctggcgcggcttgcgcgcgccgtcgatgtcgtcgtgctgtgcgagggggatccttatttctatggctcgttcatgcatctgcacacgcgcctgcagggccgcaccgagatcgaggtgatcgcggggattcccggcatggtcgggtgctggaacggcgtagcccagcccatcgcgctcggcgacgacgtcacgacggtgctgatgggaacgcttcccgaagacgagctcgaacgccgcatgcgcgattccgatgcactcgtcgtcatgaagaccggccgcaatctcgccaaggtgcgccgcgcgctcgcatccgccggccggctcgatgacgcctggctgggcgagcgcggcaccatgccgggcgagcgcgtggtacggctcgccgagatcgacgccatcgattgtccttacttcgcgatcgtgctcgtgcacggcaagggccggaatctggacgcggccgaatgacgggcacgctgaccatcgcgggcctcgggcccggcagcgacgcgctggtgacgccggaagtctccgccgcgctcgcagccgcgaccgacattctgggctatgcgccctacgtcgcgcgcgtgccaccgcgggcggggcttacgttgcgcccgtcggataatcgcgaagagctgcagcgcgcgagcgaagccctgcggcttgccgccgaaggcgggcaggtcgtcgtcgtctcctccggcgatcccggggtcttcgccatggcctcggccgtgttcgaggcgctcgaacgggcgccgcaatggcaggcgctgccgatccgcgtgctgcccggcatcacggcgatgctggcggctgctgcacgcgccggcgcgccgctcgggcacgatttctgcgcgatcaatctttcggataatctgaagccatgggcggtgatcgagaagcgtcttcgccttgcggcagaggcagactttgccatcgcgctgtacaatccgcgctcggcgagccggccggaaggatttggccgcgcgcttgcggtgctgcgagaggccggcgccggcgcgcgtctcgtgatcttcgcgcgcgcggtcagcgccgctgatgaaaagatcgagacggtgacgctgaacgaagcgacgcccgggatggccgatatgcgcacgctggtgatcgtcggcaactcgcagacacgccgcgtcggccgctgggtctatgcgccgaggcgggcagaatgaccgagccactgcatcacgtcagtgacgctctcgacccgtggccgctcgggcaactgcggtcgcgcgatcatgatgacgggaaggccgaggcttcgggccgcgtcgatcttcgcgcgcgcgccgccgccgcccgaattgcgggcgacgatccagccgatgccacgtgtgcgcatcatctcaagctcgcttcgaagcgtgaacggtccgcgcgccacgatcacatccgcggcgaacggcaggtcgacttccggcggatcgacgaagcggagcgtgtagctgtgctgcggcttgctcgcgaatggcgcgatatgctggcggccgatggcgaggaacacgtttgcgggcgcctccggcagcgcagcggccgcggcgccgacgtcttcgacatcgatccagttgtcgccggacaccctggtccagggcgcgcgctccagcgcgatcagcggcgtatcggcgtccgcgcacgcctcgatcgcatggcggctcatctcggccgcgaacggatgcgtcgcgtcgatgacatgcgtgatgccttcgcggcgaatgtagtcggccagcccgctcacgccgccgaagccgccgatgcgggtcggcagcggctgctcggccggcgcgcgcgtccggccgccataggaatagaccgcctcgatgccggcgcgcgcgatctccgcggcgagcaggctcgcatcggccgttccgcccagaatgagcgcgcgcatcatggctaatccctggctgaccatcatcggtatcggcgaagatggccttgctggcctatccgaggcaagccgaaaggcgcttgccgaggcggaaacggtgttcggcggcgagcgtcatcttgcgcttgccgacgctggcagccgcggccgtccatggccggtgccgttcgatgcgaacgtcgtgctgagctgccgtggccggccgaccgtcgtgctcgcttccggcgatccgttctggcatggcgccggtgcgagtctcgccgagaagctcggtggcgaggagtggatcgcacatcccgcgccgtcgaccttctcgctggtcgccgcgcggctgggctggcgcctggacgccgtcacgtgcatcggcctgcacgccgcgccattcgaacgtctcgtgccgcatctggcgcgcggtgcgcgcatcatttgcctcgtgcgcgatggcaaggccgccagcgatcttgcgaaatggctgacggaacgcggctggggcgcttctgcattctggactctcgccgcgctcggcgggccccgcgagactgtccggcagtattgcgcaatggacttcgctgatgatctcgctggcaacctggttgcagtcgcggtggaggcgaggggcgcacagggcattccctgcagctcgggcctgccggacgatctctttgtccatgacggccagatcaccaagcgactggtgcgcgcgctcgcgctgtcggcgctggcgccgcgaggcggcgaacggctgtgggacgttggcgccggttcgggttcgatctcggtcgagtgggcgctttgtggaggggcggccacggcgatcgaggtgcgcgaagatcgcgttgccaacatccgcagcaatgcggccgcgttcggactggcgcatcggatcgctgtggtcacaggagcggcgcccgaagctctcaccgcgttggacccgccggacgccgtcttcgtcggcggcggcttcgataacgcaatgttcgatgcgatctggccgcggctccctatcggggcgcggctggttgcacactcggtcacactggagacggaagcgctgctcggcgaacttcatcagcgccatggcggcgagctgatgcgggtggagattgcgcaggccgctccgctcggccgctaccgctcctgggaggcggcaaggccggtcgtgcagtggagtgccgtccgatgaaggttgccggactcggattcaagcaggatgtgacgctggcctcactgcgcgaggctctgcaggcggccggcggtccggagggcctcgcggccgtggccaccgtcagcgacaaggctgacgcggaggtgctgaagcagctcgcgcgcgaatgcggtgtgccgatcagggccgttccagccgatgtgcttgcgaaggtggacacgccgacccggtcgaagcttgtcgcggaaaagttcggcaccggatcggttgccgaagccgccgcgctcgcagtcgcgggttctcgcgcgcggctcattgcaacgcgcgtggtttctcaggatcgcaccgcgaccgcggcgatcgccgagggagatggcgcatgacggtccatttcatcggcgcgggacctggcgcgccagatctcctgacattgaggggacgcgatctgatcgcagcctctccggtctgtctctatgccggctcgctggtgccggagggcgtgctggcgcattgcccgcccggcgcgcgcatcgtcaacaccgcgccgctgtcgctcgacgaaatcatcggggagattgccgccgcgcacgcggcaggcaaggatgtcgcgcggttgcattccggcgatctctcggtctggtcggccatgggcgagcagctccgccgtctgcgtgcgcttcgcattccctattcggtgacgccgggcgttccctccttctcggcggcctcggcggcgctggaggccgagctcacgctgcctggccttgcccagagcgtggtgctgacgcgcacgccgggccgcgccagcgcgatgcctgagggcgagaagcttgcggcgttcgcagccaccggcgccgtgctcgcgattcatctgtcgatccatctgctcgaccaggtcatcgcggagctgacaccgcactatggcgcggattgtccggtcgcgatcgtctggcgtgcaagctggccggatcagcgcattattcgcgccacgcttgcgacgctcgatgcggccgtgggcagcgaaatggagcgcacggcgctgatcctggtcggcaagaccctgggcgctgcggatttcgacgaaagccgcctctatgccgccgactacgatcggcgctaccggccggtcggcgccgagccgcgctttccggaggcgacgtgatggcggccggtcttgtcatctctgctccggcctccggcgtcggcaagaccacgctgacgctggcgcttgcgcgcgcctggcgcagtcgcggcctgaacgtgcagtgcttcaagagcggccccgactatatcgatcccgcctttcacgccgccgccacgggacgcgcgtcggtcaatgtcgatagctgggcgatggaccgcggcgccatcgcgcatctcgtcagtcgcggcgtggacgccgatgtcgtgcttgccgagggctcgatgggcctgttcgacggcgttgccgcgcgcggcgtctccggcaccggcgcgactgccgacattgcggagatgctgggctggccggtggtgctggtgatcgacccctcgggacaagcgcaaacggcggctgcgattgcggccggcttgcgcgattatcgcgccggcctgcgtcttgccggggtcgtgctcaaccgcgtcgccagcccgcgtcacgaggctctcgtgcggcgcgcgcttgaggaggccggcatcgccgtgttcggcgcgctgccacgtcatgccgagatcagtctgccgaagcggcatctcggcctggtgcaggccgaggagcaggccgagatcggcaagctgatcgacgaggccgcgcgcttcgttgccgcgcatgtcgatctcgatggagtgctccgagccgccggcaattggtcggcgcagcccgcggcgaacggcctgaagataaccccgcccggtcaacgcatcgcgctcgcccgcgatgcggccttctccttcgtctatccgcacatgctggaggcctggcgcgcggcgggcggcgagatcgtgccgttctcgccgctggccgacgaagtgcccgacgcgagcgccgacgtctgctggctgcccggcggctatcccgagctgcacgccggcaagctggcggccaatgcacgctttcgcagcggtctttgcgccttcgccacgacgcggccgatgcacggcgagtgcggaggctatatggtgctggggaccgctttgacggatgccgacggcgtccgccatcagatgacgggcctgctcggcctcgagaccagctttgccaagcgacggatgcatctcggttatcgtctcgccacgctcgcatcgccgatgccgggatatcaggccggtgcgcgcctgcgcggccacgaattccactattcgaccattctcgcgcaacctgatgcgccgctggcggtggtgcacgacgcaaccggcgcggtcatcgccgagaccggctcgcggcggggacacgccaccggcacgttcttccacctgatcgcggaggaccggtgagcggcttcgtctccttcgtttccgccggccccggcgaccccgagctgctcaccgtgagaggcgccgcgcggctgcgcgaggcggacgtcgtgctctatgatgacctcgcctccggcgcgatcctcgatctggcgcgacccggcgccaatctcgtcgcggtggggaagcgggcggggcgaccctcgaccaggcagcaccacgtcaaccgtctcctggtcgactatgccgcgaccggcgcgcgcgtggtgcggctcaagtccggcgacgccggcattttcggccggctcgaggaggagctggagacgctgcgcgaggctggcatcggctatgagatcattcccggtgtcacatcggcctgcgtcgccgctgcgcaggccggcattcccctgacccgtcgccacacctcccgccgggtgcagttcatcacgggtgccgacgtcaccggcgagctgccgcccgacctgaactgggcggcgctggccgatcccgaggcgacgaccgtcgtctatatgggccggcgcacctttccggcgctggccgcaaagttgatcgcacacggccttgccccggacactccggcattggttgccgaatccctcggccgtgccgacgagcggctggtccgcaccaccattgccgagctcgccgatcagcttgcgcgcggtggcgcgccctcgaccgccgccgtcatcctgttcggtgcactggcgggggactatcggtgatgacggaggcggccgcctttcgccccttgacgcccggctcgcgaaaggcgcacacaggagaggcatggtgctcaccgcggcgcaaagcgccggagcataatcgggaatgggggtgggcggacccagtttcggcgccccaaaccccagccgcccccgcgactgtaagcggtgaggggctccgatcagccactgggccgcaaggtccgggaaggccggagaaccccagtgaaccgcgagccaggagaccggccgtgcacgtgttgaggccaaggccgtcgggtgtgacggcaggaaggaactgagccatgcatatcgaacccggaatcgtgacgggcggcaagctcgtgttgagttacgcaaccggcatcgccgcaggcggcgttgcgttgaagctcgcggtcgagaccgtgcgcgagcagggaatcggctcgttcgcggcacgtacgctggccaccacggcgctcgtgttcgtcttcttcgagatcctgccgcacttcccggtcggcgtgtcagaggtgcacttcatcctcggctctacgctgttcctgctgttcggtgccgcgcctgctgctttcggtcttgcgttcggtctgctgcttcagggcatgctgttcgagccggccgacctgccgcaatacggcatgaacgtcaccaccctgctggtgccgctgttcgcgatccaggcgatcgccacgcggatcattgcccgcaacaccgcctatgtcgatttgaagtacggtcaggcgctggcgctttcgacgacctatcaggccggcgtgatcgcctgggtcgcattctgggcgctctatggctctggctttgcgatgaccaacctcgccaacatcgcaacgtttgccgcctcctacgcgctggtcatcgtgatcgagccgctggccgatcttgccgtgctggcgctggcgaagtcgctgcgcggcgtcaccgcgcctggcctcgtcaccccgcgcctgcacaacgcggcctgagagacaagcgattggacggccgttgcggccgtccgtcgcgctcgcgatgctcacgctctccctgataggcatcggctgcggcgatcccgcgcagctcacgcgcgctgcagtcgccgccatcaacgcggccgatctcgtcctcatcccgcgcaagggcacggcgaaatccgatctcgcggatctcaggcgaacgatctgcgcggacgtgctcaccagcggcagaacgcagatcgtcgagttcgatcttcccgtgcgcgacgccggagaagctgattaccgcaagggcgtggacgattggcacgatgcggtcgccgcgacctggtcgaagacgatcgcggatcatctcgaaggtgatggcaagatcgcgctgctgatctggggcgatccgtcgctctacgattcctcgctgcgcattgcacggcggctcgatccgttgccgaagatcgaagtcgtgcccggcatcacctcgatccaggcgctgtgcgccgcccatgcgctgccgctcaacgagatcggcgagccgttcctggtcacgacggggcggcgcttgcgtgacgagggctggccgcacggagtcgataccgtggtggtgatgctcgacggcggcacggcgttccagtcgctcgatccggcggatcttcacatctggtggggcgcctatctcggcatgcaagatcagaccattctctccggtgcgctcgccgaggccggtccgcgcatcgtcgcgctgcggcaggaggcgcgcgagcggcatggctggatcatggacagctacattctcaagcgccggcattgagcgaggcagcatgctccccgaatgggtctaccgagagtgccccgagatttccgtccgtcatcgcgaggcggcgatcgtgcggcaggcgcaactcacaaagccgaccggggcgctcggccggctggagcagctcgcaatcgagcttgcgggtctgcaggcgacagagcagccccgcgcttcgcgggcgccgatcatcatcttcgccggggatcacggcatcgtcgcgcagggcgtgtcggcctatccgcaagaagtgaccatcgcgatgatggcgaatttcgcctccggcggtgctgcgatctcggtgctggcgcgcgagcttggctcgcgtctggaggtggtcgacgccggcacgctggcgaccgagccgacggcggggatcgtcgttgacaagccgcgccatggcacgcgcgatttcagcgtcgaagctgcgctcacgtctgcggagttggcattcgcattcgaagccggccggcgcgccgtggtgcgggcggaggccggtcagcctgatctcctgatcttcggcgagatgggcatcggcaacaccacgacctctgcggcgattgcggcgagcctgcttgcggtgagcgccgaggagatcgcgggcagcgggaccggcgtcgatgcggccggtcgcgcgcgcaaggcgcgggtgatcgatgcagcaattgcacgccacgggctcgcgggaggctcggccgaggagatcctgtgcgccgtcggcggcctggagatcgcagcgatcgcaggcgcgaccattgcggctgcgcaagcccgcattcctgtattgatcgacggcttcatcgtatccgtcgcagcgctggcggcggcgcgcctcaatccgtcatgccagccgttcctgttgccgtcgcaccaatcggcggagcagggacatcggctggtgctgcgcgccctgaacgtgcagccgctgatcagcctcgatctcaggctgggcgagggatcgggtgcggccatcgcgttgccgctggtccgctcggcctgcgcacttcacaacgatatggcgacgttcgcgcaggccaacgtgcctgacaggcctagctgacctgctgattgacgcagacgacgcgccagccgcgtgcgagccggtcgatccgggtgagcgacaacggatcgatcacgaagcgcagcgcggcgtccggtgtgagatcgagcgcgatgcacagcaccgcgcggatcgtgccggaatgcacgaccagcgttgcggagcctgcgtcaatccttgccaggcctgaccggacgcgcgcgacttgatccgcaaagctctcgccgttgggcggccgcccgcgcgccgggtcgcgccagaaccgcgcgtaagtctcgccaccgctcgccgcgagttcgtcatgccgatggccggtccagtcgccgaaatcctgctcgcggaactcgctgaccagcgccggttcgagtcccagtgcgcgcgccgtctcgaccgtgcgtcgcgacgggctggcatagctggtgccgtcccgcggcaagcggtgtcgcagcgccgccaactttgcgtggtcgccgagatcggcccgcgcatcggcagcatggatcgtcccggccaggccctcgacgaccgcatgccgtatcagccagaggaaggtctcgccttccatgctcatctccaaagaagttggtcgccgtggcaatagcgtcgcatgcgatacattgcctctgtcttgatggtcatcctagatgctcgcgacggttttcccgagagggaatgaaaagggaatgcggtgccttgtccccaatgccgcggccgccccgcaactgtgagcggagaatccttcgtcacaagccggtgggtcctcgttccgggacggcgacgaagcggtgatgatccgcgagccgggagacctgccgtcatccgcggtcgcacgtgaagatgtcggtcggggtctcctgaaaggccacagcggggtggggtgagatcccccgagcgaaggtcggttagtggcataccatttgcaagccaatgggctctggcttcacccgctcttggccaaaagttggccggcatcacgtcacgactgggaggacttcatggatcgcaggaccgtattgaaggggctggccggcgcaggcggtctcgcattgaccggcctctcggcaccggcgatcgcgcaaggcgcatccgcccggaccttgcgcttcgtcccgcaggccaatcttgccaatttcgacccgatctggggcacgcaatatgttgtgcgcaatgcggccgcgatggtctgggacacgctctacggcatcgattcctcgctccagccgcagcgccagatggtggaatccgaggaggtgacggacgacggcacgacgtggaccttcaagctgcgtcccgggctcaagtttcatgacggcgagccggtgctgagcaaggatgttgtcgcgagcctcagtcgctgggcggcccgcgatccgatggggctgatgatcaaggctctgcagcaggaactcaccgccgtcgacgaccgcactttcaaatgggtcctgaagcagcccttcccgaagatgctttacgcgctggcgaagaacaactcgccgtgctcgttcatcatgcccgagcgcatcgcgcagaccgatccattcaagcagatcaccgaatatgtcggctccgggccgatgaagttcgccaagggcgagtgggtgccgggcgcgaaggcggtgttcgagaagttcaccgactatgtgccgcggcaggagaaggcatcctggctcgcgggcggcaagcagatcctggtcgatcgcgtggaatggatcgtgatgccggacccggccacggcggccgccgccttgcagaacggcgaagtcgattggtgggaaagcccgatcgccgatcttgtgccggtcctgaagaagaacaagaacatcagcgtcgatatcggcgatcctctcggcaatatcggctcgttccgcatgaaccatctgttcgcacccttcaacgacgtgcgggcgcggcgtgcggttctgatggcgctcagccaggaagactacatgcgtgccatcgtcggcgacgacactgcgctctggaagccgctgcccggctttttcacgccgggtacgccgctgtacagcgaagcgggtggcgagatactgaagggcaagcgcgacttcgatgccgccaagaagctgctcgccgagagcggctattccgggcagccggtgacgtgcctcgtggcgcaggaccagccgatcaccaaggcgcagggcgacgtgaccgccgacctcctcaagaagatcggcatgaacgtcgacttcgtcgccaccgattggggcacggtcggctcccgccgcgcgcagaagacgccgccaggtcagggcggctggaacatgttccacacctggcatgcgggcgccgactgcatcaatccggcgccgtacaccgccattcgcgccaacggcgacaaggcctggttcggatggccgaacagccccggcaccgagaaggaggtcgcatcatggttcgaggccaagaacctcgacgaggagaaggctgccatcggtcgtctcaacaaggcggcgctcgatgacgtcgtctacgcgccgacgggcttcttcctgagctacaccgcgtggcgcaagaacgtctccggcatcgccaaggggccgctgccgttcttctggggcgtgtcgaagtccgcatgaccgtgcgctgaagccagatgctctcctacatcctccgccgcatcgtcgcgaccctgccggtgatggcgatcgttgcgctgttcgtgttcagcctgctctacatcgcgccgggagatccggccgtggtgatcgcgggcgaccaggcgagcccggaggatgtggagcgcatccggcagagcctcggcctcgaccggcccttcctggtccagttcggaggctgggtctggcgcatcctgcacggcgatctcggcacctccatcttcaccaacctgccggtttcggcgatgatcggccagcgtctcggaccgacgctgtcgctgatgatcgtcacgctgatgctcaccatcgtggtggcggtgccgctcggggtcgtggcggcatggaaggccggcagcctgatcgaccgcgtcatcatgggctttgcggtgttcggcttctcgctgcccgtgttcgtggtcggctacatgctcgcttacatcttcgcactcgagctggaatggctgccggtgcagggttacacgccgctgacgcaaggtttctggccgtggctggagaacctgatcctgccggcgatcgcgctcggctgcgtctacatcgcgctggtcgcgcgcatcacccgcgccgccatgctcgaggtcttgcagcaggactacatccgcaccgccaaggccaagggcctcggccagggcggcattttgttcattcacgcgctcaagaatgcggcggtgccgatcgtcaccgtgatcgggatcggcatcgcgctcctgatcggcggcgcggtcgtgaccgagagcgtgttcgcgatccccggcctcgggcgcctcacgatcgacgcgatcctgcgccgcgactatccggtgattcagggcatcgtgctgctgttcagcttcgtctacgtcctcgtcaatctgatgatcgacgtcgtctacacgctcgttgacccgaggatccgctattgaccgatacgacagtcaatccgcaatcgctaccggccggtctcgttctcgcgccgcagctgcctgacatcctgcggccggtcgcgatccggcgtggcttcgtcggcctcttgcgcggccatccgacggtcgcgatcggcggcgcgctgctgctgacgctggtcctgatcgcggtctttgcaccctatctcggcacggtcgacccgacggcgcttgcacccgccaagcgcacaagggcgccgtcggccgatttctggttcggcaccgacgtgctcggccgcgacatctattcgcgcgttctctacggcgcccgggtctcgctcacggtcgggctgtcggtcgcgatcttcgcgtccgcagttggcctcgccatcggcatgatctccggcttcatccgctgggccgacggcatcctgatgcgtttcatggacggcctgatgtcgataccgcccatcctgctggccatcgcgctgatggcgctgacccgcggcagcgtcggcaacgtcatcctggcgatcaccgtcgccgaaatcccgcgcgtttcgcgcctcgtccgtagcgtggtgctgtcgctgcgcgagcagccctatgtggatgcggccgtggcctgcggcacgcgcacgccgatgatcatcctgcgccatatcctgcccaatacggtggcgccgatgctggtgcaggcgacttatatctgcgccagcgccatgatcaccgaggcgatcctgtccttcatcggcgccggcacgccgcccaccatcccgtcctggggcaacatcatggctgaggggcgcgcgctgtggcaggtgaagccgtatatcgtgttctttcccgcggcgttcctgtcggtcacggtgctcgccgtgaacctgctcggcgacggccttcgcgatgcgctcgacccgcgcatggccaagagtctgtgatgttgcctctgatggatcgaggctgaccgcccatggctttgctcgaagtcgagaacctccagacccatttccgtaccccgggcggcatcaatcgcgcggtggacggggtgtccttccatgtcaacgagggcgagacgctcgccatcgtcggcgagtccggctgcggcaagtcggtgacctcgatgtccttgatgcggctgatcccggagccgccgggcaggattgccggcaccatccgctttgcgggcagggacctgctccagctgtccgatcgcgagatgcgtgccatccgcggcaacgacatctcgatgatctttcaggagccgatgacgagcctcaatccggtcctgaccgtcggccgtcagatccgggagaccctgatgatccatcagggcctcgacaagcaggcagcggaggcgcatgcgatcgagatgctgacactggtcggcattcccgagccgaagcgccgcgtgcgggaatatccgcaccagctttccggcggcatgcgccagcgcgtgatgatcnnnnnnnnnngttgcgctggcctgcaacccgaagctcctgattgcggacgagccgacaactgcgctcgacgtgacgatccaggcccagatcctgaagctgatgctggacctgaagcgccgggttggcgcggccatcatcctgatcacccacgatctcggcgtcgtcgcggaaatcgccgaacgggtcatggtgatgtatgccggccgcaaggtcgaggaggcgcccgtcgcggaactgttccgttcgccgcgacatccctacacacaaggtttgcttggcgcggtaccgcggctcggctcgtcattggtgggcaccgcgaggcggcttgccgaaattccaggacaggtgcctgatctccgcaagcccattgttggctgtgtctttgcgggccgctgtgcgcttgcgaccgatctctgccggcaatatgcgccgggacttgaagagaagggccctcgccatattgccgcatgccactacgcggccaagggagccgttgcggcatgagtcctccgctactccaggtcaacgacctcaagaagcattttccggtcaagaccggcctgttcagccggaagtccgagttcgtctacgcggtggacggcgtgtccctcgagatcgcccgcggcgagacgctgtcgctggtcggcgagtccggctgcggcaaatcgacggtcggccgtgccatcctgaggcttttcgacatcacctcgggccaggtcatcctggacggcaagcgtatcgacgatgccgcaccaggcacgatgcgccagatgcgccgccgcgtgcaggtggtgttccaggatccgttctcgagcctcaatccgcgcatgcgcgtgcgcgacattctggctgagccgatccgcaatttcggtctcgccaagtccgccgaagacctcgaggtgcgggtcaccgcgctcatggacaccgtgcgcctgccgcgcgaggcgctgaaccgccggccgcacgagttctccggcggccagcgccagcgcatcggcatcgcgcgggcgctcgcggccgagcccgaattgatcgtctgcgacgaggccgtctccgccctcgacgtctcggtcaaggcgcagatcgtcaatctgctgcaggatctgcaaagcgagttcgggttggcgctattgtttatcagccacgatcttgccatcgtcgagcacatgacccaccgcgttgcggtgatgtatctcggcaagatcgtggaagtggcaccgcgccgcgacatattcgccgcgccaagacatccctacaccaaggcgctgctttcggcggtgccgctgcccgagcccggggcccagcgcaatcccatcattctcaagggcgatgtgccgagcccgatcaatccgcccagcggatgccgcttccacacccgctgcccgttcgtcttcgaccgctgccggaccgaggagccgacgctgcgcgtggcgggagccgagcagtgggtggcgtgtcatctggaagagggcgcgccgacggcggcgtagcaattgttgcagcgcctgtggcaggtctgcaggacgtgaaacgacaattgcggaatgattgcatcatgctcctgttttgcccgacgtgtcaaaactgaccgccgatccggggccgcattggcctcggatgtgaggccgctcggcgtgatggcaattcgcgagcagaaacaaccccgttctactgtgcatggggttgttttcgcattttgacgtggccggcctcagccctggcggcgcaggaagcccgtgatcgtcaccttttcccagatccccgccgaggcaaagggatcggcgctgttgaaggcttcgacctccttgcggccgggtgcctcgatcaggaacaggctgccgatcatcgtctggccatcgtcggagacgagcggtcctgacatcacgatctggacgccgaagcgcgaggtgtcgctcaggaacgtcttgtgggcgtcgtaattggcaagccgtgtcggcagcgccccggcgcggtcgagggcgtgaatggcgaacagcatggtgtctccgtgtcttgattcagtcttgggacggccgcagcagcggccgtccgggttcgtggtgaccggtcagtctacttcgcgctgagcttgccggcatcctcgaaggtcgggcaggtccgctgttccagcggcacgtcgaagggcttgtaattgtccttggtgatgacggtcggcttcagtacgatctcggcgatgacaggctggctgcgcaaggcgcggatcgccatcatggtgccgaggcaaccttgcgcgaaaccgttgtagtcgccgctcgccagcagcttgcccgccttgatcgcgtcgatcgcctccttggtgccgttgatgccgatcacctgcgctttccggttggcaccatcgagcgcctcgatcgcgccgaccgccatggcgtcgttggcggcgagcacgccgtcgatctgcgggttcgactgcatcaggttctccatcacctggagcgcctggagccgttgatagttcccgggctgcgaggccaggagcttggcgcccggagcctccttcaatgcgtcattgaagccgcggacgcggtcgacattggtcagtgaacccttgacgccttcgatgatgacgatgttgcccttgccgccgagggtcttgagcaggaagcgcgcggtctcgagcccgaggctgtaatcgtcggcgccgatgaaggagaggaacttgccgccggcggagcggtcggtgatgttgacgaccgggatcttggcctcgttgatcttctccacgcccggcaccatcgccttgtagtcgaccggcgtgaagacgatcgcgctcggcttcttcaccacgacgtcctcgatctggctgagctgctccgggatcgagtccggcttggtcgggatgtattgcagcgtcttcgcgttcatcgtcttcgccatgttgtcggcgccgacccgcaccgtctggaagaacgggttggtctggttcttggtgaagacggcgatggtctcgccgtcggcacgcgctcctgttgtgaacgcagtcgccatcagcaacggcagcgccagatgtcccagtttcgttttcatgttgcctccatccctcattttgcttgttggacttccaagtgctcattgcgcgcggcggcgggtcttcatgtcgagccagaccgcgagaatgacgatgacgcctgtgacgagcggctgccagttggcgctgaccgcgagcaggttcatgccgttcagaaccagggtgaggatcagcgcgccgatgaaggtgccgaacacggtgccgacaccgccgaacagcgaggtgccgccgatcagcacggccgcgatcgcgggcagcgtcaggctttcgccaatgtcggcctccgccgaattgagccgggacaggaagatgatcgaggctaatcccgccatggtgccggagaccgcgtagaccagcagcaggcggcgcgcgaccggaatgcccgacaggcgcgccgcgaccggattggcgccgatcgcatagatctcctggccccagaccgtgcgctgcgcgaagaacgttccgatgccgaggaagaccagcagcagatagaccgggatcggcaggccgaacagatagccgctgccgatctggcggaagccggcggggaaaccgtgcagcgtctcgccggccatgtaccaataggtgaggccgttcagcacccagagcatgccgtaggtcgcgatgaaggaggggatgcgcagcgcggtgaccatgatcccgttgaccaggccgacgatgccgccggaggcgagcccggtgaggatgccgagcaccggcgagcccgtcgtatggatcacggtcccggcgaggcaggccgacagcgcgacattggcgccaacggagagatcgaggcccgccgtcagaacgaccagcgtgaggccggaggcgatgaagaaggtgaggctcgcctgcctgagcacattgaggatgttgccgaggctcaggaaggagtcgctcagcacggcgagcaccgcgcagatcaggagcgccgcgagcaggcgatagaacagctggatcgcgtcctgtgacaggaaggagcggggcggcgcgatggcgcccttagtgatgtcggtcatgcgcggctcctgaggccatcgaggaacagggcgaggatgacgagaacgccgacgcttgcgacctgcaccgaggacggcagcgagatcaggttcagcccgttgcgcagcacgccgacggagagcacgccgagcagcgtgccgagcagccagccattgccgcgctcgaacgaggtgccgccgacggcgacggccgcgatggcatcgaattcgagcccgaggccggcggtggggtggccggaattcatccgcgcggtcatcaacaggccggcaatgcctgccatggcgccgccgattgcatagaccgcgatcaggaggcggttcggcgaaagacccgcatagcgcagcgcctcgcgattgccgccgagcgcgaagatgtaggtgccgaagcgggtgtgatagagcagggcgtggaaggcggcgtaggtcaccagcgccatcactatcggaacggggatgcccagaaaggtcgccgagtagatatcgcgcacgctgtggggaatgccgaccacgctctggccgtcgctgacgatcagcgacaggccctgcgccattccgagcgtgccgagcgttgccacgaagggcgggatgcccacgatcgcaaccagccagccgttggcaacgccgaagaccgtgccgacaagcaggccggcgccaaggcccagcagcatcgatttcgttgcaagcgatacgatcgcgacgcagagcgaggtcagcgtcagcaccgcgcccatcgacaggtcgaggccttcagtcatgatgatcaaggtcatcggcagtgcgagcatggtcaggatggtcgactgcaccagcacgttggagaggttggcgaccgacaggaagccgggcgcgatcacgctgaacagggcgatcagaagcgccagcaccatggcaacgccgggaatgcgttgcagcggattgggctgagcgacgacagcggcctcacgcatgatgcatccccaatcgcacgatgttctcctcggtcagttcgttgcgtgtcagatgcccggcgatgcgcccctcgcgcatcacataggcgcggtcgcagacatggcagatctcgacctgctcggacgagatcatcagggccgccgcgccttccgcaacgaggcggtcgatcagcgcgaagatctcggacttcgcgccgatgtcgatgcctcgcgtcggctcgtcgaagatgaacagcttcgagccggccgccagccatttgccgatcacgaccttctgctggttgccgcccgagagcaggccgacggtctggcgagcgctcggggttgcgatgcgcaactggcggatcaggccgtcggcggtacgctgcgcgctacgttgatcgaacaggccgctcggaaacagcttcttgagcgcggacaccacgaggttgtcgctgaccgagcgcagcagcgcgaggccttcgctcttgcggctctccgggatcagggcgatgccgcggcgggcggcgaggtcgggctcgccggaaatgaccttgccgtcgaagatgatctcgcccgacgtcacgggatcggcgccgaagatggcgcgggcgacctcgctgcggccggagccgaccaggccgcatagcccgacgatctcgccccggcgcacctcgatgttgatgtcggaaatgccggtcgaagcgctgaggcccttgacttccagcagcacctcacccggcttgtcggcgaaattgcgcggataggtcatgtcgacgttgcggccgaccatcatgcgcaccaactgctcaggcgtcacgtcggcaggtttgacgccgtcgatgcggcggccgtcgcgcaggacagtaatgcgatcgccgagcgcgaacacctcggccatgcgatgcgagatgtagacgatcgacacgccgtcggccttgagccgcccgatcaaggcgaacaagagctcggtctcgcggtcggacagcgccgccgtgggttcgtccatcacgaggatacgtgcgttctggctgatcgccttcgcgatctcgaccatctgttgctgcgccacgccgagcttgtcgacggtggtggagggatcgatgtcgaagccgatggtgtcgagtacgcgtttggcgtcggccagtatcttgcgtcgatcgatggtgccgggaatacggcccttcggctcacgcccgaggaaaatgttctgggcgatgtcgagatgggggaccagcgagaattcctggaaaattacggcaatgccgagtttctgcgcatcggcagcggactcgatcgcgaccgtctcgcccttgtagtagaactcgcctgcgtcggcgcggtaggcgccgcacagcaccttcatcaggctcgacttgccggcgccgttctcgccgagcagcatgtgcacttcgccagggtagacggcaaaggacacgtcgtcgagcgccttgacgccgggaaattccttgctgatgccgcgcagctccagcagcggcgtgggtgaggtgacttcgatccggagcgcgtcgctcatgacttttcactcatgccttggctccgcctgcaaagatctttccggggttcatcagaccattcggatcgagcgcggtcttgatcgaccgcatcacgtcgacagcctcgccgagctcgtcgacgagataaccgattttgccgagaccgatgccatgttcgccggtgcaggtgccgtccatggcgatggcgcgggcgaccatccgggcctgcagcgactttgcgccttcgacctcctccggcttggccggatcgatcaggatcagcatgtggaaattgccgtcgccgacatggccgacgatcggcgcggtaaagccgtgcgcgtccgcatcgcgccgcgtctcggtcaggcattccgcgaggcgcgagatcggcacgcagacatcggtgatcaccgcgcgtgcgccggggcgcaggccgaggccggcataaagtgtgttgtcgcgggcgtgccagagccggctgcggtcttccggcgccttggcccaggcgaagccgtggccgccatggtcggcggcgatcgcctgcgcggcctcggcctgctcggcgacagaactctcggagccgtggaattcgaagaacagggtggggctctcgcgatagccgagcttggcgtaggcgttgatgccgcgcatcatgacgtcgtcgagcagctcgatgcgcgccaccgggatcgcggactggatcaccgagatcgcggtgtccacggcgtcgtgcagggtgtcgaaactgcagaccgccgccgagatcgcatgcggcacgggatggactttcaaggtgatctcggtgatgacgcccagcgtgccctccgcgccgacgaacatgcgcgtcaggtcatagccggccgccgacttgcgcgctcgcttcgcggtgcggatcacgcgcccgtcggcaagcaccacctccagtgccatgacgttgtccttcatggtgccgtagcgcaccgccatggtgccggaggcgcgcgtcgacgtcatgccgccgatcgaggcgtcggcgccagggtcgatcggaaagaacaggcctgtattgcgcagttccgcgttgagccgcttgcgcgtgatgcccggctgcaccacgacgtccatgtcgctgtcgtggaccgccagcaccttgttcatccgtgcgaagtcgaagcagacgccgccggcgaccgcggccgcattgccttcgagcgaggtaccagcaccgaacggaacgatcggcatgcccgcaccggcgcagagcttgacgatctcggcgacctcctgcgtggtttcaggaaagacgacgatgtcgggcggcaggctccgataatgcgattcgctctggccatgttgatcgagcacgccgcgcgcgacgctcgcgcgccagccgatcatgccggtgaggcgctcggccaatatgcccgtgctgaccggcggtcccatcctcagctcccgtctgctccctgttggcggactcttgttggtccgtcgttcagcttaagcggctctcgcgttgctcgcgagcgtcttcaggccgaaatcgtagttgagatgaaaatactcgcgctccaccatgcgaccatccggcgcacgaccggcgggatggcgaacgaattcacggatcaggctgtccttgacgccgaacaccacgtcgctgtcgagatactggtcgcccgcaacgaacacgtgtgtcacgagctgctcgaaaccaggcgccgagatcatgaagtgcacatgggctggacgccagggatggcggccctgtccctccagcatctcgccgaccgggccatcatgcggaataggataggccgccggcttgatcgaccagaaatggaagcggccgttggcgtcggtgtggaagcgggcgcgcatcgcgagatcgccgatcttgtcgagttgctgcacgtcgtaatagccgtcatcgtcggagtgccagacgtcgaccacggcgcccgcgagcggcttgccgtccacggtcgagaccgagccggtgacgagcattggatcgccttccatcgggccggagatatcggcgccgctatccttttccggggctgcctgaacgaagaacgggccaagcaccgtggtctcggtcgcgccctccggcactgggtggttgatggcatcgaccagcatcgagacgccgagcgtatccgacagcaggatgaactcctggcgcttgtcgttacacatgtgtccagtgcgggtcaggaagtcgatgccgaattcccactccttctgggttggccgcacctcgcgaacgaaagcgtgaaggtgacgcaccagcgcttcgctcacctgcttgacgcgggggtcggttgccccggcgatccgctccagcactgcgtccgtgatcgtgttctcgttgaagttgcgcataagtgtctccgtggatcacagcttcggttcgtcgaggccggacagccgctcgagatgcttgacggtcgcaatgaagtcggtctcgccatcgccctgcgcgacaagcgcgccataggtctcgcgcacctgcgcggccagctgaagtggcacgccgacggcgtgcccggcgccgaggatgaggtcgagatccttggccatctgcctgcaggagaaggtggactcgaaatcacgggtccgcagcggcgcggtcttgtacttcaccatcggcgaagccacggcgctgtcgtcgagaaccttcaggatgtcctgccaggcaatgccgcccttgcgcgccagcgccaggctctccgccatcatcgcggcggatacggcgatcatcagattgaccgagagcttcgcgtagcgcgcttcctcggccgggccgagataggtctgggcccgggtgaaggcggcgaacagcggctttgcgccctcgaacgcctctttcggccctgatacgaagcaagtcagcgcgcccgtatgcacgatgctggcattgccggacacgggggagcgaagataggcaatgccgcggctttgcgcggcagctgcgatctcggcggaggcttcgacactcaccgtgctggtctcgatgagaacagcaccgggcgtcatcgcggcgatgaggccggtggggccgagcagcgccccacgcagggcagcgtcatctggcaaggacgtcacgacagccgccttgccgcgcacggcctccgccggcgatgcggcgaccgcgatgccttgcgcgcgtgcctcgttgatccgcaccgcgctctggtcgaacgcagtgacggcaaaaccggccttggcgacgaggaccgacatgggcaggcccatcttgccgattccgatgaaggcaacgttccccaaagcgtcggtcattgttgttgtccatttgcgccgtcaggcagcgcgtccctgtcgtttgatgtcttgcaccagccgctcgccggattgcgcaagccgctgtttcttcgactccagcccgtcaaccagcaatcggccatttcgcttcttccagctgccgccgatcatgacggcctcgatgttggcaaggctcgtctgcatcacgacggtcgcgacgggatcatgcaccgggacgaggttgagatgggaggcgtcgatgatgacgaggtcggcgagcttgcccggcgtcagcgatccgatctggtgctcgcggccgagcatgcgggcaccttctgtcgtgacccagcgcagtgcctcgcggaccggaattgtggtcgtcaccggtatcgtgccgctcgtctttctcgactccgcattgtcgagtgcgcgctgcatggagagcgcgacgcgggcggccgagagaagatcgccggccagcacggattccagatcaatgccgatcgtcggccgcacgccgcgtttcaggaggcgtccggtgatcgggaagccgtggccctggatcatctcgttctcaggtgtcaccgagaaggacacgccgagatcaaccatccggtccaggagttcatcggccagatcgttgccatggacgatgttcacgcccggaccgacgaacccggcctcgatcagcttctcccagccgccgggcgtcttggccgggccgccgccctgatgcatcgatgcgatcaggttgagctcacgcgcaaggcggagatcgtgcatggcgacgtcgagggtcgaatagtgcggtcccaggatagcaagtcccagcgtgacgagaccgtcacggtcggcgagggcgcctgcgagcagccgctcgacctcgcggcgtggatgcggcacctccgagaaatgcggctcgcctggcttcggttcgggcttgggcgagccgtggaagaaggctgcgcggatgccgctctcgagcaggccgcggacggcagcgtcggtatgatcgggcgtcgggttgttgtggcaccagtcgaccagtgtggtggcgccatggttgatctgattcagcgccccgacgagtgtggcgatgtagatgtcgtcgggctggaatacggtcgcgagcccggcatgcatgcggcggaaatattccagcagcgtccagttcgcggcaaagccgcgcaagcctgtctgccaggtgtgcatgtgcgcgttgatgagaccggggacgacgatgcggccggtcccatcaaagatctccgcctcgccgctgccgaggtcgatggacggcagcacgtcaacgatgcggtcgccttcgaccagcacgtcgccggtgcggaggtcgccgatcgcgtcatccatgctgatgacggtggctgatctgatcagcgtgcgtcgcatcgcttcaagccgcagctttaatggcgcccggcggctcgccggcccaggcccgtgcgatcaggtcgcggatggcgttccgttcaagcgggcgcggattccagtacgcattggtgaccgcaagatcggcagccttatcgattccgctctcgggcatgccgatatcgcgcaacgcgagcgtggcacccagccgcctcgccagttcgaagagtccttgggatgcgtcagtggcgccgattgcgcgcgagatgcgcgtcatcgtatcgggcacggccggtgcgttgtaggcgagggaatgcggcagcacgatggtgtgtgtttcggcgtgcggcaggtcgaaagtgccgccgagcgtgtggcagagcttgtgatgcagcgccatgccgactgtgccgaggcagacgccgcacagccaggcgccgtagagtgcttcggtgcgtgcctcgcgatcgttgctgttcgtggcgatcgcgggcagggcgcgcgccagcgcacggatgccttcttccgccatcagcgacgtcactggattggtatcgcgtgcgtagagcgcctcgacagcatgcgcgatcgcattgatgccggatgtggcggcgaggctcgccggcagcgtcagggtgagatcgacatcgtagatcacggtctccggcaggatcgccgcatcgcgcaccgtggtcttgaggccgttctcggtctggccgacgatcggcgtcatctcggagccggcataggtggtgggaatgcagagctggttgacgccggtgcgcagggccagcgccttgccgaggccggtggtcgagccgccgccgagcgcgacgacgcagtcggccgcacaggctttcatcacggcgagcgcgcgttccgtgacctccaccggcgtgtgcatggtggcgccgggaaagatgtcggcatagagcgggccgagagccgtgcccaggttcctgccttgattctcctgctgcggggtcgtcaggatcagcgcgcgcttgccgccgagccgctcgatttcggccgcggcttgcgcaagcgttccgctgccgaacacgacgcgggagggcaagttttcaaaggtgaacgaaccgatcatgcgccggtctcttcgatgggataatcgacctggtagcgcccgatgcgcaagtcgcccagcgcctcgcgcacgcgcagatgttccgggtggttggcgtaggcggtaagggcggcttggtccttgaattcggagagcaggaccacgtcgcatgcgtaatcgaccgcgctgacgtccatgccgacctcgacgtgggtgaggccgtcgatccgacccatcaggccctcgaacagggtcttgaccttgagccgtgcggcggagcgctcctctggggtctccccgcgcagccgccacatcacgatgtgcctgatcgggcccgacatttccctgtttcctcgcctgcgacggtgttttgttggcgccattttgccttgcagaaatcggaaataaaggtcaaactttgtaagtctcttttcctcattccgtaaaaatggaccgactgctccagctcgaggtcttctccaaaaccgctgaactcggcagtctctccaaagccgccgaagctctgcggatgtcgaacgcggctgtcagtcgtcacctcagcgcgctggaggagcggcttgcggtccggctgatcgaacgcaacacccgccggcaatggctgactgaagccggacaggagctactgcagcgctgcagcacgctcttgaacgaattggccgaggccgaggacgccgtctccgaccgcgcgctgtcacccaagggcatgctgcgcgtaacgagctcgctctccttcgcgatgatctatctggcgccgatgctgcccgccttccgcgcgctctaccccaatctcagcgtgcagatcatcagtgcaaaccgctatcccgacttcatcgaagccggcattgacgttgcgatccgcacgcgcgagcacgagccggattccaacatcatcgtccgccgcatcggccagatgcatcgtgtgcttgcggcagctccctcttacctggagaagcatggccggccggagcatcctgctgatctcgcccgccacaacatgctgatctacaaccttgccaacgatccgtattcgctgcggctcagccagggcagcaccacgcagaccattcgcatcgcgccgacactcgacagcaatgacggccagatcatctgtggtgcggcgcgtgcagggctcggcatcctgatccagccgctctacatcgtgcagggcgacatcgcggcgggccggctggggccgggcctgatggggtgggggctgcctctgctcaccatgaacatcgcctatcaaaaccgcgtcaggctgcccgcgaagatcagggtcttctcggacttcctggtcagccacatccgcgagcattcacctccgggtatctggatcgacgcggccaagtgacgggacacgcgagagctccgatagccgtgagccgatgggcgagcgaaatgcggatcaaacagtcgaactcgggctggttcgtgcagacgagaccatcgacggaaattgacttgcgaatgcgcgagttttgggttgaacgcgcgatccgtcgatcacctcgagccggccgcagcggttcagcgtgtgcagcttcctgcccggccaaagcggtcctggcctcagcgagtggcggacgatctgcctgaatgtcgtcggcgacagttcgacgacctccgctagcgcaagggctgcgccgtagccatcggaacagtcctggaccggtcgccacaatttgccattgagggtgacgaaattccccgccggccgcgtgcttgcgcggtcgatgaggaccggattgctggcgtggggcgaccagggtcccaagagacgatcggcgcaatagatcgcgagcgaatccgaataaccgccggttccgtcgcgccaagcgccaaacagataatgcaggccgtcatgctgcgtgatggtcgcgtccgccagttcaagtccggacagcagcgtcgcgtgccgctcccacttgtccggaaaacgaacgcacttgtagagcgtgacgtcgccgttaagcgagctctccgggatcatccacagggcgccgtcgctctcgatcagaaagggataggagaggtgccagggctcctccagcacaggcacgacttctcccaccgggcccgcgtcgttgaactcgatcgccgaaatgatgccctttccgacgcggtgatcgagatcctcaaagaagacgaaagttcgtccctgccacgtgatgggaaagggatctgcgtagaagtggtttccaggatctcccagaaccgtccagcttgggcccgacagatctccggtctgccagacgcccgcgccatcattgaagcgccagccgatatgccaatgcggagcatagcagcagagacgataaatctcttttgcgatcgatacggcaaggccgcgagcaacaaagccggcgggtccgcggcgtgggccatttccggccggccgggccaactgcgggacaatgcgcggccttcccgacaggatcgccgccaccatggtcagggttcgcgccatgaccgtttcaagcgcgccgctgaggcccgcggcaatctccgccgatggatggccgcggtcgagaactgaaccgtcgatctcgttgatgatgtcgatcacgggcaggtcgccggcgagaatggcggccagcgcggcgttttcgcctgcggcttcattgaagagcggacgaagatacagtcgggcagagcagttgggatcccgcgcggcgctcgtaaaatcgacgatcacgtccgccgcgtcgccgtcagccgatgcccgttccggaatgaccttcagtctgtcggcgccgctgcgcttgcccttgcgcaacaccatgcgttcgagctcgaacagggcatcgagacctgcgggccgcgcctccgccgttggcatccatacgatctgaaccggaacgtctcggccatcgacggacagcatctcgcggtccatccattgccgcgcgtactcgcgctcacagcgaaactcgatgatcatgtcgagccaatctcttacaaccctattcaggtcaagtgacctgctcgagaatgcgaacgtattcctccaccatagcatctaccgaatagcgcaatcgcaggcctttggcgttttgtcgcagctcgacgctcagttgcttgtccgtcagcagcctggagacggccgcggagagctgtgcatggtcggaggcatcgacgaagagcgcagtcggtcgtccttcgtaacacaacacttcgcgcaggacggggagatcagtcacgacggagggaacaccggcattcgcagcctcgaccgcggccagaccgaaggtttctgcctgcgtcggaaatacgaagacgtccagacaggcgaggaagtccgccatccggccgggagggatttccccgagcagatgcagtcggtctgatactttcatgtcacgcgcaagctgcctcagccgcgcctcgtcggcgccctggccggcgagcgcaaggtgccaggacggttgctcaggcagcagacgtatcgccatatcgagccgcttgtgcggatgcagccgtgctgcgcagcccagcaagatgcaatcctgcggcaggttgaactcttgtcgagcaacctccttcgacagcgtgagggccttgtcgtcgaagccatgcggcacatgcaccatgcgtgaccggtaggccgcgggatagcgcgagtactcgcgttccatgtccttcgaattgagcgtgatgcggtcaaagaagccgaggctgcccatcacgatatcggcggtacggacgggccagctcatcgacagcgcggacgagacctgatttgcgacgacaggcgcgcggctgacgaggcgcgtcacactgccgccgatgacgttgccgaaatgctggaacgtcaggacggcgtcgggccgggtggtcctgagatggtgcctgagcgtccacagcatccgcagcaatgccaccggattgcccggccggcgcggcgcgcaatacagtgtatcgggcggctcatcgaacgaatctgatttgcgaaagaagaacagattggtgacccgatagccgcgagcggtcaggccggcgccgagaagccgggatatctcctgcgcaccggcgttctctgcctgggtctgcgcgagaagcacgtgcaacttcggcccgtctccgtcattccgggcgagtgccgttgcgctcgcttcgcccggttcccttttcggttgatagtggagcacggatcctgacccgccaaagaaacgaaatcttcaccttcttaactccgtacctaccatgcaggcgccgcatggacaccgactagcggcaaacggagttaatgccaggctgtggtcacaacatcgttcgcgccgcaactccgctggttgcaggcccatatgcggcgagcacgttaaccaacctgtcttgcgcgctgccgaagcgtgattggggaccgagcggccgcgcaatggcagctaatcacgcgtctccgcgccgcggacagcatagttgccgcgcctccatccagagaagcgcaggagcacgagaattgaaggatccactccggaccggcggcggcagaggacgttcagggcaatggttgcaagcgagagcgacacggtcgccgaaatcgctgcgccaagcacgccgagccaggggatgaggacgaggaatcctgcgagccgcaacgcgacgttgacggcgacgaccggaacatagattcgttcatggccggtcagttgcaggatcgcagcggcggggccgcctgctgcctggatggcggttccgatcgcgagcacgatcaagaccgcatgctgtgcggtgaagtgcggtccgaacaggttgaggagataggggccgccaatccagatgatggcgaggccggcgacaacgcaaagcgctgtcacttccgccatcaatcgcaaggttcgctcgaactcccgatggttcttgctgaaatacagtgaaggaagtcgacgcgcgccgaacgtgtaaagcgctgcggacagcatggcgaagatgttggccagtcgcgaggccgcaaagtagacaccggccgtcgccggatccagcatccagtagaccagaatgacgtcgaaatactggttcgccgcttcgaggatcgatgccagccagaagtgaagggcgctcgatcgccagcggggcgtttcggatcgcgccggcgtgttgcgcaagtccggcaacactcgcgcgatcgaaacgatctgcgcaagcaggcctaccgacatggccactgtcatcaccgcgaacaattcagtgggatcgagttgccgatggccgagcagcatgaccagtagaaacagcaccacgatggctcgccagaagaactcgcgattgccttcccccatgaggatgctgacgagcgagcgtgcgatctggctcccgagcattacgccggcattgacggccgtgtaggccgacactgcaatgatcagcagccacccatcgcctcgcgcgcccgcgacgacggcgatcccggtgatcacgatcagcattgcggctgaagtgatcttgaagctcgacagcaggacgcctttggtaagatctggccggccgccgacctgatactcgttcaggaatctgaccagcagcgattcctggccgaccagtcccatgacggctgcgatctgggcgaccgaaagccaggtcgcgaagataccgaacccatcgggcgacatcgttcgtgccgcgagcgagaataatgcaaacgcgagcacgccgctgccaaccttgaggaggatggttccgacaacaccgcgcgtgacgtcgcgccgcatgaactggaggatggattcgatcatggaaggttaaggggcagcgctccctcggagagacatgttccgatagtgccgacaatctagcatgtcgaagaaccgcgagtgttaatggacgacttgcaggaactcgcccgcggcgacgatgtcgcggtggcgccggctgcttcagtctggaacatcgccgtcctcattgtcccagatcgtgcaaggtccagctcaatcgattgacggcttggcgtcgccatccgcgagcgaacaaggcgagatcagccggtcaaggacgggttggccgctgggatgtcgccaagctgtcagaaggcgagacttgcagggcattccgagcaaggcgcgtgccggcacggcggccgcgagatttggcacttccagtcattaacctcgatctccggaattgaccggacttggccctgcgatgcggcatcgggcgagagaattgcactggaatggccgttaaccttgggagcctcagccatgacgacggatagacccgtaaccgagccagccgatggcggcgagaacgcggagatcgtgatcgtcggcggcggccttgcgggatcgcttgcggcggccgtgttggcgcgggcagggcatcgcgtcgctctcgtcgacaagcgcgcggtctatccggacgagttccgggtcgagaagatcggcggccatcaactggatttgattcgcaagctcggctttatcgatgcgctcgagcatgtcgcttgccgatatgaccgggtgctgaatatccgcgaaggcaaggtggtcgatgtcagtgtcggtcaggcgtatggattttcctatgccagcctcgtggccacggcgcgtagccagatccccgattgctccaatctgatcgtcgacgaggtcatagcgatcagcaacggcgacgatgttcagcatgtcgaactggcctccggccggcgcttgactgcgcgcctcgtcgttctggccaccggcatggcgggagtcctgggttacaagctcggcatcaggcgccgtgtgctggccgagcgccactcggtgtcgttcggcttcacgatcgctcgccgggacggcatcccgttcgatttcgaagcgctcacctgctatggcgaacgtacggcggacggcatcgactatctgagcttgtttcccgtccgtgacggcatgcgggccaatctcttcatgttccgcgatccgacccacccaatcatgcgcgaactgcgccgggaaccggaagcgacaatcttgcgcctgctgccgggattgcgctcctacctcggcgatttccgcgtgaccgacagggtccagaattgggtgatggacctgaccgtcgtagaagggcatctgctgcccggcgtcgtgctcatcggcgatgcgttccagaccaactgtcccgccgccggcacgggcgtcgcccgcctgctggtggatgtcgaccggctctgcaccgaatacgcgccgcaatggctcatgagcgcgggcatgggccgtgagaagatctcgcagttctattccgatcgcgagaagattgcagcggaccagcagtcgctgaagatggcgcgcttccgtcaagccctgacatcccgcaatggtgtcggctgggacgtgcggcgacggttgcacttcctgcggcgaagtctgacacaccgcgtcgatcaaatgcaccccggttggattgggcgtatccgcggcgcattgcgcgcctgagctttgcacttggtcgtgtgccgtcgatcaacgcgtaggagctggggtacgagcgggctggagcctcaggtccgaaagccgcttgaccgccaacttgagccagggagcctgcttcagggcgaagagggcgaccgcgcccacgggactgccggctttcgtgacagcccacaccggcgaaggctgcccgccgaacaatttcttgtatggctcgtcgccgatggtgaaatcgagcatccgatctccgcgctcgatacaatcacgcgccacctgctcgaacatcagcgcgccgagagactggctcttgtacccagcaatgtcgaatgcgctcatgatgatgaggaagctgccccgatgacacagcccgagcacggcggcaatcacttcgccgtccatcttcatggcgtagaggcggacgaaggagccaaggccgcgaagcgctacgtcggaatagaagccgtagtattcagggcgctggagcaggtccccgtcgccctgtgcgtgaaagcgcgggccgcgaaacttgcgcatcacgtccagtgcctcgaggacggaggcgctgtcgccgcagcatgagaagctcagcgagcccttcttctggagctgacgatacttctttgcgagctccttctggtaggagcggtccatcgcactggcccgccattgctcgaacggtgccatgagaatcgtcgcgtaggaattcgtgtccatcgacacacggcgggacgcagcgaggagtttttcgatcggaagccgtccgtcaggcaacttggtcagtcggagcagatcgaaggggcgcacaagccgccggatttgcgagcttgcggttgcatcgtcgagcagttgtgaaaacacgtccgggctgcagaccggtaccagatagtcggaaacgcggaggtcggcgaactcgaccgttcgtattggaccgcgccggattctgagcaggggcagcaccatcgcaagggcccccgtcgcgcggtggcggaccacgacgaccagaggcgttgcacccgcttccggcgcgagcctggtgtagaggcaatgcagccagatcgggtgctggaaggccgtagcagccgagcgatcaaacagctctgcatattccggagatagaaagtcgaaagactgctcgatgacgatgtcgaacgtgttgccaggcttgttcatgagcaatcagggaaatccgggtcattcgcgagcggcgataagccgcagctggcatatagcaaggttgttacgggtcaggcaccggaagcgtgcgatttgcattaatgcgttcaaccatgctcgtatcgttaccaaactcctaaatcccggagacgcatggcatcgctccgcaggagatggcgaacgcgtggtacttgtcgcaagtcgcgccgcagcttcatcatcggaacgaatctcattgtccacggtgccctgacgcgcggtatgcaattctgaggcgctagcgctggaaaagctaagtcggacggttcgggcgctgaaaagcttcagcgtctcgtcgaggatgagctcgctcgcctggctccagtcgtcaaggcgagcggaccgagccgcgggtgggctcttgtcagagccgtaccgcgctcgtcgtgaacgcttgggcgaccggctcctgaacgcggttcaggatcaccattcctgcaacggcgatcaccagggcagcaacgcagccaagtacgaaagccttcatcctcagcctccctcgattggaccatcaagccatgtatacgacacagcttgtcgcgagcaagctcgtcgatcgctcgcgggcatcgggacccatcgggctgttgcgctgcacggttcggaacggaaggacggtctgaaagtttcttgcaggcctagtgagcgcatcggaggaccctgcgtgaaatttccgaaagcgatcttgtgcttcgcagcactctgttcgattgaaagcgccttctcgattgaaagcgcctcggcccagccggctcaaaccaactcgtcggcgacgcaaccccctcctgaagagaagggccaggcacagccgcaaggctggaccgggcctatcaataccggcgcgggtggtgcgccggccggaagtccccagggccagagtccgcccggaatgcaggcagctcctcaggggtcgtccaaaacgacgacggcaccggccaagtagacgcggcctcgtatattcagttctgccgtctgttctggcaatcttgatgatgcgatcgtcaggcatggccgggtgtgaaatgaacagatcaccgttgtgtacaagggtggccgtagcgctgttgatcatctttgctgcatcatccgtgcaagccgacctggtcgggcatggcggccccatacgcgctctagccgtttctccggatggcaacagccttctctccggcagtttcgacacggcggccattcgctggtcgctcgagacggagaccgcacggcaagtgctgcggtaccatgcggacggcatcaacgcggtcgcctttctgaaggacggtcgcatgatcacggccggggccgatgcgcgaattgcggtatggactccgggccggccggagccggaccgggtgctggagggacatctcgctccgattatggcgcttgccgtgtcgcccgatggggcgcttctcgcatcggggtcatgggaccgaacggtgcggctctggtcgctggcggacggcacgtcgcgcgtgctcgaagggcatacgcagaacgtgaacggcgtcgctttcctgccggacggcagactggtcagcgtcggctacgatcttgctctgcgcatctggcgtttgccggacggccagcccgacaccgtgacgctgtcggcgccgctgaacgccgttgccgtggcgccggatggtgagatcgtcacaggtgcggtcgacggcaagctgcgcatgctgacgaaggatggcaaggtcggcggcgaggtcgcggccggtcccgcgccggtggtggccttgacggtgtcggcggacggcatgctgatcgcagcggccggtgtcaatggcacggtggcgatcgtcgatcgcaagtcgcgcaacctgctccgcacgccggttgggcccgggttgccggtgtggtccgttgcgtttctcccggatagcgagacgctgctcacgggaggtgcggacggcaggatcaggcgttgggatgcgcggaccggtactcccgtcggttcgactccggtgggatccgatccgcttgccgcttacgcgggcgaccacggtgcggatgtttttcgggcgtgtgttgcctgtcacacgctgtcggacaaggaggtgcagcgggcgggtccgaccctttcgggactgtatggccgcaggatcggttcactcccaggctatcgcttctccgacgcgctgaagaccatggacatcgtctggacgccggagacagtcgcaaggctgttcgaaatcggaccgaacgcctatacgccgggcaccaagatgccggaacagcgtatcggctcgcccgaggaccgacgcgccctcacagacttcctgggccgcgcgacgtcgcgatagcggccctcatatgagttcaaattctttatatgaagactccgcatctccggatgctgcttcaagatttggatgacatcgatggttgggtgagcggcttcggcaacgcagaggtcgacagccgtgccatcttcttgcccgtggcctcggctctgcgagcgacgatcgccgttacccgccaacttctgtgcctttgtcagcggtggagcggcagcttcggccactcagccggcgacagcgctgaagaccacggacttcgacagagctgtgctgacacgagacatggtgatgcctcccggcgacgatgtctgttcgtcttgtctagtccttgccgttgcgttgacgtagatagtcatccgtcgtgcgcggcggcgttcgttccggaactcccttgaacggatcgaattgctgttcgctcatgacgatgacgcggcagtcggcgcacatcctgagcgcctcgagccgcttgtcgccagccggatacatccagtgccggccttcgagcttggccgcgatccgctcgattgtgctcttcactccgaatggcgtgccgcagcggacgcagagcgccggttcttcctccttaaggatcacggcgggnnnnnnnnnnaagcagcatcaccggtccgggctcaatcgcccccgaagtccgtcccgtcgctcgatccatccgccccgctccgcagtatgacgtttatcaagaggtctcatactggcgagagcaagagatggaccactttcgagctcacggctgaagagccgacagaacgaaagtcaaatggctgcttcacatgaagaatctgtgctcagccggtcgcgacgctggggcggaatgcggcgcttccgttgacaagcgactatccacctcgacgaccaagttgacggtcggcactagattgccagccggaacggccgtttcaatggaacccagcgaacacactttccgagcaggagctgcaggacggctccgtcctgtttgcaaaagagccagctcggtaggtcggagcacccgcgttgctgctccgacctattcggccgccgcggttgcgggttgcggctgtccgtcgttcggtccggttcgcgccttctgctcgtccagccagaggctatggtgctcgcgagcccagttgacgtcgacctcgcccgagcccatggcttcaaaagcaccttccatcccgatggtgccgatatagatatgcgcgatcatcgcggcgacgaacaggaccgccacgatggagtggacgatctgggccatctgcatgccctcgatcccggtgccgtagaacggaaacatgagcgcgtagccgcttgccgcgacgagaccgccgccgatcacgacgatccagtagatcatcttctgtccggcgttgaagcggtaggccggcggatggtcgtgcccgatcaggccgccgccgcgcttggcccactcgacatccaccttgcttgggatattaccgccgatccacatcaggaagatcaggacgacgccgagggtgaaggggaagctcagataattgtgagcgaacttcgcccattgcgaccattccgaaaaggcctcgaagccgatcagcggtagcagcaacggccggccgaacgtgatgttcagcccggaaatggccagcacgatgaagcagcttgccgtcagccagtgcacgaaccgctcaaacgcgttgaagcgcacgatggtgcgacctgaccgtccggcttcgagacgcaccatcccgacggtcagatagaagatcacgatggcggcgatcatgccgaggatggcaatgccgccgatccatcgcagcgtcacatcgcggaattcccgccattcgcgtccctgcggctgctcgagaacaccggagcgctgatcgggaatgctgacgcgtccctggatccggttaagctcctgcagaagctgctgctccttgaccgcgcttgcggtcgggttgacttgctgcgcacccgcgggcgccgccgtcaccaagagaagcagcgcccaggctcccaccgccagacgaatgaaccttccaaacgacgccatcacgtcctccccggtattgcgcgcccgtcggttgccacgtcaggactcgatcgtctcgcggtaggcggtcttccagccccaagcgcccgagccgtagccgcgcttcatgacgcgctccttgtagatctgggcgatgatctcgccgtcgcccgcaagcaaggatttggtcgaacacatttcagcacacagcggcagcttgccctcggcgagccggttcgcgccgtatttctcgtattcggccttgctgccgtcggcctccggaccgccagcgcaataggtgcatttgtccatcttgccgcgcgatccgaagttcccaaccttcggatattgcggagcaccgaacggacaggcatagaagcaatagccgcagccgatgcaaagatcctttgagtgcagcaccacggcatccgcggtggtgtagaagcagttgacagggcacaccgcggcgcaaggcgcatcggtgcaatgcatgcaggccatcgagatcgagcgctcgcccggcttgccgtcgttgatggtgacgacgcggcgccggttgatgccccaggggacctcatgctcgttcttgcaggcggtgacgcaggcgttgcactcgatgcagcgatcagcgtcgcagagaaatttcatccgagccatgtgcgtgctcctctcaggctgcgacgatctgacaaagcgtgaccttcggctcctgcatgcccgtcgcaggatcgtagccgtagctcgtgatcgtgttggcgctctcgcccagcacgatcggatcggtgccggcgggatagttcttgcgcaggtcgttgccgccgaaccagccgccgaaatggaacggcatccaggcgacgcctttgccgacgcgttctgtcaccagcgccttcatcctggcacgggaactgttctcggcgccgctcacccagacccagccgccatccttgatgccgcgatcggcggcatcggccgggctgatctcgatgaacatgtcctgctgcaactcggcgagccacgggttcgtgcgcgtctcctcgccgcccccctcatactccaccaggcgtcccgaggagaggatgagcggaaactgcttggcgatgcccttctcgatcgccgccttctggacggagaagccgatgttgggcaggcggaactgcttggcatcgggcagagtcggatacttttccaccagatcgacgcgcggcgtatagatcggttcgcggtgcaccggaatcggatcgggcagaccgaacgcattcatgcgggccttgccattgccgaagggcacgcagccgtgcttcagcgcaacccgctggatcccgcctgagagatcgatcgcccaggacaccgcatcgggattggcaggattgaccctctggatggtcgccatctcagcctcggtgaggtccttgtcccagccgagcttcttcaggctcgctagcgtgaactcggggtaaccgtcttcgatttccgagcccttggaaaacgacttgtcggcaagcaggctgactttccgcgtcgtgccgtccggcagcttctcctcgcgttcgatgccgaaccggggacggaacgcgccgccgccatccatcacatgcaggttgttattgtagagcagcggcgatcccggatgcttcacctcgggcgaaccccaacacggccacggcaggccgtaatagtcgccgccgacttccggatcgtccttgggcgcgcgcatggtcaccagatcgaacttgtgctggttcttcatgtgcgccttgatgcgttccggcgactggccgcaatagccggtcgaccagcttccgcggttgatctcgcgcagcacgtcctcggcaaccggaagattgttctcgacctcgatgttcttgaacatcttgtcggcgaagccgaacttctttgccatgagatagatgatctcgaggtcgtccttcgattcgaagatcggcttgacgatctgctcgccccactgcatcgagcgattggaagcgacgcgcgatcccgtgcattcgaactgcgtggccacaggcaggatatacacgccgtccttgcgtcccgcctcgaccgccagagacgcccaggtggtcgggtgcggatcggcgatcaccaacagctccagcgccttcaggcccttcagcgactccggaatgcgggtgatgctgttgctggcgtggccctgcacgaatacggccttgacgttgtccttctgtgcgacatctgccttcggcaacagcgcggcatcgaaccaccgcgtcagcgggatgcctggcgtctccatcagcttcttctcgtcgaagcgggagacgagatagtcgtaatcgacctcccagactcgagaccagtgcttccaggcgccttccgcaaggccgtaatagaacggcaacgtcacgatatcgaggccgacatcggttgcgccctgcacgttgtcatggccgcgcaggatgtttgcgccggcgcccgccttgccgatgttccccgtcatcagcagcgagatgcagcttgcccgcacgttggcggtgcccaccgtgtgctgggtctgtcccatgcaccagatgatggtcgccggcttttgcgtggcgaacatcttggcgacgcgttcgagctgggctgcgggcacgccggtgacgcgttccacctcctggggattccacttctcgacttccttgcgcagatcgtcgaagccgtagacgcgctgggcgatgaactccttgtcctcccagccgttcttcaggatgtgccacatcatgccgtagagcaccggaatgtccgtgccggggcgaatacggacatactcggtggcgtgcgccgcggtgcgggtcaggcgcggatcgaagacgatgaagttcgccttgttgagctctttggattcgagcaggtgctgcatactgacgggatgcgcttccgccgcgttgctgccgatgaacagcatcgtcttggagttgcgcatatcgttgatgctgttcgtcatggcaccgtagccccacgtgttggcgacgccggtgacggtggtggagtggcagattcgcgcctgatgatccgtgttgttggtgccccagaacgcaccgagcttgcggaacagataggcgccctcgttggtcatcttggcggagccgagccaatagacggaatcgctgcccgacttctctcggacctggagcagcttgtcgccgatctcgttcaccgccatgtcccaggacacgcgcgtccactgcccgttcacgagcttcatcggatagcgcaggcggcgatcgctgtgcacgagctcgcgcaccgatgcgcctttggcgcagtgcgagccgcggttgatcggcgaatcccagcttggctcctgcccgatccagaccccgttgagcacttccgccgtgacggtgcagcctaccgcacagtgcgtgcagatgctcttcttgacgacagcgccagcggcaagcgggccggcagcagccgcttcagccttccgcacgctgccgaccggcatggcacccagcgcggcgagagcaccgccagccagaccggacctgcgcaggaatgtgcggcgatccagtccgccggcctggcctgcgagggactcggcaacggagcctcggcgatcggaacgctggtttgttcgcttgataagcacggcagcctccctctcacgccgggtaacgattgacgcggtagaacgtcttcacgtgatcggattccttgtagcgcgccttgcgcttctcatcgttgttctcgctatccgcctgggcggtcccgaccaacggggtcgcaagcgtcgcgccggcgccgaccgtgccgatcccgacctggcgcaggaagtcgcgacgtccgacctttgctttcgtctcgtcactcatggcatctctcccggaccgacgcgcgtcgatcaattggcgaatgtgaatgcttccgtctcgatctcgatgaaggtgcgaccgagcgcgccgaccgcaccgtagaagcgcgcattcccggcgctctccatgtctgcgaatagccgtcccatccagggcgatacgtgtttgtcgaagaaggcacgctgcgcctcgggcgaagcaccgaagcggccgtcagcaaggcccgacatgatctcgcacaggatcgcgacgtgatcctcgggctcggaattgttggcaatccgctcgatgccgagcctcgtcaggtctccgcgcaggcgggataatggccgttcgttcagaaagccggtgagatagtaggaggcatagggcagcaattcgccgcggccgagaccgacgaacaggtcgaaatattcccgctccaccttcgcggcaacggcgctcgaggcggcgtcggccagcgctgcatgcgcacggccgagcggcgtcgcatcgctggtcaatgccgcaagctgctccagcaatcgcttcgacggcggcgctgagagcaacgttgccagaagcgagtattcctgcgcgcgcgcagcatcgaccggatcgacgggctgcgctgcgccggcttgttcgttgtagagatccggccgaagatcgttccgggaaacaccagtggcggtttcgaccgcaatcacccgctgtgcgggcacgcgggtccaattcgagacagagggctggctgatgccgattttgcgtgcaagctgagcaatgccgcctgcggcatcgatcgcgcgatcaagcccctcatcccgcacgtggacctcccatccgagtcccgtctgcttgattattgccttttcttataaggcactcatgaaagcgtagtcctggctccgcggaccgtcaaccgtctgccatagcttgagcctatagcctttggtcgcgctgcttagcgcggcagtgcaccaccgtgcgtgcggagtctgatgggctcggccgtctcgtccgaatgaccaaccgccggcggttgcaccgcaatagagatctgcggttgctccggcggggccgagggctcaacgctattggaaatcattgtcacatcggcgccatgcaaatccgctgaaaccggcatttcgatggacgcatcgggaagagattggaccgcttcgcgcactccaccaacaatgcgatcgaccagcgcggccagctcctccgacgagcaatccagcgggccaaagcccggcatcgcagtggggtcgttgaagtcccatgcattctccgcaaggccgacgaagtcgcgaatggcaggatcggtcgcccacgcgcggcgaagggccgcacgactcaactcctgtggaaccctcttggccagaaacgccgtgacgtcggtcgcagcattgatgtcgtcgatcgaaggcagcgtcgagagatcgaactcggtctcgccgtcctcggcctcggacggcggcatggattgcgctgcagcaggcttcgtcggctccgcccgcgattcgcgtttgcggcgggaccaacgtgcaaggaagtcctcctcactcattcctgtcgccttcttgatcgcgccgtgccaacgcctccgggtcggcgcggcgccgcttgcgcttgacgaattcccgctccacatggcgctcggcgacgaatctttcaattgcttcgcgcagcgcctcgggcatcggcaccgcctcgacgagattgtcggcggcttcggtgaacccctcgccctctgcggggtcggcggtcaccgccgtcacggcatagggccaggcgccttccgcaggcgacagtacagtccagatgctcggactgccggagacgagattgtcgcgatagcgtgccgtctcggacggatagagatcgacggtcgcactgccggcataaaacagggtcgaaccgtcctgctcgcggagcacggtccagggttctgtcgccggctcgtccggaaggaccgcgatgccgcgccagacgaaatcgacccagggcgaggtagatctgcgccgctcgaccacgacaccgacggcaatcgagagagacggcgacgccgcggagctcatgtcgccatctccagacgcttcaccggcaatcctatcaacagattctgcggtttcatccgaagcttctgatcgggcgtcatcgacaggatcaggtagaccggttcaccccggaggtcgtcaagcgcgcagctcgaatcgaggaaggtcagccggaacagcgcgagcacacgatcagtgtcgcgctcgcctggttcttcgccgtgccacagacgatcgccaagcctggtggcatccgcatcgagcccgacataccaggtgaactttgcctcatgcagcgcgcgcagcggctcgatcacgacctcgatgccgagcagatgggagacccagcgcgtcatcgcctgcgccagcgccgccggtccgcggccgccggccgtcaggtcgagggccagatcgaactggtcgctgcgctgccaataggcctcggcattctcctcgctgagcacgtcgaccacaacatcggtggtggcgcccagcatcgacatcagggagagcaccggggtcgggctccggccaccgacgatctcctcgtcgccgagcaacaaggcgtgctcgtgcggcaggattcgctgggtccggaagaacaattcggccgcacgcagcacgaacgggtcatcgcagccatcgagagcgttccgcaggatgacatgcgagagctggttgacgaacagcggcggcagatcgttcgtccctgatcgcaccgaggcaagatacgcggcctcgagcgtcggatgccgcagcaaaagatcgcgaaacgcgagtacgaactgccagttctcccgggcatccgcatcgacaatcccggcgatctcgtccttaccgaccgcttgtcgcgggtgggcgagcaattcgcggtgcagccggcgttcgaccgggcacgcgtcgtccggcggcatcagctcgggacgcgcaaaataggccttgaggaattcgtcggtgacacggagcccaccgccctcgtcgcggtcgagcagatgatggccgcaggcaatccagaaatcgttcatctgaggatcggcccccgccccagttccgcgagtttgagctcgtggtcaggctggacatcgtcgtccaactccatgaacgagaacgccttgctatgcccctgcccttcgcgcagctgcaggcgacggaatgactcgcggacctcgccgtcgctcgatgtgcggtgcactgcaacaagagagctgatcggatggctacacagcgattgtgcgaaagcgacctcctcttcggcggccgtcttcgccgccgacatgtcaggcgcaccgaagcgctcgaccagttgccgcgcaaggagatcgaccaggctgcggtagtcgtcttcggtcgccggaacgatctgcgccagcgtcgaccagccccaggactgcaccccgaggaagccgccgcgaaacgccgcgcgcgccttgccttccagcttcgacccgtcacaatcccaaaagcggaaagcaccggagacggcccattcgcccggttctgccgccacttcgaatacgaaggtgtcggagggatcgagtgcgatcgtacgcaggagcttcatgagcgcggtcctccgagcgccgcatcgagccaggatggcatcgcaagcgcctgcacgagatcgctccgctcggtctcgtccgtaccgaggcggcgcgtgagcagatcgccgcaatcatcaatgcgctgaactgtctgcctttcacgcggcatccgagcgagatagtcgcgcgcgacgctgtcaaagccatcgacgcgccagccgtcgagcgctagcatcaagtggcgggcaaagctctccgtgatctgcgccgcgccagcctcgccaaagccttcctgatcgagtgccgaggccagcgggtgaacgccgggttcatcttcgttcatcgcaacagtccggatcatggctgcgaataccagccagcgcggcggcgcatcctcgtcagcggcaaaaggccaccccatccgtccgccgccgaccagtcccccgtcgatcctgaccgcatccggccagtcgatcgtgatcggcttgctcggcggcgcataggcgcgaagcgcatcggtcagtgcgaccatgccggcgtagaacgcgcgccgcgcgctgcgcaacggctcgaatggctccagcaccacggcgaactctgcgaggtcgaaacgacctacatagacgagtgttccggcgccgctctccggcgcaatgcggcatgcatgggcgaaagcgtcgccactctcgcgcagccgcaccaatgtgaacggcggcggcagatggaccggttccgccagggaaacatgactcactggggtcgacggcaggccgtcctccgctttccttttcttcccgatggataatgtctatacgagacgaagggtcggcgcgagtccgtcgtcggcatccgaatggcggagggattaacctggagcaaccagcgaagaccgtcctgatctgctcgtgcgaagacacgatgcgtctcgacgtggccgcaatgcggcgcggatgccccggcagcgaggtcaagagctttcgccatctctgtggtgccgaactcgatcatttccgcaagattgccgcgacagacggcgcgttgaccgtcgcctgcacgcagcaggcggcgcagttttcggaagaggccggcgaacgggccgatgcgatcagcttcgtcaacatccgcgaaacggccggatggtcgaaagacggcgcacgagcaggtgcgaagatggccgccctgctcgcatccgcctccatcccgtccccggactatccgctcgtcaccctgtcgagcgagggcgtgatcctgatctacgggcgcgatgagaccgcgatcgaggccggccgcctgcttgccgaccatctcgacgtcacggtgatgctgaagcagttcgacgacaccgtgcggccgactgcaacggccttccccgtcgtcaagggcaggatccgctccgcgaagggacatttcggcgccttcgagcttgcgatcgacgactatgcgcgtccccggccctcctcgcgcgagcgcttcgtgctggatccgccgcgaagcggagtcacttcgcgctgcgacatcgtgctcgacctgtccggggatatgccgctgtttcccgctcacgacctgcgcgacggctatctgcgcgccgacccgggggatcccgccgcgatgctgcgcgccgtgctgaccgcgcgcgatctcgtcggcagcttcgacaagccgaaatatgttgacgttgcaccgacgctctgcgcccattcgcgctcgaaacgcaccggctgccatcgctgcctcgatctctgcccgaccggggcgatcacgcccgtcggcgatcatgtcgcaatcgatccgaatatctgcgcgggctgcggccaatgcgcggcggcctgcccgaccggcgcgctgtcctacgcgctgccacccgccgatacgcagcttcagagacttcgcgccatgctgctcgcctaccgcgaggccggtggcgcggatgcagtgctgctgtttcacgacggcccgcacggcacgcctctgatcgatgccctcgcacggcatggcgacggcctcccggccaacgtgcttccctttgccgtcaacgagcttacgcaggtgggactggaagcgattgtcggtgccttcgcctatggcgtatccgctgtgcgcttcctgctccgtgccaagccgcgccacgacatcaccggactgtcacagacggtcgcaacggccgatgcgatcctcggcggcctcggctttgagggccggcgcctcgccaccatcgaaacggatgatcccgatgtgctcggcgagcatttggctgatatcgagatgctcgccgccgtcgcgctgccggcggttttcaagactgtcggcaagcggcgtgacctcttgcgatttggcctgagcgaactgcatcggctggcgccgaagccggtggacgtgattccccttccccggggggcgccggtcggcgcagtcaccatcgatgccaacggttgcacactgtgcctgtcctgcgtctccgcctgcccgaccggcgcgctacgcgaggatcccgagcggcccgtgctgaagttcatcgaggatgcgtgcgtgcaatgcggcctgtgccagagcacctgtccggagaaagtcgttgccctcaagccgcagattgacttccgcgcgtcccgcgcgcccgccgtgatccttaaggaggaagaaccg

SEQ ID NO: 296 - DNA, 2894 bp, Bradyrhizobium colbertium
  misc_feature (673)..(717): n is a, c, g, or t
atcttggccttctctccataagcatcgtcatcatcagttcgtgcgacgatcgtattcttaactccgtaaagcgggtcgccgaggggcttgatctttctctaagcggagtgattccgaagcccctcaatctcgagcgcctaaaagaagctcttcatctaccgcataagaccgcgatggtaggcgggagcgagagaggtacggtcgacgtcacagcggataaaatcgccgctggtttggcaggagacgagttcttcgtggagctccagccgaaagtcgatcttgggagtggaagagtcgtcggagcagaggcgttggcacgctggtgcgtgcccggacaaggcttaatctcacccgtcgatttcattccggtagctgaacgctctggcctcatgccggacctaacggatcgtatcctttcgcgggcaatacgtggcggccgaaagctggtcgagaaccatccggaattcgcgatcgcggtaaacatttcaggctccctaatgtctgacttgaccttgccagagcggattgaggacattcttcgcaacgagagcatgccggcgacttccctgatcgtcgaaataaccgaaggggccgcgatagccaacgtcgaaaaggcgatggacatcttggtcagactgcgactcaggaacatcggagccgccatcgatgattnnnnnnnnnnnnnnnnnnnnnnnnnnnnnnnnnnnnnnnnnnnnnggcgcgacttcccttcaacgaactgaagattgaccagtccttcgtcaaaggtgctgaagccgatccggacatgatcaagatcgtgggagcctcagtcgccctcgcccgagcattcaatatgaaggttgttgtcgagggcgtcgatagtccacaggccctcgcaagagtgcgccacgctggctgcgacattgcccaaggctatctcttcgcagggccattgagtcccgatcacgctgaagactggattgtgcagcacaatctgacctgtgaaggtaaatttgtaggcggctggccatcgcactcaaggggagtggtatatgcgtaggtctgcccggcctcatccgctgccgtaagaatacgggcccgatagtgtctgaggaaaaatgaggttccgcgttcggaactacttaacggtgcggtgcttctatcatcggcgtattcgagcgtcgttcgtcgatcgcgtcactggatttgaacccatatgtctgcaaccgccatagcacctgaagaaacgcttattaccgagcttgagtgcgctgtccgcagtggctcttcagaagttcgcgtcaacaaacttcgtcaggttacagctctcttccttgctggctcgaactcactgacagacgagcaggtcaaggtctttgatgacgtattgtgccggcttatggccagaatcgaaacccaggcactggctgagctcagccattcccttgctcctgtcgatcatgcgccgatcgagacgatcaaacggctcgcatggaatgaggccatcgcggtggcagggccggtgcttgcaggttcaaaagggctgtcgacgaccgatctgacggagatcgctcaggtacgggggcaggcgcaccttgttgcaatctcgaagcgggacagtctggagtctgcggtaacggacgttttggtggatcgtggggatcgacacgtgctccatactcttgctcagaatgtcggggcaagattctcggatgctggttattccattctggttcaaaaggccgatggagacgacatcttgtccgaggcggtcggatcgcgtcgggatattccagcccgcctgctacgagacctcctaggacgcgcgactgaagcggtgcgggccaagctccttgcactggtccctccggagcagcgtgagcagcttgcgcaaattctatcaaacctttcggctgccatcggtggggcaaacaaagatagtcggtatgacaatgccgaaagggcgattcaaagcctgcggaaggcggggcgtctgaacgagacaactatccgcgactttgccgcagcgtctcagatccctcaggtgatcgtcggtattgccgttctgacttcatcgaaagttgacctgatagccgagatcctgaccggcgtgcgaaacgatgccgtgcttgttccctgcaaggcagcgggtctagggtggtcaaccgtcgagttaatccttcgcaatcggctcgaaacaaggccgctgccgccgaaagtgctcgacctggcaaggaacgactatcagcgcttgtcggttgagacggcgcaaaagacgttacggttcttacaggttcgagcgactgtcaggtaagagaagcggcggctcgcaagagagtccgcgacctcggaccctcgatcgcattcgttggcaagccacacgcgccattgcgcaaggatattcgtctcgccagaggcgcgtgtcttcggtgcttcggtgtgatcaaacgcgagctgcgccattacccattacctcgctatcgaaccgatcgtccatcacttgaaaaacgacggtccgtcgcggtcttctcgccttctctcgtttcgttgctgtactgtactgatcacaaccaagtaggtagttcgatcagcacgtcctgtgcggcctccagcgatgccgctggccgccacaaagccctcaggccgcgcgcacagagtccaggaactgcgcgacctcgaccttgaggcgggtgctgtcattggccagcgacttggcggccgagagcacttgggtcgaggccgaaccggtctcgatcgcgccgcgctgcacgtcggtgatgttcgaggacacttgtcgtgttcccatcgaggcctgctgcacgttgcgcgatatctcctgggtcgccgcgccctgctcttcgacggccgccgcgatcgcggacgacacctcggacagcttctcgatggcgctg

SEQ ID NO: 297 - DNA, 16020 bp, Bradyrhizobium colbertium
  misc_feature (779)..(788): n is a, c, g, or t
  misc_feature (1173)..(1182): n is a, c, g, or t
  misc_feature (2332)..(2341): n is a, c, g, or t
  misc_feature (5696)..(5705): n is a, c, g, or t
ccggaaggactccgcgccggcccctaagccggacgatgtcgaaggcgctgccgtggaaagccacgcatgaccgaagcagcccagaagatgagacttcgggtcggcgggatggactgcgcggcctgcgccacgaagatcgagaacgccgtctcgcgaatgcccggagtgagaggcgtcgaggtctcggtgaccggcggaagcgtttcggtcgaacatgagggggctatccagcgggagacggtcagccgccagatcgcggccttggggtacgtcgtcgaggacgaacgccccaagaccaaggaggagccggcgcaccatcatgatcatggcaatgatcatgatggtcacggccacgaccatcacgccgcctccggccgggaactatggtggcggtcgagcaaagttgacgcgacgatcgcaagcggaacggcgctggtggtcgccttcgccttgggaaagggcatccccagcattgagagttgggccttcctgcttgcgatgctggtcgggctggtccccatcgccaagcgagcattttcggcggccttcgccggaacgccgttctcgatcgagatgctgatgaccatcgcggccgttggcgcggtcttcatcggcgcaacggaagaagcggcgactgtcgttttcctgtttctgatcggtgaacttctcgaagggttcgctgcgggtcgggcgagggcgagcatccgggatttgaccaagcttgtcccgaagatcgcccgtctcgaagactccgatggccaagtcagcgaggtggaagnnnnnnnnnncctgatccaggttcgccccggcgatcgcattcctgccgacggcgtcatcgtctccggagacagcgccgttgacgaggcacccgtgaccggcgagagcacgccggtccgcaagaaggccggggaggcagtattcgccggaacggtgaacggagaggcgctgctccggatcaaggtcaccgctgccgcccaggacaacaccatcgcccgcgtcgtcaaactggtcgaggaggcccaggaatccaaggcgcccaccgagcggtttatcgaccggttctcgcgctactatacgcctggcgtagtggtggtcgccacgatcgtagcggtcctgccgccgctcgtttggacaggcgcaacctggcgcgagtggatctacaagggattggcnnnnnnnnnncatcgccgcaagcctcgcatccggagcccgtaggggtctgctcctgaagggaggagccgtcctcgagcgtttgcgcgacgtcaccgtcgcctgcttcgacaagacgggaacgctcaccgcgggcaagccaaaggtcacggacgtcgtcgggttcggtcacggggaggtcgaggtattatcggttgccgcgtcgctcgagcgcggctccagccatcctctcgcggtcgccatcctgcaggcggcctccgacaagaacgctcggccgcagccggtcgaggacttcgtaaatctggcgggagaaggcgtcagggcgaatctcgggggacgtacggtcttcctcggctcacccgctgcggctgaacggatcgtcccgctggccgaagaccagcgaaagctcgtcgaggcgctcaacgaacggggcaagacggtatcggtactcgtcgtcaatggcgagatcgccggctgcattgccatgcgggacgagttgcggagcgatgccgtcgccgcgctgcgtcgcctggccgactccggggtccgttcggtcatgctcacgggcgacaatccccgtaccgccgcggcgcttgcgcgcgatctcggcatcgaccatcgcgcgcaaatgatgccggaggacaagcagcgcaccgtcgaggcgtacaagaaccagggtgaggtggtgctgaaggtcggcgacggcatcaacgatgcgccggccctcgccgctgcggacgtcggcgtggcgatgggtggcggcaccgacgtggcgctcgagacggcggacgccgcagtccttcacggacgcgtctccgacgtgccggccatgatcgagctgtccaggcggaccatgggagtcatccggcagaacatctcgatcgcactcggactgaaggcggtctttctggtcaccacgatctcggggatcacgggactttggcccgcaatccttgccgacaccggcgcgaccgtattggtcaccatgaacgcgctgcggctgctttcgataccgggcagcggtggggcgggcgaggggacgtccgcatgaccgccaacggggtccaaaccggcgaccgcgacctgcgcctcgacctgtttcgtggactggccaactgggcgatcttcgttgaccacgttccgaacaatgcggtcgcctggnnnnnnnnnngctgttcgtgttcgtgtccggatatactgccgccttcggcattctcggcagagcctggcagctctacgtcgcctacctcctgcttttcgtcttctacgtcgtcacgatcggatacgtcgcccagcggtacggccacgcccacctgctcgacgagttcaacatccggcttctcattcgggatccggtcgagttcctgaagcacggactcctgctcgagtacaagccgctgaacctcgacgtcctgccgctctacattgcgttgatgatcgcgtttccaccgctgctttgggttcttatgaggtggcccaacgtcgcgctggcgatctcggcaggcgtctacgtcgccgcacagacctggggatggaatctaccggcgtatcccgccggccactggtatttcaatccgttcgcgtggcagtttctgttcgtcatcggtgcgtgggccgccgtcgggggcgcgggtgcggtaagggcgctcatcaactcgaagacaacactcggtgccgccggcttccttctcctgttcgccgccatcgtcacgctcgcggcgcggaccggcaatcataacctgatccccgaatccgtccgctcggcgtttattccgaacgacaaaacgaatctggcgccgtaccgcatcgtccattttctcgcgctcgcgatcctcgtctcacggttgattccgaaggaggcgccgttcctgtcggctccttggcttcggccgctgcggctgtgcggagagcgatcgctcgaagtcttttgcgcgggcgtattcctggcgttcgtcgcttacttcgccatcgacctcgtctccgagtcgctcgccttccagatcgtcgtcagcgtcgcgggcatcggcatcatgatcgccgtcgcctatttcaagacatggacccgggactatcgcgccgcaaccggccgaaagacccgtcgagcgcgacattcagcagccacgactggcacgaagggagcgatgggatggttttcgatcaataccacgaaccgccgcaggagctttcgcaagaggtccgcaccttcgcgcggatgatagcttcgctgatcgaagaagccgaggccatcaatcggtacgaacagcggatgtccgtcgaaaaggacaagacggcgaaagccatcatggccaacgcgcagaaggaggagttcaagcatttcggcatgaacctcgaattcctgttgcgacgcaagaaggagtggcgcgaggagctcaagggaatcctcttcacgcagggcgacatcgtcaagctcggcgagaaggccgagaaggcagtcgactgatcgcatgaccgccggagcagccggaatggaacgacgtggagaccagcgccggagggttctcaagaagggatcgatcgagttcggaagctccgcgatcgattgctctatccggaacctcagcgatcggggcgcgatgttggaggtcgaaagcccgctcggcatcccccgtgatttcacgcctgtggtgccggcggacgggacacggcgcgcctgtcgggtcgcgtgggttaaggagaagcggttgggcgtggagttcgaagagtgtgggtaatccggcggtggaggcgcagatgaggaagcatgcggtattccaggcgctcggaagcatattgggtttgatcgctatagtaggcgccgtcgaagcgcggggcagcatcgcgagcgagcgtccctatgccgctgagcacatcgatctgctcccagccgatatccgtcacggtctgatccgtctggagcgtcaatgcggcgggaaagccgcagcgacgcactacttttccaccaccatcggagccggcgggttgcacttcaggtcgctgcatttcgaaaatttcgcctgcgagcagcgagaggcgatctgtcgggccgatcaatgccttcatgaagtctacctggaacgggccggccattcgcgccgggtcttcagcgcctatgtcgacgacataaagctgatcaacgaggccgggatcgtcggactgcagttcgcgggagaccggccggctattctacgttggaacggacgcacattcgtgcccgttcattcattcggaaagggtgtcgagcggtgacgacgtcgatcatctcccatcttcacttcggtggcgctgatatctccctctggaagaggttccggctattcttcaccgtgggagtcgttgtgctgcttctgagcgcagcgaaggtcgcggtccactacttcggactcgagttcctcgatctcaaccgtctgctgaccagcggcatcggcggctccgtcttcatcgtcggctttctgctgtcgagcatccttcaggactacaaggaggcggagaaaattccggccgacctcaggaattccatcgaggccatcgacggcgatctcgcgtgcttcgcgcagaccaacgatgccttcgacctacaaaaggctcggcagttgctgctggccgtcatcgacaggcttcgcgagggtctcgggcacaaaaacggccacaaggacgttcctcccgccctcgatgagctggccaagctgacgccgatcttgggtcggctcgagagcatgggtatggccgcgaatttcgtcgttcgcctccggacaaatcaggacgtgatccggagagccttgctccggatctacaccattcagcgcgtcgagttcgtgccgtccgtccacgttctggtgcagaccctcgtcgggtcgatcgtgctccttctgctgctgttgaagaccgagggcgatcccgcttccgcgctgctattcggcttcatcacttacatgttcgtctacgtcctctacctcgttcggctcctcgaacaacccttcgccaagggacacggctcggtggacgacgtcagcttcttcctgctcgacgagctcgagcgaaacctccgccgagcgctagaagatccggacgaccgcgcgcagaaggcggctacgaccggagattgagacatgcacggaggaggaaccgtcggaacggctggcgccaggcacgcgacgaggctcgcctgggcgctcgcactgaccgcgacatacatgattgcggaggtcatcggaggactggtgacgggcagcttggcgctgctcgcggacgccgcccacatgctcaccgacgtcggtggtctcgcgctggcgctgctcgcgatccgctttgccgcacgcgaggcgacgccgcaacgcaccttcggctacctccggatggaggtcttgtcggcattggccaacgccagcgtgttgctgctgctgaccgtctacatcctgtacgaagcctatcagcgcttcctatcgccacccgaggtactgagcgggccgatgcttatcgtcgccgctatcggcctcgtcgtcaatctggtcagcatgtggctgctctcnnnnnnnnnnggtgacccacatcctgatggaaggaactccacccaacgtcgatatcggcgccatcgaaaagcagctactcgccattccgggaaccgtcgccgtccacgatctgcacgtctggaccgtgacgtccggcttcgacgccatgagttgccacctcgtcgtcgccgacatgtcggccgggcgtgcggcgctgcgggcggcccgcaacctgatgaagagcgacttcggcatcgagcacacgacaatccaacttgaggacgaggccatgagagccgaggagaccgtgctccatgtctgaggcaggtgatcgcagcgccggcgccgccgaccatgactaccggcgtcatggccgccatgatcatggcggcgagcagcatggccatgatcacgatcatggcgggcttgggcatgtccatgctccggcgagcttcggcaaagctttcgccatcggcatcgggccgaacaccgccttggtcgcggccgaagccgtctatggctacctcgggaactcgacggcgctgctggcggacgccgggcacaatctgagcgacgtactcggcctggtcgtggcttgggccgcgtcggtcgcagcgaagcgggcgcccagcggtcgcttcacctacggtctgaagggggcgtcgatcctggcggcgctcgcgaacgccgtgtttcttctcgtcgcaaccggcgccatcggctgggaatccatactccggctgtacgaaccggagcccgtcgccggcctgaccgtcatggtggtcgccgccatcggcatcgtcgtcaacggcgccaccgccatgctgttcgcgagcggacgcaagggcgacatcaacatccagggcgcatttttgcacatggctggagacgccgccgtttcggccggcgtcgtcgcgtctgccgcgctcatcctctggaccggctggctgtggctggatcccggcatgagcctcactatctgcgccgtgattctttggagcacctggagccttctgcgtggctcggtcgcgatgtccttgagcgcggcgccagcagggaccgacatggatgccgtccgctcgtttctgctgcagcgcccgggggtctccaagatccatgacctgcacatctggccaatctccacgacggaaacagcgctcacgtgtcatctcgtcatgcccgccgggcatcctggcgacgagttcctgatggagtcggcccgactgctccggacggagcacaagatcggacacgcgaccctgcagatcgaagtcgacgagaacaacgcgtgcgcgctggcgcccgacgacgtggtttgacgtggatgaggccgagaacaagctcgagcgcctccatcgtctcaagtcggcactcgacatcgagatcggcggaggaaaagaaagagggagggtggcatgcccgaactgtccgcacgacggcgactggcgaaccgaggtcggcggttgggttttttcctgcgaggaatgcggtgtgcgcctagacggcaggtttcccgccagacgcatcgcgaattgagggcggtcgtgacgaaaacagctcggaacggcaatcggtccacggagagaatcgacaccggaattcttgcgaagggactgaggttgctttttgcggcgtccagtctcctgatgctgtgcttgctggcttcgccgtcggccgctcagacctcacgtgagttcgcgcgggaagcgttcgcggccaaggaccggaaacagtttccactggccatccagttgttcaacgaagccatcaaacaagggcaattcactccggaacaacgtggctttatcctgtacgggcgaggggtctcatacgacgcgctcggtctgcgcgatctcgctctgggtgacttcgacgcggcgatagcgctgttgcccgacttcccgaactcctacgtgtatcgcgcgctagcgtggagcgatcgacgggagttcgacaaggcacgtgacgatctcatgcaagcccttcggttgaatccgaccagcgcgctcattcacaacaatcttggatcggtctacgaacgcaagggcgaggtggaccgggccatcgaaagctacgaagaggcgatccggctcgatcccaagtcggcacaagccttctacaaccgggcccacgccttcatcgcgaggcaggactatcgggccgcaatatcggactacgaccgggcgatcgaactgcagcgcgacttcgcggacgcctacagcaaccggggcggcatgtatctcctgctgggcgacactgacaaggcgatcggggatttcgacgaggccatccggctcaagggcaccgatccgattttctggtcgaacagggcgagcgcctatatgacgatggggcgctacaaggatgcgttggccgatttcgaccgcgcccaatcgatcgatcccggcaaccccgcgacctatctcgggcgaggaagagcgcggctctattcggacgagatcgcgggagcgatcgaagatctgcgtatcgctgcgaggttgaggccgacgaacgcctttcccgccatctggatgcacatcgcccgcattcaccagggcaacccggatcgagaggaacttgaacgcaacgcggcgagggtggatcgctcccagtggccgggtcaggtcctagacttctacttgggcagactcgacatggaccgggtgcgcgaaaatgccggcggcagtgcgggcgccgagggcgaaaggcggctttgcgaggcggacttcttcgtcggtgagttcctgagccatggccgacagaaggatgatggccgcaggatgctgcggaccgtcgtagatcggtgccggccggtggacatcatcttcgccgccgcgcaagccgagctgcgcgaggaaaagacttcaaaataggagcccgcagccgttgcgtttttgcttcgtcgttggttattggcgctgatagcgttgtcatcgacggcgattgggattttctgcatcgtgcatttcccgagagcctgtcgctcaccctcattggtccgctcggcgctacagctgcggtgattgtcaccttgttcggctaagctcggctctatccatgccggtggcaagaacggccggcgtggctcttctcgccatgccggcggccagtcaggatcgactggcccatgggcgccttggttcggtggccaagtcgcctagctacttgcgaccttcgtgctgccagtgcgccgtgacttcgtcgcctgatttggagagatggacgtgctggtcgacatgatcgacccaggacacaggaatgaagtggtgatggtcgccgtcgggcgagcactgcttcgtcagcttgatcttgtcggtcccttccatgtggtcgaccttgccgacgattttcttgtcggacgagatgacatccatatgttccttgatctgcgtcgtgcccggcatcggaaagcctcctatgaattgaacagtttgaaacgcgcggatcgatgcaaagttgcccgacggcaagtgcccggctcgatccttttcccttgcgttcgcaaccgcagtcgtccgccgaagggaacgccacgacgacgtgtgacttgggtaaacactggagaaagggaattgaagatgaagaagcttggtcttttggtaatcggcttggccgtgtcgttcgccctgccggcttcggcggagacggtgattgtgaagaagggacatcatggtggacatggcgcgcgggccgagatgcgcgggtaccatggcggcgacatgcatcgcggcatgaggatgcacggcaaccggaccgtcgtcatcaagcgcgggcacggccatcgctattgaaacttcgcgcgacgctgggcggcgatgtcctccaaacatccgccagacggtcgatcgaagacgaaggccgccctcgggcggccttttagtttgcggtgctacgcgatagagcggtgggctgctcagaactgcgagcgcacgcgcacgccgaagatcgacgccggtccgcggtcgcggttgtatcccgggttgacgacaagctggtagtccagcgtcgcgcgccacgaccacattgggaagctgtagtaggtttcgaggatcttctccgggccggagttcggcaggcgaccgtcgccgacgagaatgccgagacctccggcatcgagatacgtccggcgggcttgcgagatcccgttgaccacgccggcgaggccaaacgtgtcgttcggcctgttccaggcagatcccgcgagcgagaggcccgccgcgaccgtcgtatcgatgtcggtgaattcgtaggactccttggtgccgtcggcgaggccggctctagcgaagacgccgagatctttcgtgacctcctgctccaaattgacgctgatgccggcgcggctttggtaacgccggaccagcgcggcgtcggtggcagtgcccgtggcctgcgcgagggccacggcgtcatcgaagcggcccatgcgcctgcgcgtcaagaaccccgtcacggcgaccttgccgggcttgccccagatttcgtggcgatgttcgatctcgccgatccattggaattgcgagaagctcggatccaattcggtgctgttgggaacgatcgaaaggtcgaatatgctgccgcggaaggtccagtcgcccttgtaccactcgagggaggcgccgtatgtgaagccccaggcgtcggccgcatagtcgaacgtgccggtgtcgataaccgaccagttcatgaaatccttgcggggatcgtgggcgtacctgttggtgtcgaacacgtccgtgaccgcgaactttccgacggtcaggacgacacggtcggtggtctgcgtgccggcgaactggttgatgtcggcgtcgaccttcttggtctctccgccgagatcgaaagtctggcggaagaaggcgcgcggaatgcgggcgtagggcgctgcggccccgaccttgtaggcctcgccgctcgggaagcccgcaacgcccagggtcgagctcaagccgaatccctgatcaatctccggattgacccagaactctccgccggcccaaggtctgaagccggcgtagagcgtcacgtcccaggtctgccgggtctggttcggaatgaggctgttcgtcccagtgtagggcgagcggaatggggctgcgtactgctgcagataggtcgtctgcccatggatgctgaactggtccgtgtcgaacggcgtcaggccgtcttgaagggccttctgtccgttctgcccgaagcggtagttgacggcgaggcgggcggtctgcacagcgagatcgaaggacaggcgctccgtgccgctgaacgctttctccttcgacccgaagtcggtgtagagataatcgaaccgcgccgaccagttcgccgagagcgcgacttcggcgccgacaccccatgctgtaccaaggcgagtgaacccgatcttctcgcccagagtgccgtcgggcggaccgagcgttgcccggtcgtagctccatgcgaggccgccggtggcgtagaacaaccaggcgccgggcgagtacccgaggcgtgcccgcagcgtgcctgaggtcagcacggtctcggtgagggatgcggaaccctgcgcgcccaggacgggagcggttccggaaatcgtgttcgggaaggtgagatcgccttcgacgcccaggaccacgcgcgagggcagcatgtagttgtagccggcgcccagtccgattgcgtaggagcccgtccctttcattgcattgatggagttcgacaggtcgatcgatccggacgacggggcctgaccctgatccggcgaaggaatactgggaactacccatgccataggcaaaatggctgccgacgaaggggccgctccaatccacggcttcgccggcaccgcccttgccgaagtcagccgaaaatccctctacggccgtgcctgccgccaggattatgcccaggaaagccgttttcatcgcttcaatcgtccgcctctctggaaggtattcgacacagctacggaggcttggcaactattaagttccaggccgtgtgatgccgacatcatgtcgaggttggtcgcgttcggttcaattgcatcgcggtcctccggaggccttccacgattttctcaggctgagaccgcggcaaaaggcgtaaatgcgcttgagatagagaccgctgctctctgtaccttcagcgcgacgagcggcgatccgctgtctgcttcgcgcatcacgaactcgatggcgccgacggcggactgccccctaagccgggggatcgtcgtccaaaaaaattggaagccgactgacatcctggaaccaaaccctagccttaccacttataggtttataagcgcatgcctcaggttcgccgccaaacggtggtcaataaaggtggcagcctcttcgctaggcgcgttgcaaatgcgatcgtggggtgctggcgatgacgcgcatcgctttcctgaagtcgcaccgaacttgggaagattatcttggcatcttccttggtatacttattgtaatgacccccttttttattgcgggcgcaacgagaggccacgtttggcacaattcattcctggaatttattatcgggagaccaattaaccacgccttgatgctcaacgcgttggtcgttggtcttgtagtgtttatcttcgccacctttgagctgactcatcgtaatcgctgggaagaagtcggccaggtcttggcgggaatttggctgatggcctcgccctttgtgctcagttatgccgcaactggccaactgagatggtggcactttttcttaggcgcgctggtcgcgctcctcgggttttatgagttctggcaagactggagactgagcgacgaggaattggcgcgatacgaacgctagtctagcgccttggtctggatagacgctgctgcttcgcgatcgcaagaaaagcccagttggagactcgggggttttgtgagtcgcacggactgatcatttgcacttcatcaggaaggccgtcgaggtcagtcgtaagcatgctagtctactcgatgagtctactcgatttttcggccagccgggaaagtagcggtcaccggataatgcgtctgcggcggctgcaatcacgacaaggacgactgaagttctcatcgtgcgctctcccgcgccaaggcgaatgaaatggattgccgacgaggcccttcatggtggcaacggcgacgcggtaattttgatatgcttcttgttcgctggagtcgcgcctgcgtaacgttcgcttgcgcgtccacccatcgcaggcggagtggttaagaggaagccggtgaaccgtgcctcgggcgcggaattccggcgcttccccgacaactgtcagcagcgagctgcttccggacaatcgtcaccggtgcatttgcatcgggaagacgggagcgagcgacgagctgcgagccgaggagatctgccgtgaatacctgaacgtccacgggcgaggtgtaccggcggtcatttgcatgcttcgccggtagccctctgctggcgattttgcagcgtctgtgggtacctcagcaacctcggcattgcggtttgtccgattctatcttaatatactgatattgcagcagtatttcgcataacatagattttggaatttattcctagccgaccagtccatgaggcgcggcaacgccaaaagttcccaatcagcttgggacaaagggagggaggcccagcagctggccaggaactttaggggcgtttcgtttatttcacttgttgcgtttatttcgaatatagcctatacaaaaggccgtataggggagaaaatacgatgacgatgccagcctacgctgaagagctgggaggtactcgcctgccttccgcgagcgagaaggcggcagccaaccagcttcgtcagatactcgcttcgcatgcgacgggagatgccaaactgcgagtgctcgacgatgcacagcaggctgctgagataaccttgtcgccggccctgtcgagtctcttgatggaattgctgcggcatatcggtcgcggcgatgcggtgacgcttgtgcctgtgcatgagatgttgactacgcagcaagctgccgacatcctgaatgtctcgcgtccgtttctggtctcgctgctcgagaaggacgaaattcagcacgtgacagtggggcgtcatcgcaggattagggcagaggatctattcgcctataagcgcacgcgtgatgaaaagcggggcaaagcgcttgcgaatctcgctgagcaggacgcggagcacctgtaagcttgtttgcaaaccgcttcaccgcattcgtcgatgcgtgcgcgcttgcaagcgagctcaaaaggaatctgcttctctccttggcggaggcggaattttttcgtctccgctggtcgagccccgtcctggatgagtccgaaacagctatcgaggaaattttgaccggcaagggcttcgccgacgccgcggcgcgcgcagagcgggcgcgcgccagcatggaagctgccttcgaagacgccatggttacagattttgataacttcttgccggttgcggcgggtctgcccgatcccaacgatcaccacgttgttgctgcggcggccaagacggaagccgcaatgatcgtaacggaaaaccttaaggactttccggcggcaattctttccgacctgaacatggaggcgaaatcggccgacgctttcattgcggatactatcgcactcgacgaagctcgcgctgttgcagccattcggcgtatgcgcgaacgcttcaagaaaccggaaatgacgccggcggagctcttgctcgtaatggaagctgcgggactgattgagacggttgacgtgctaaggccgcacgtggaatccctctaggtcagtagccaaccagacgggcttttggcaacgcgatcttgatgcaaactcgacttcggatattccataatgagtattatgcgaatcaatcaacgatgcgaactcacatcgacgcccatctccccagatcagccggacctgcattgatgcgatgtcgcatcctcggccaaactgttgcgcctcggactcgatgatcaggcgccctgtgtcccccgttgcgcaacgctggaacagggcagcgttgcggcaggatgaaaacagccgctattgattttcgacataatggcatcaaatggatgacgtttaccaagggtctgcttccatgtcgacggcgtggttttttccgacaaccgtgtcttagcgggtttggtcgattagatatccgactctgcctcaactcgctaaaaatgtaataccttctataccctggaaatgaggtgccgttgatcgtactcggcaacgaatcccaggcgctgttgcgcgtgcgaaaggtcatacagcggcgcaaacggctgccgtctatagacctccggactgcggatctcgacggcgctcccgtgcagaagacgcaaccgatcaagcgttggctcgggtgaaagcgtgacctgcgacgagagatagaatttctcgaagccgcctttcggcatcctcatctccatggcgagacggaatgcgcgggcgagatcacgggcatcgatgtgatggtgaagcgggcctcctccggccgatgacggccccccggccgctggcccatgatagttctccggatccttagcacgggcgacaatctccggtgccatctccgggtaggcgacaaagaccgtccggagagccacgaccgacattccgcgcaatgcgtaagctcgggagagatcttcgcccaatatcttgctgacggcatagggatcggtggccagcaacggatggtcgagatcgagtggcgcatagagtggctgcaacatgcgaccttcgcgcaccgtatagcctgctaccgaatcgctcgaacagaatacgaagcgctcgatccgggcggcctcggcagcctcgagcaccgtgtaggtaccttgcacgttgacacgcatgatggtctgcccgtcccccgaccagatattcggcacggcggcgatatggagaacggcctcgacgtcctttagcgcgtcggcgaccgcaactgcatccgtgacatccgcgacacgccagtcgatatcagccttgccgcgtcggcgatcgaagccgcggacgcgatatccactggacaacaattcttcgacgacaaaccgaccgaggagtccggccgccccggtaaccagtacaagctttgtcatgacgggcgtcccgtcgattgtggcggaaagcctacttttgccagaaggtgatggctctgagggatcgcggtccccggatcatccgcgaggatctcgagcatcgttggtccgtggtagccgatctccttgagggcggcggcgacctcagcgaacggcaccgtgccggtgccgatcggatcatgacgccaaatcttccgtaaccggtatgagctcccacgtccggg

SEQ ID NO: 298 - DNA, 2663 bp, Bradyrhizobium colbertium
cccggaggaatttgaagtgacccgcggggatgatgggcggccatgctcttcatccacgccatctcggggtcggcgtccatcatgccctccatcatggacttgttcatcttgtccattgccgacattgcgtccttctggaaagggttcatgttcttgtccgacatgccctgcatgcttttatccgacatgccctgcatgctcttgtctgacataccttgcatggatccgcccgacgcaggtgcctgctgcgccgctgccggaaggccacccaagaccaacaacgtcgcggcgaatgtgaactgaccgagctttttcatcataagttccttattgggggtttcgacaccgcgtgaaccatccgatggtgctcgtggttccaaagcgaagcccaggcgctcctcggcagcgctcagcccgggatttcgtcctcctcatcggaacttccgcctcgcacgggcatctcgaagttagtcgctacgaacggcaaaatgccgacaattggtttagcctgcggcgtttggaacgtttgaagagacctgtcgtttgcaggctcggagcggaggatgcggcggtcgctgcagctccagggcacagatttggagcaccggcatgagcagaaaccataaaaacgatcaccgcgggaacgatgacgcgataattcagaccttcgatgactatcagctctatatcggcgatggcagctcaaaccatttttccggcccgagcagcgacatgaacatcacattcggtcggggcggcaacgatcaactatccggcgcgtccatggatgacgatttgatcggaggagccggcaacgatgtcctcacgggtggtgcgggcgccgatcatcttgtcggcggtgccggcaacgaccgactggttggcggggaccaagctgacatgctgatgggcggtcccggcaatgatgttctcaacgaaggcgccggtcacggcgatctggaaggcgggccgggcaatgacatgctgaccggcggtctgggagccgacgccttcgtcatctccccagatagcggcaacgatatcatcaaggatttccgcgccgggcccggaatgttcgatcatatcgcagtcatgaatctcgaacccgagcaactgcgctttgcggataccaaggccggtgtcctgatcagttgggatacgggcaaaggagatggttcggttctgttggaaggcgtctacaagaaagatctggcccaggacgacttcatgtttaccgacgaccgccacctgctcaatccggcggatgcgcattctgatcgtttctccgctgagcacttaggcacgaccggcggcaacgaggccggcccaggtccgactggcgcgcccaccaatgcgtcattcaccagttcttttgacgacaacaacgtgaaattcggaactgacgctcaaaatgacatgcttcttggcaccgccaagaacgatttttactttggtctgggcggcaacgattatctgtctggcggtgcgggcgacaatcacctcgacggcggggccggtaatgacaccctcgtcggaggatctggacaggacgacctgcgcggcggtgatgggaacgacaagctctacggcggcgccatgggcgacaacttgatgggcggagccggtaacgattatctcagcggaggtgcggggcacgacatgctggatggtggcgcgggcaacgacgtctatagcggcggggccggagccgacgcgttcattgtcgcgcatggcagcggtaatgatgttgtggtgggtggctttgatccaggtcccggagcgttcgatcacatcgcattcaccgacatcatgccaaacgaagtcaatgtggcggattctgcctcgaatcacggagatgctcatacaggcgtgctcgtcgcatggggcgatggatcaattttcctggaaggcatcgccaaaggccagatggctcaggatgatttcatgttcaacgccgtcgaaggcggggcgtttgttcctgacccccaaatcagcacggaaggaagccgcatgctgtttcagaatgggcaccccgattggccgatggcgtgaggccttcctcctcccctcacgtcgctcgtgatgcgggccatcatggctcgcatcacgagcgtttttgtaagtcatagacggtcgcggagcaccttgccttggacattttgcgcgatgacaaggacacataccgcccgcagctcgtcgctgcgcttgttggaatcgcctgcctgagtgcgctggtcagcgtgctgtacctgaccggctcgctgtatatgcttgaagtctacgaccgtgttttgccgagccgaagcatcccgaccttggtcgggttgagcgtgatcgtcgccggactttatgcctttcaagggttttttgatctgatgcgctctcggctgctggtccggctggccggggcggtggacatgtcgcttcgccgaaaaacatacgaggcggtcgtgcaggcgccactgggaccggcttcccgcagtgaagggcttcagcccttgcgggacctcgatcaaatcaggacgtttttgtcgagcaccgggccggcggctctgttcgatcttccctgggttcccatctatgtcctgttatgcttcgccttccacttctggatcggagtggtcgcctcgattggcgctgtgctgctcctcgctctgacgctg

SEQ ID NO: 299 - DNA, 4274 bp, Bradyrhizobium colbertium
cggcagcgtctgagggaagctcttcaagccgacgcgcggatacgtcttggcgtcgacgctcagaacccgcgaggtgccgagcgcgtccttgcgcgggcactcggcggcttcaggcgagctcacgccgaggagagcggccagcgccgcacctgacatcatcgacgtccatttcagtggaagcatctttgtcattgcgcttggagttgccttgtgggtattggctaaccgtcagcccagatcacccgttccaacctgtcaaacggcgaggcgcgccatggatgaacatatggacgttgccccatccgcctcggattcggtactcgaccacgtgccgatgcgcaatgaggacggcgagattcgtcacgaattcgtcgaggaaattgcccgtgcgatcgaggccggcaacagcgcggcgctgcgttcctgcgtcgcggagctgcacgaagccgatctcggcgatctgatcggcgcccttgagccggacgaccgcgtccgcctggtcgagctcacgggccgcgacttcgacttctccgcattgaatgaggtcgacgaggccgtccgcgaggagatcctcgaggaactgccgccggaaacggtagccgagggcgtccgcgagctcgagtcggacgacgcggtcgagctgctggaaaccctcgatgaggccgagcaggaggagattctcgaaaagctgccgctcaaggagcgcgtcgcgctcgagcgcagcctgctgtacccggagaattccgccggccgccggatgcagaccgagttcatcgccgtgccccaggattttaccgtcggccaggcgatcgactacatgcgcgagacgccggatctgcccgaccgcttctacgagatctacgtcgtcgacaaggaccagcactggctgggcgccgtgccgctcgacgtgctcttgcgcacgcgccgaccggtggcgttgaccgagctcaccgacgaggaccgccgccgcgtgtccgtcctggaggaccaggaggaggtggcgcgcatgttcggcaagtacaacctcgttgctgcacccgtgctcgacacccaggaccgtctcgtcggcgtcatcacggtcgacgacgtcgtcgacgtcatcgaggaggaggcggacgaggatctcaaggcgctcggcggcgtcaccagcgacgaagaattgtcggacaccttcctgacgattgcgcgtggccgcttcaactggctgctggtgaacctcgccaccgcgttcctggcgtcctcggtgctgggcctgttcgaggggcagctggagaagatggtggcgcttgcggtgttggcgccgatcgtggcgagccagggcggcaatgctgcgacccagaccatgacggtagctgtgcgggcgctggcgacgcgcgagctcggctcctccaacgcctggcgcgtggtgatgcgcgaggccctggtcggtctcgtcaatggcctggccttcgccgtgatcacgggcatcgccgcggtcgcctggttcaagatccctggcctcggcatcgtcatcgggctggcaatggtctgcaacctcattgccggcgcgctcggcgggatcctgatcccgatggcgctcgaacgtgtcagggccgatccggcggtcgcctccggcaccttcgtgacgaccgtgacggatgtcgtcggattcttctccttcctcggaatagcgacgctctggttcgggttgaggtaaccgtccactcgctctctccccgtcattgcgagccaacgggtccgcgcgaagcgcggcccgatgacaggctccgcgaagcaatccagaatccttgccggtttcgcgatctggattgcttcgtcgcaagggctcctcgcaatgacggagtatgggacagctgcgccagccactcgtgtcgtcccggtcgtgccgcgccgcgtccggggcgcaggaccttttaatccgaacttaagcgacctgacgcatcatcgcgtgcgactgggggaatgagcatgcggttgcggctgaaggcggacgggcggattgtcgaattgcgggacggacatgaatttccggtccagtccgcagtcaatgccgcgcccggggataccggcccgctcgcggtgcgcgatttgcgccgccgcgcctgcctgacccagatggagttcgccgccaagctcggcgtgcccgtcgaaaccattcgcaactgggagcagggcaagcgcgccccgcgaggcccggcacgcgcgctcctcgccgtgatcgcgcacgcgccggacacggtgttccaggcgctcgccaaggtctgacgcacacctcccgttagcattgtgctgaatattcggccgggtcgctgcggctttggttggcagcgtcatgagccgggtccataatgacatctggggctgccgcaacagagaggattcctcatgctgttcgtcgaggccaatggggcaagaatccccgcgatcgggctcgggacctgggagctgagcggaaggcctgcggcgcgcgtgatcgagcaggcgctgcggctcggctatcgccacatcgacaccgcccaggcctacgacaatgagcgcgaggtcggcgacggcatgcgcgcctccggcgtgcgccgcgatgacgtcttcctcaccacgaaggtgtggaccaaccatttcgcgcccaacgatctcgaacgctcggtcaaggagagcctcgcgcggttgcggcttccctccgtcgatctgttgctgctgcactggcccaattcgcacgtgccgctcgcggagacgctgggcgcgctgtcgcacgccaagaccatggggctgacccgccacatcggcgtctccaacttcaccgtggcgctgatcgagcaggcggtggcgctatcgccggagccgctcgtctgcaaccaggtcgaatatcacccttatctcgaccaggcgaaggtgagggcggcctgcgaccagcacggcctcgcactggtcgcctacagcccgatcgccaaggggcgcatcaagaccgaccagaccctcgcggagatcggccgcgcccaccgcaagacgccggcgcaggtgtgcctgcgctggctcttgcagcagaatgtcgccgcgatcccgcgtaccatgcgggtcgaacgcctgtcggaaaacatcgacgtcttcgatttcgagctttcggacgacgagatgggccgcatcgcctcactcgccaatcccggcggacgcctgaccgactttggctttgcaccgaaatgggattgaggggagaccgcggtatgctaacagcagggcggcaatccaagatcggtcgatggaactgcggacaatcatacggacggacgttgcggcgtcggcgatcgcgcatctgaccctggtaggactgatcatcctgatcagcgaagtccatccgtttcaggccggcgcgcccgagacggtgacggtcgatatcgtcacgccggagcaagtgaagcaggaggaagccaaggccgagcagaaggaacaggcgaaggagaagccgccggagccgactcccgatctgagattgccgaagctggatctcaccgacaagtcagaggctgcggccaagcagcaggccgccgcgccatcgccgtcgccgcaggcctcgcctgagccacagcagagacagccgcaaccctcgcagctgccgaagcagcgcgaggctgatgtgcaaccgcagcctcgacaacccttgactcaacaaccgccgccgcagcagctgcagtcccagccgccacctcaggcgatgccgcagcagcaaactgtgccgccgccggcttatccattgccgcagccggacgtcaccgtgaaatacggcgtcatgctgggtctgccgcccgaattgccggtggagccgaagggcgcacccaaggacgacggcggcgacgccaaggactcgtttgctgcgaagcttccgcccgaaatcatcgcggagcttcgccgtcatttgagaagctgcgccaagctgccggccggagtggcgccgaccgacagcgtccatgtcaagctgcgcgccgtgttcgccaccgacggcacgctggcgcgcgagccgatcctgatcgaagctccgccatctgcgaagggcgtggccatcgtgaagtccgcgatgaatgcgctgcagagctgccagccctacaagatgctgccggccaatctgtatcaggagtggaaggtgatcgacctgccgttcagcccccgggatttcggaagctagcatcgtagcccggagggagcgcaggcgaaatccggggtcgctcgcccggcatctcgcaccttcccggaatacgccggcgctccaccgtgtccgcggcgtg
